United States Patent Application Publication US 2006/0134663 A1 - sequence listing, part 37

SEQ ID NO: 62260 - DNA, 156212 bp, Homo Sapiens
aagcttctcccggagttgggcagagaagggttaatcaactagaaaaatgctgagagcctgtctcccataggcagccagattgaggcatgaagaggaggagctggcttggtggtgtggtgaatgagtgctccctgcatctgtcttcacatggccttcttatagggacatcagtcattagatttaggccccatcctaatccggtatgacctcatcttaagaagattacatttgcaaagaccctatttcctaatcaggttgcattcacaggtatcggcggtcaggacttcaatatatctttctgggggacacagttcaacaaggctcaatgaggaaagaacattttgattagtagggaacatcgagagcagaggccccagggctgcacaaggtggatgtccctgtcgctgcccactgttctcttgggactacacagatcctggtgcctagcagctgtggaaacagagttgggaggcagccgaccctctggacatcaggccttttcagctgaccctgcccagcctggtgccagagcagggccctgcctgcctgcccctcctccctcttcctgcctggtcctcattcccacccacatcccaagatggacaaggacaataaaagctgtttcataagcagctggtgattaattgccaagctaattaaagaggcagtaattgcactctgatttcagaggaaggagtgatgtcttgggcaggggtgggtggtcagcttaggtctccctgacaaggcagagccagaagacagaaaggatttgaaaagccaggaagaaaaaacaggtgcactttttttttttttttgaaacggagtctcgctctgtctctcaggctagagtgcagtagtgcaatgttggtccactgcaacctccacctcccaggttcaagtgattctcctgcttcagcctcccaagtagctgggactacaggtgcatgcccccatgccccaccaatttttttttttttagacagagtctcactctgctgccaggctggagtgcagtggcacgatctccgctcactgcaacctccgcctcctgggttcaagcaattctcctgcctcagcctccctagtagctgagactacaggcatgcaccaccacacccagctcatttttgtatttttagtagagacagggtttcactatgttggccaggctggtctcgagctcctgacctcaggtgatcctccctcctcagcctcccaaagtgctgggaccacaggcatgagccactgtgcccatccgaagcaccctctttctagaggtgcacctgttggctgcgcacagtggctcacacctgtaatcccagcgctctgggaggccgatgtgggtggatcacctgagctcaggagttcgagaccagcctggccaacatggtgaaaccctgtctctactaaaaatacaaaaattagctgggtatggtggcacgcacctgtagtcccagctacttgagaggctgaggcaagagaatcgcttgaacctgggaggctgcggttgcagtgagccaagattgcaccattgcactccagcccaggcgacagacagagactccatctcaaaaaaaaaaaaaaaaaaaatagtgggtgcttcaatcatagctgcacatagctgcaatatttcatttgacagagtcagatgggggacttagatgcttaagcttatctctgtacttttccatgtcttcgaaatatttcattaacatccacacacacacaaaaatggcaggggagaggttaagtgtttctaaattctagtttgggatttataaatggcttcaaataccagtgtgccttactttacacagtggagagggtcttaaaattctgcgtcaattgaatcccgttggcctacccagtaaatcttaacgcctctgatgctctagcttcatttctgattgattttccctggcagaggtaccaaattctttgctttaagtgtcaggctctctctgtcaagtagttaatgacctataaagcacttaaaacgtactggaggagatgcgatttggaggcaccctgcagtgtatcctctcttattgtcggtaatcacccctcatttatttgctcttattggtttggaatttgctatcaggttttcctaaagccaagcccaccaggaatggtccaattctatgtgggcccagatgggtgccgggattggaacctaggggcagtgggcagccagtgtggcctctttcctcacgagcccttcggcttgggtgccctggtcatctcatggccacacattcagcggctctgcctcttgccagctgagtgatcttgagcattcagtgcccccctccaagcctcactttcctcttccacactgccccagagctggtgcctgcccctgaacaactggaagatgactccagcctggtgaagtcagtgctgggagccgtagaagaggcccaaggtcagggtgagcatggaggtcatgaccgaggcaagctccagggtcagaggtcataggaagcatccccaaggagcacaaaacagggtgggccactgacctcggggcagaagagcctctcagagaggggcccagcctgggaggcagaataggctcttctaggagggaaagtgtcttcattttcttttctttttttttccttgagacggagtcttgctctgtcgcccaggctggagtgcaatggcgcaatcttggctcattgcaaccgccatctcccaggttcaagcgattctcctgcctcagcctcctgagtactgggactacaggcatgcaccactacacccagctaatttttctatttttagtagagacaggtttcgccatgttggccaggctggtctcaaactcctgacttcaggtgatccacctgccctcagcctcccaaagtgctgggattacaggcgtgagcctggccagtgtcttcattttctatggctgctgtaactaatcaccacaaacctggtgacttaaaacaacacacgttatccctattgaaaagccgggagaaaaaagaaagaaaaaaattattttttaaaaacccacaacacgacacacatttattttcttacagttctcaagaccggaaattcagaatcagtttcaacaggcagaaaccagggtgttcacagggccacgttccctccagaagctttgaggagtatccgtttccttgccctctcctgcttctggggctctgttccccggctgtggcctcttcttccatgttcaaaaccagcggcgtaccatcttcagacctctttctctgcttccatcatcacaccaccttctgcctttggtctgtaatctccctctgcatccccctttataagggcgtttgtgattgtaatgatccaggataacctcctcatctccagatccttaatcacatctgcggcgcctttgtcatataaggtaacattcacaggttccaggattaggatgtggatatcttggcgagggtgggattcttcaggctaccacagaaagccaccaaccaaagtggttcagatcatggattctgaagccactgctggggcctgaatctcaactgcaccatctgccagctaggtgactttgggcgagttgttatatctttttaaggctcagtttcctcatctgtgaaatgagatcaatgcctacttattgccacagataaaaactgaataggcatttaaccatctgacaggtagagggagtttcatgcgccagagcctggaccttgaaagaggccccagcagggcccttctgtaggaggaaaggaggaagggcaggaaagggtacgggcagggcaggctgggtggaggaagaagctgaaccacgtcccagggaagtgtgtgtgtgctctgtcctaagggtaatgaacaggggacaacagaaagtgtttaagtagggcaattttttttggtttatttttgttttgtgttattgaaatgcaattcacatattataaatttacccttttaaagtgtacaattcaatggattttagcatattcaagaggttgcgtaaccatcactgctgtcgcattccagaacatttccattacctcataaaaaatccccatacccattagcagttcttttttttttttttttttttgagacagagtcttgctctgtcgcccaggctggagtgcaatggcgctatctcggctcactgcaagctctgtctcccgggttcacgccactctcctgcctcagcctcccaagtagctggaactacacggacccgtcaccacgcccggctaattttttgtatttttagtagaggtggggtttcaccgtgttagccaggatggtctcgatctcctgacctcatgatccgcccaccttggcctcccaaagtgctgattacaggtgtgagccaccgtgcccggccagcagttctttttttttttttttttttttgagacagagtctcactctgtcgcccaggctggagggcagtggcaccctgtcggctcactgcaacctcagtctcctgggttcaagcaattctcctgcctcagcctcctgagtagctgggattataggcgcccaccatcacgcccagctaatttttatatttttagtagagatatggtttcaccatgttggccaggctggtctcgaactcctgacctcgatgatccacctgccttggcctcccaaagtgctaggattacaggcgtgagccaccgtgcccggctgtctggataatttttgtatttttagttgcgatagggtttcacccatgttggccaggcgtgggccactgcgcctggcccccattagcagttctaaagctctctgcaaccttgaactccaatcttgagctccaggcttgaacccaggaagaaggcaggggtgccttgagcaccacaatgaccatctctatttctggaactggtcacttggctgtgggtcctacccttatccctgggactcagctgcacagacttgtcccaatgggtcaggaaggacagcagctctcctgactccacccccgtcacatgacatgccagggttccccacccataaggggcaggagattgtggggctgctggaggaagttgtgggggcatttgaggctgagtgctggctaagcagcaatggcttatgccggtaatcccagcatttgggaggccaaggtggcaggatcgcttgagctcaggagtttgagaccagcctgggcaacacggcaaaacccggtctctatgaaaaatacaaaaaattagccaggtgtgatggtgcgcacctgtagtgccagctactccggaggctgaggtagaggaccgctggagcacagaggttgaggctgcagtgagctgtgatcgcaccactgcactccagcctggatgacagagtgagaccctgtctcaaaaaaaaaaaaaaaaaaaaaaaaccaaaccgaaaacacattaaaatttttctttttggaaaaccatccaatcagccagagagacacagaaaaaaaggagcttctccagtgctccccacacacccccgccaccacccctggccgggctctgttctgctggctacttgggggagtctcaggccctgaatgatcagggacatgtggcctggcctagaggcagctgaggcaggagggaggccatctggtgaggcgagaggtagcggtcaggacattgctgagtccgctgaggcatcccctggcagtcacaagggcttctgggatcaattagcagaaccaccctaacagggctcatggcccctgacgcaggcacgtgtcctcagagcctcttgacagccttggcagccaggaattgaaaggaggtgggggagggggatgtcggcctttcccctgtgcctggcctcgcctccaacagctcagcacagagcctccccgccctccccattaggcggaggctgccggccttccagagcctgcacttcttattgccttgcttctcctggtgttgtgggtgcagcaacagtctgcctcaattttcacatatgtaaaatgggtcatatactaattaaagatcacttcctggaaataaaaaaaaaaattatccctttttcactaagaacaggtgttgaatcaacagcaaaggaaaagactcctttattttttgaacaaacagctcctaagcccctactgtgagtcaggcacagacaaagagagacaaatgaggtgtttgccatgcttgggaaacacgggaattctggggggagatggatgtgtgtgaactgattcagtttgaagaggtcaaagaaatgagaggattcagtaaactgcttggtgtgggagggggctttaaggaagacttcacagtggaggtagcatttttttttttttttgagatggagttttactctgtggctgatatctgtggtatgtgccaccacacccggctaatttttgtatttttagtagagatggggttttgccatgttggctaggctggtctccgactcctgacgtgaggtgatctgcctgccttggcctcccaaagtggtgggattgtaggcgtgagccactgtgcccagctggaggtagcatttgagcaggaattcctcaggcaaagaatagggtgcaggtcctcagggcagggagaatggtaggagcccagactcagaggtggggagctcagcatcttggggaacagcagccatagatggaagcatgaatggagctggggtgactttgggccagtaggagccaatcagaaatgagctggtggactccatgaagacaggactgtccatttcttattccagccacagcactgggcttgacacatagttggagcgggacaaatgttgttaaaagaatgaaggatggccaggtgtggtggctcacacctgtaatcccagcaatttgggaggctgaggcaggcggatcacttgaggtcaggagtttgagaccatcctggccaacgtggtgaaaccctgtctctactaaaaatacaaaaaattagccaggcgtggtggcactcatctgtgatcccagctacttgggaagctgaggcaggagaattgcttgaacctgggagacagaggttgcagtgagccaagattgcaccacagcactccagcctgggtgataggagggaaaccctgtctcaaaaaaaaaaaaaaaaaaaaaaaaaaaaaaaagccaagcatagtggctcacacctgtaatcccagcattttgggaggccgaggtaggtggatttcttgaagtcaggagtttgagaccagcctggccaatatggtgaaaccccatctccactaaaaatacaaaaaaaattagctgggcctggtggcacgtgcctgtagtcccagctactcgggaggctggggcagaagaattgcttgaacccaggaggtggagattgcagtgtgcccagatcacaccactgcactccagcctgggcctcacagagagactccatctcaaaaaaaaaaaaagaaagaaagaaagaagaaaagaaaaaaaaaagtgaaggagtggtaggagtggtaagagccctgaatgtgagactaaggggttgagccccgatcctatggacagtggaaaccactgtgagttttggtatagggtgtgaggtaggggtcatgtagaggtttggctctcccagcaccaattgttgaaaagactgttccccattgaatgatggtggcccccttgttggaatgaattgaccattaccataaggtatggcaggcttttgagagaggaatcatgtggtcagatatgtattatagaaagatcaggtgagacttgtttggactgggaatggctgggaggaggaggggttggagggaggctcttatgggtggacttgatggcagggggacagaaggggcatctggggagaagagacatccctggatcagcccatggcgggcagcaaggtacagggctatgtcctgagccaaggccaggatctggcccacttgggcctgtggaactcactgggggatggggatggggcagtcaagggagagacagagaaaatgcccccactcctcggcccctcaaggtcctcaaagtggtaaaataaaacccactccagatatagccatttgcaaagtcagttttcaggtaatgaaaggattgtaatggaaaaacaatgccaattacagcagcattatccgggattataaagcttctaagaggcggctcacacctccaggcatgctgtgcctgggaatttccagggtagacttgggatcagagcatacaggctgccaggatccaggcctcacagtgggcgtgggctgctggggaggcccaacccctggggctctatggatctgcctccatttccccaaagagatagaataccgggaggcaggaggacccccccaacttcacacacacacacacacacacacacacacacacacacttctgagaaattggataagaggaatgtgaggctgccagcccatctctgaaggaaacctgttcttctgtgggcttccctactcctggggacaccacatccctccatggctctttctgcctcccccatcacctcccctacctggccttggggacagcaggactgcacacatgcccttggggacagcaggactgcacacacgccgaggcagcccagcgttgctcctcctgggctgtgtgacctggagccagtcagctgttctgagtggtagcttctgcttcgataaaatggggagatcacccctgcccaccatcacagacctattttcaggattaaatgaaatattctagataaagagtccgaggaatagaaaccagtccaacctcggggcctggcgatttggtggtgactgttagaacagtgaacttctatgcactgggtcccaggaatccctcctcatttcccatagggaaagttttgcagatgtgtgtgtgtacaaggatgttccctgcagccccttatgtgaggttgaaaaatcataaacaactgaaaaggccttcgatagggggcctgattaaattaggatccatctgtcctgcaggatcctttgctgtaattggagtctggcagctcctgtgtgctgtctccggcagatcccaccacgtggggctgcatcaacaaagcaagtgcaaacaacacctacaaaatgaatgcatcgcggctgttcggaagcccgcacggcgctccacattttacatgttcacaggtagacacctagatgccataaaagcagcgacgaagaaaacactcccaaatgacccgattggttactactggggaggggacgggtatggaggctgggaggtggcaggtgcatcagaggagtttcactttgctgtagttttaatgtttcactgtaacatatgcttctgtcacccacatatgtcacctccagacacacacaaaacacacgccaacaccaagttcagagagtctggcctgacccgcgctcagtcaaggctgaggccatcattctgaccacaggtcagggaagggagactggggaagccccctcaggtggacaaatgacatcccctggcattgcaaggaatggagtgacgccactcagcctggctggactgagccaacggcccacctctcctgcataagctgtctgccaagaaaactattgaactacataaaaatccatccctgaaatcccagaggcatctttagaatggagcatggactttacattagaatgtgctttaacaaaaaaaaaaagagagagagagagaaagaaaaaggaaaagcaggttttgcctgtaacttgagttcaggtttgtgacactgggtggccaaagagcactgcctaccctggccgaggccaccaggctcagttcctgcaatattggctgtgaagggaaccccagccacaccgggttcagcgcagaaccagcacatgttcccatggaaactctgctgccagaatcccctggaaatgtttgctgaggaggggccaccgtttaccgcacccactgcaagttctggactggtggtagaggctgggcacagactgacctccagaagaagtccatgggccctctgctagggtggcaccagacttccctggtcccacaggacagccagtggcctcctagcttagttctgggcccccgcctgcaagcacacgtggcaaggagggcttcagcaggctcgcagaaccgagtggcaaggcccctgctcccagaagctggtttcccaggatgattttctcaagcaagtgctgacagagcaggagtcaagcgggggtggggttggaggctgaaacccattgaaggggtcaacttcctagaggcaggcagggatgcctgggggtgccagacgtggctgagatgtttctgcagaggggaggttgggaagacctaggagggcagggcaggctgggccgggagagatggtgggaaatcccaccaggtcaggggccagtgggcagagggaagcatcagctgagacccagagacagggctgccctgctgcggtagggcccaggggcaggggcctgcaggggctgcctggggcttcccttccccaccctaactccagtccccactcaggactgctcacatccgtccgtcctggaaggtccacagctccccttcacctaggcctcacctactccactcaagccaccccatcccccttagcttttcccctccaggcccattcattcagctcctgctaagccagcaccctccttccctcacctctctgcttaccttgctcccacccccagctctgggcagccctggcctgtccatctgatcgtgctaccccgtaggcactccttaaaggcatggctgcagagagcctgggcccagctcccagggaggcctgcctctcacttagactcctctgtactgccccagaagcctattccttctgaaggacgagtcttgaaggaaatgcacacccactgagcttctgcctgagccagggagtccccttctgtcctttctgagacactgagtagtgtttgtttgtttgtttatttggacagagcgtgctctgtagcccaggctggtgtgcagtggtgccacttcggctcactgcaacctctgtctcccaggttcaagagattctcctgccttagcctctcgagtagctgggactacaggtgcgtgccaccacaccaggctaatttttgtatttttagtagagacggggtttcaccacgttggccaggctggtctcaaactcctggcctcaagtgatccacccgcctcggcctcccaacatgctgggattacaggcataagccactacgcctggcctgagctgtcttgactgtcactgcaaactgaggctcaggtggccagtgacttgcccaagtccacaaggctgtgggaggtggagcagggattcaagggaggccctgaggccacccagcctgggtgggtctcaaaagcaattttcttctcttccctcctccacccattcatagtggaaagcaagcctgcaccccaggagctcccattcataccctctctgtcccctctctgttcttcctcctcccgcctgccccatgcacctcccaccctgaagttccctgccacccctcgccctgtgccagcttgtctctgcaggctctcagtcctgggggctggagaacaggtgctcagtcctctttgctgcccacagaagtctcagaacattcttgccccaccctcccttgggccaaagccctttagggtcccgtcctttcatgctgtgctctcctcctcctcctcctcctccctgcctctctccttgctcactgaagacctcagcacccactgcctcccagccttgccctgaaccaagcacagacgaccaccacgctggcaatgtctctgtccaccagaggggtgatgggtcagcccccaagaacctcctacgccacagggaggagttggaattttattccaagtgaggcaaaaaccatgcaaggtatagagcaggggaggccaaggccaggtgtgggtttaatcggggtctgtcggtggcagggcagctgcagggaggccgtgttggtgatgcctgggccagggcacagtggtaaagtttaacccaggctcccctgtctacccctgaaaaagactggaaaatgctgagtcccagccaagggtccagggtctaggagctgaggtcagagaggcccaggaggtgggggaggcaggcccagtgaggtggccctctcctggtcttgctggcttcggttttcccaggggagctcactgcaccctgagcggcattgtcccccattgccctgacccttgcccccacctccttggctggtggagccaggagcctgggaggcccctgtgcacacctggcagcttcacctccccaaacaggcccggagttcattcaaatccagcctctgggagcaggggccttgccactcggttatgtgagcctgctaaagccctccttgccatgtgtgcttgcaggcgggggcccagaaccaagttgggaggccactggctgtcctgtgggaccagagaagtctggtgccaccctagcagggccaagggacttcttctggacgtcagtctgtgcccagcctctaccaccagctttcccttccctgcagggaggggcatgacctgcagaaccaaaggtgcttctgtgagccagtagcccagtgctgcttgggggcaggggcggggcctgtgccttgggttcccccccctccctgggcacatttggggttggggcagcccacacggtggggtgggaagattgacctgcccattttacaaatgagcaaaggtgggagaactcagggagacatgggggagcagagggaggaagcagagcccaacagcccggggcacccggaccccagccactgcctgcctgtggatgggtttctggccacggtgcagggctactgcgaggaggaaatgagggtgatgtgggcacctgaaacagcagaaatggctcagggccaggcactggggagccactgtccccatggggcttgagcttctgcctcagagggaccttccggctgccattgagggtcccagcaccaaaccccacagctggaccacttgggacctcaatccacagggggccagggctgcggcctatggcagataaagatagaggaggagggctggatgaagccacaggtggtgggcacaggataggccagacagaagggactttgggggactccaccttgggtagaaggagggacagctgaggtcctgtggtggagaaggcctggagcagagggtgaccaaggagatgacagagtgcacgtacagggccaggccaatgggagtgggaacccttgggagagggagcttcaggccattcattcagttcctgtttagccagcaccctcctcccctcatctgtccctctgccctcaccccaacatgccagaatctccttcctctccagcttgtacccaagccctctctgctccatgcccccagcctgctgaccacctctcagccatgtcctgggcctccagatctgtccctgatcctagtcttgcctctgaggggtccatcatccttgtctgtcccccagacctcccacgccagcccctgctcccaccctgcctggctgcctcgtgcctctggcccagctgggtaggtagggatttgcatagctgctccccagctcctccatacctcggctccccacacagcactgctaggcgcccctgcagggtcctccctcagctcagaggctgccctactggctgaggtgcaggctggtgccaagagagcatgctgctctgtcagcatgaggcagtgagcagggctctgggcaagggtggcatccaggaaagcccttgaagactgaggggcgctttgctggttgggccaagggaggaagggcctgcctggcagaaggaacagcctgggcaaaggccccaagatgggaaagccttggtggttggggcatagaatgggggggcagtggggccggccaagacaggaagggccttgaatgtgagggtgaaatgatggggtgtccctgggggccttactcccaactcagatcaagtcctttggtggcaggggctgccccggtcctctgacccagggcaagctctatgagcggtggagcccatcctagagattttcatagaccaggttaagttcgccatcatcttcgaatctatgcggtctctcctggatagaaaagaagaaagggagggaaggagagaaagagagagaatgaccattaagaatgaacttgcactaatttagttttagccagagggcaacagatcacttcctgtgtagctttgatggggggcctgccctctgtctccaagcccacctccccagcctcttcccccaccatgctgcccccacccctgcccattgccctccagccacatgggcctgcccttccagcctcagagcttcccccacagctctgccctctgccttctgccctatgtgtgggatgcgcctcctcccacagacacacctgttccatgactgccccctactcactctgcctgcgggctcatcatagggtcccagggaccccctccctccctccccaccctggctggtccctcccagaagaacacccctcacaacagggctacaaatgcctctgtgtgtccatggggtcagcgacctattcctgcagactatggctcccagagggtagggacatgcctagttctcctgtccagcaccccagggcctggcacagggtgggcactgccggagatgtccctgctttcactcagggtctagttgagggctgagtatagaaagggctttgagaacaggcgatttaacaaatagtgccagcccgagccagagaaggccaagtgccaggcgcccgcactccctgacagatgttccaagaggcctgtgggctcctgttctggctgaacaacgcctcacgcttgacggtgctggaagctctggtgcagatgttattcagcttggaacacatttgaattcagaggcagttggtattgcaggaaaacactgctcatccactttacagatgagcaaacaggtttaagagagaaagtatgggccgggcgcggtgcctcacacctttaatcccagcactttgggaggctgaggtgggtgaatcatgaggtcaggagttcgagaccagcctggccaacatggtgaaaacctgtctgtactaaaaacacaaaaaattagctgggcacaggggcgggcgcctgtaatcccagctactcgggaggctgaggcaggagaattgcttgaacctgagaagtggaggttgcagtgagctgagatcgcgccactgcactctggcctgggtgatggagcaagactctgtctcaaaacaaaaacaaaaacaaacaaacacacacacacacacacacacacacacacaaaacaaaaacaaaaaaaaagagagaaagtatgattgggtaatatgcctgaggccctatcatgacaatcacagaaccctgaccaggccagcccagcttctaccagctcacactctagctccagactttagccaacaccaacctgggggcagctggaagcctaacacccctgtctgactgaccatgtggacactgtgcccagtgatagttacagtggctcatagtgcatgggcacagctgggtcccaggcagctctctcagtacattctaccctcactgaacatctatgaggtgggtactgttaggttgctcaatctgcacacaaggagattcagacacagagaagtcagacacctcggccagggctgcacagtggctaagggacagagcaggaactcaaacgcaccagtcctcttaaccagcaggccagctgccaccaggagatggctgggattccacagcaggtggctcacttccatgtcccatttgcccccccacttcaccagtgatgggagggtcagatggagcaagaagccaggcttggtgccccagcgcctgtgtacctgggagagggggctctgcttggcggtgggtgagctgccatcctcattctcgatgcaggcatagacctcggtctcgcggcgctgcagagcctacaggaaacggggtgccaggatcaggggcaagtgtgtagaggggcagtccctggccccagcagccagccccctgcctgttacacaccccaccgtgggagcccaggggagggtgaagcccagccacacctttgcacctgccaccccctttcccagagtcacctttccccttccctgcctgtaaagggctgacccctctctgttctcggccacctccctaacctcccttaaggacctccagtagagccttgtattccacctggagggttctatccaggcttccacctggctggcaagagaaagggccaggcctcctcctgctgtccctgcctgtccctaggctcttaagggcttggcagccagcagccccctgcatgatacctgtggccactgctccaataggatgcccccatgacctctgccttcacccccctgttcaaagccccggcccctgtgagggtcctcccacccacccataccctctagctctccccaacccccaccccagcctgtattcaaggataacccaggcacccactggggtcacactccctggtcatcgagcctgtgccctgctgggggattccagagtccaatcctggttctcagcacacccctcatcccccttgcctgtcactttcctttcattcccctcagccacccctcctgggccacctgggctgctgtcatcacccatatgcgcctccctggaggtctcaagctcctgccacccactctctgaccacggtccccccatagcccaagcctcctcccaggaagcccgagtcagtattgagctcagctgggcttggaggccctgtccctggcctcacggctcctgcactgggtcatgtcggagtcctgctcccaccagcatctcaccagatgggaaccccttgagggcagggaccatgcctagtctatctctgggtttctgattctacagctgtgcttggcacaaagggagcagcaccaaatgagctatggtaagggggcttccccgtcactcgggtgtgtcctaggcccactcactcttggcccagctaagaaaggcctagccagagacctcaggatggtagaaagaaccggggctttaaagtcagacaagagtaggttcgaatctcggctctgactgcgccagccaaaggcaaccccttaaccgctccatgcctcagtttccacgtctgtaaaatgggaataatcacatctattttgcaggttcaatgcatgattaaatgagatactgtgcacaaagggccacacacacagtcagggaagtagtaggtgcttaataaactgctgttgaatggtcaagagaagcatgaggcctgcccacctcccctctctgggatcacagaccagaccctccctcagaacctgttggactccggagcagagcccaccaacagcctaagcaagagcagaagcctttccttcctgagtgtacgtgtcatatggatgccggctggttgccaaggaggcggtttccctggcaacaggcaagcaggggttgctgaggcaggctggagagacaggtggtgctcagaggcaggaggagggcgggaggcgggagggaaggagggagggaggcaggcgccaagaggcagctgggcatgaaaatccaagtaataaaccatttggcacttgggagaccctcacttcaagggcatcagacatggggatggtggggcggccctgaggacgagttcaaggggtctctgagccagaaacaggctgggtctggggagaggggcttccaacctgcttccttgtaggaaagggaccagggctgccccaggaagaagcctcatttggaatggagggaaacttccaagtcctgccctgccttgtgcggccttcgtgcctgtccggagcaccagccaccccagctggtctggcacccaggatgggaatgttcctctgtggtcctgtgcccccaaccctccacccacccaggcccagaccccttctaagtctcacagatctgacagtctctctgagctggatgattctggtcacagagaaaagggaggggagcagtctccttgcccatgtctcggcaggggagtagatctggggttccctctccctcctgtccagctcagccgggctgcccagaacacatgagcccagagagggcaggtgatgcagggccagagaagactagcctgccctgggatgctgcaggcccccaacccatacagtgggggagtcggggaataggcgagtgggcggtggtgcagtgggcagggcaggagcagctgcggggctgagaacaggggaggctgcggaggtggccaccaattagcagctgctgagtgaggccttgacaagtcctgacccgctgggtgcatttatatgcagggtatgacctgcatcaccaggctgtgaaatgcagggtgcagccttggcaacaggacaccctttgagctcctgaaccatcccctcctggccctcccttaggtatgcctgctgggagattgcacaggccttggaatgggccacttgtggggctggggctgggctgggctgggggttgggggctggggtctgggagggtgctgggctgtggctgggctgggtgttgggggctggggggctgggctgggctgggctgggggctgggctgggctgcggctgtttgtctgggatccaggccccccaggccctttgcctcctgctgcccagtgggcaatggtgctgaccccagtgatcatccaactggcagaggtgtgaagtcaatgctgaggccttctccaggcaggctgaggccagagctgaagttagtgtccctgggcctggacctagtctgagagtcctgggcattgggggtgatgggtgagatctgggggtgttgttcgggaaggaacacactccgtggagaagcaattcagctctagaccaggcagtggaaatggggagcccctgaaggctttcctcaccatgcatcagagtcgtgtgttagaaaggtccctccggcagcagctcagagcaggaacgggagcaggagggcctggaggctgagagtaagatcgaggatgctgggccaggctgggctgggacagagccgccgggtgggtgggggttctgagtactgctgctgaatgaggacgcagatcacatcctgacgcctcacatttgctactgagtgtccccacttccctgtgctgggccccgtggaaacccggacaccctgggaggtaagaacaggcttctgcccatcatatagtaggtgacccctgagcacttactgtgtgctgggtgccaggaggctctagattgacaataatcacagtaaaaggtagccatgaaggcactggagagactcaaagaaggaagatagggaggttgggatgggacaggaaagggaagagggggcaattttgaaagggaagtcaggaaaatgctgcactgaaaggtcccatgagggtagagagctgaaagaatgagggagcgggctgggtgtggtggctcacccctgtaatcccagcactttgggaggctgaggagggcaggtcacctgaggtcaggagttcaagaccagcccagccaacatggcaaaaccccgtctttactaaaaatacaaaaattagccgggcgtggtgacgggtgcctgtagtcccagatactcaggaggctgaggcaggagaatcacttgaacccgggaggtagaggttgcagtgagccaagattgtgccactgcactcaagcctgggcaacagagtgagactccgtctcaaaaaaaaaaaaaaaaaaaagagggagcagccgtggccagtgtcaggaaggccaccctggggcggagggaatagccagcacagaggcccagggcgctgaccttgacccttggtgagaggggaacctctgcaggaccgtggcggtcgtaagaactgcttcacagacctccacttcaagggatcggaactgaccaagggctcaaaaccgcccagctgctgggccttgaaacctgttaccacatttgcatggaggccacatgcctctgacctgggcactcctcacacccctaggcagtgtgacggtttaggggcttccttcccttgggatcagacctgctccgcggaggggctgctctcccagtcttccccagccccttcctcatcttctctcccagagggtttctctaataaaccccttgctcacctaaccccatcttggtgtctctgtctcagagggctctgagcagagggccatgatctgtcgatggcttaccaggatcattggctactgccaggtgaaaaatgaacaggggtcttgggggtgggggtagggggacatggggaggggaaaggataaaaatagaccagctgcttagagaccaactgcaggactccaggcaagaaacgggagtggctcccaccagtgttagcgctggggcagtgagaagggctggattctggatacgttttgaagcaagatttgttgatagatcagatatgggcagtgattgaaacacagatggagagaacaacttcaacatttccagcctgagcaacgggaaggatggagcagcgatgaggagacgtgggtaagaggcactcagaggggtaaaaagttggagttcgaggctgggcgcagtggctcacatctgcaatcctagcactttgggaggctgaggcaggcggatcatttgaggtcaggagttcgagaccagcctggccaacatgttgaaaccccatctctactaaaaatacaaaaactagccgggtgtggtagtgcgcacctgtaatcccagctactcaggaggctgaggcaagagaatcacttgaacctgggaggcggaggttgcagtgagccgagatcacgccactgcactccagcctgggtgacaagagcgagactctgtctcaaaaaaaaaaaaaaaaaaaaaaaatcggagtttggtttgagagagatgttgtttagacattcaagtggggttgactctggtgttcagaggagatgtctgggctggaaatataaacttgggagttgtcaggatatagatggtcttcagaaccttgtggctaaatgacatcacccagtgaagggaatgaagaagaaaaagggtcccaggatgggctccaacatttactccaatctttacagttcagggttccactggttctggaagaggaacaagtgaaaggggctgaggaggtgtgatggtgaggcaggggaggatcaggagagtgtggaatgttctggaagcaagtgaagaaagtgtgtttgaggaggagggagagctcaagggtgtcagatgccgttgattcatcaaggaaggtgaggaccgagaactgcccattggtttaacaatgtggagtcaatggtgaccctgagaaggaaggttctggcgaagaggagggttgcaagcctgtagagagaaacagaaaggagagggagaggggctgaaggtgagagggctctgtcaacgctggaggaactctgttctaaggtgctgtggagaaacggcagggagctggagggggatgcgggctcaaggaatttcagatggaagaaatcacagcatgtttgcaagctgtaaaccaatattgtactgttaaccctgttttgcagattatggaactaagactcagaaagtttaagtagcagacccagtaagcaaaagaacaaggctcggatgggggttttggtgggtttgtctgacccaccccgaattcatgcttttaatatgtcaagttttttcttctatttttaaatttatttatttttatttattttgtgacagagtctcgctctgtcacccaggctggagtgcagtggcataatctcggctcactgcaacttctgcctcccaggttcaagtgattctcctgtctcagcctcccaagcagctgaggcaacaggtgtgcaccaccatgcctggctaatttttgtatttttagtagagagggggtttcatcatgttggccaggctggtcttgaactcctgacctcaggtgactcacccacctcagcctcccaaagaataggtcaagttttttttaaaacaaattgaagtagtaaagctttttttttcatgtcataatatgccatgagcactcttccacatgaataaaaagcaagaattgacaataattaaaagaagaaatagacaaatccacaatcatactggcagattttaactaacttctgttaaaaattgagaaaacaggccaaaaaaatcagtaagaaccagatgtggtggtatgcacctgtaattccagctaatcgggaggttgtggtagaaagagcacttgaacccagaagttcaagaccagctgggccacatagtgagaactcatgaaaaaaattatttatttatttatttattttattttttatttttttgagtcggagtctcgctctgtggcccaggctggagtgcagtggcatgatctcagctcacagcaacctccgcctcccaggttcaagcgattctcctgcctcggcctcctgagtatctgggactacaggcgcccgccaccacgcctgactaattttttttttttttgtatttttagtagagacggggtttcagcatgttggccaggatggtctcgatctcttgacctcgtgatctgcccacctcagcttcccaaagtgctgggattacaggcatgagccactgcacccagccaaaaaaaaaaaaaagtttaattagtaaggatcaattgttaatccttaatgagagtactcattcaacagttttgaatgtctaattatatgatggctatgtggtgtttttatttttacctaattccacagtgatcagagagtatgttctgtatggtttttaatccttttgaattttttgagacttgctttatggctcagtttatattctgtgtgcacttgaaaataacacgtaccatgcctggttgaatgagtattccatatatgtcaattaggccaagtttgttgatcatgttgataaaatattccatatccttatttttatttatttatttatttttgagacggagtttcgctcttgctgcccaggctggagtgcaatggcgcaatcttggttcaccgcaacctccgcctcccgggttcaagcaattctcctgcctcagcctcccgagtagctgggattacaggcatgtgccaccatgcccggctaatttttttgtatttttagtagagatggggtttctccatgttggtcaggctggtctcaaactccccacctcaggtgatccaccagcctctgcctcccaaagtgctgggattacaggggtaagccactgcgctcagccctccatgtccttattgatccttattaatttaaaaaaaaattttaatggggtcttgctatgttgccaagactgtctcagactcctgggctcaagcaatcctcctacctcagcctcctgagtagctgggattatagatgtgcgccaccacattacattaagcaaatcacatttaagtaaccagtgaggaaaggaagaattctcaatggaaattttaaactgaaagataatgaaaacatgacatatcaaaacttgtgggatgcagctaaagccatatcaaagggaagttcatactgtaagtgcacaaattagaaaagaagaaagataggaaattacttaagtatccacccaaagaaggaagactatattttaaaaaaaaccttccccggagactgggaaacaagacaaggatacctgctatcaccacctctattcaccatcattgtatcagaggcctcaggcagtgcaataaagtggaaaaaaaataaggtataaggattgggccgggtgcggtggctcacgcctgtaatcccagcactttgagaggccaaggtgggaggatcacttgagcccaggaactcaaaaccagcctgggcaatatagtgagaccttgtctctacaaaaaattaaaaaactcaaaaccagcctgggcaatatagtgagaccttgtctctacaaaaaattaaaaaattagccaagtgcagtgtctcacactcatagtcccagccacccgggaggctgaggtgggaagatagctggagaccgggaggtggaggttgaagtaagccaagatcacaccactgcactccagcctgagtgacagagaaagaccctgtctcaaaaaaaaaaataaaacaggccaagcgtggtggctcacgcctgtaatcccagcactttaggaggccgaggcgggtggatcacctgaagtcaggagttcgagaccagcctggccaacatggcaaaaccccatttctactaaaaatacaaaaaaattagccaggtatggtggtggtctcctgtaatcccagctactcaggaggctgagacaggagaatcgcttgaacaggggagacagaggttgaagtgagctgagattgcaccgttgcactccagcctgggcgacaaaagcaagactctgtctcaaaaaaaaataataataaatataaataataaaaataaaataaaataatgaggattggaaaggaaaaagtaaaacttgcattattcatagatgacatgactgggttcgtagaaaatccaaaggaaggccaggcgcggtggctcacacctgtaatcccagcactttgggaggctgaggtgggcggaccacgaggtcaggagatcgagaccatcctggctaacatggtgaaaccccgtctctactaaaaatacaaaaaaattagccgggcgcagtggcgggcacctgtagtcccagctacttgggaggctgaggcaagagaatggcatgaacctgggaggcagagcttgcagtgagccaagatcgtgccactgcactccagcctgggcgacagagcgagactctgctcaaaaaaaaaaaaaaaagaaagaaaagaagaaaagtaaagaaagtgaaaatggggacaaaacctttaccctaaaaccttatcaagaggattgataaaatataacaggtgtaaagtcctgccatgatccctggcacatagtaggtacacaacaaatggctcttgataccatcatcgttgtgactgtcactcttctccgcccaggcccaatcccagttggtagacccttatgtcaagggcttggcaaagttctatgacctctactctccaagctggcctgcaactctgcaggcagttaggtctgttcacctcactccagagaagtcggcctgcatcctagaggctgtgaaacccaggcaaaaagaagctctgctcaaaagagctcttccgttaaacataatctcatagaaagatatttattcacgtggaaagatgttcatgaaaaaaatagctgtattgctccaattaaaaaagaagtatgtgtgagtgcgtatgggtttctttgtatatatttatagaaaaaatactggaaaatatattagtcaatgttcttagtatttatcctggaagaagatgggattaggatgctggttattttcttcttttatatatatatatatatatctcacatatgtgtatgctgggggagagggaaagtgagagtgagagggagagagagaaatattttcatctaacagttgacaccagaatccctggtagggaaaataccactatgagatgctgggagacaggagagagtatgaggaagtctccggccacgtgcaaaaccgtggctgacagaaactccccaggatggggaagctgaaagccctttgagaaccatcacattccacttggaactgttggcactgccccacagggacatttccttggcctcgctgccacccgccccatcctcagcagacaaggctgtatcctgggcgtcctctgtgtggtgttctgtggcgttattagggtgagtcaatgttgtgggaacagaaacgacagcacgtacgagcagaacccaagcaccatcgcagccagggggcgtgcacctggggggcgtgcacctggggagcgtgcacctgggaacctgcagggccccagaagggctgtgtgccttccaggcgtggagtggggagcccacctggcggtgccagatctcacgagatggggaccccagctggcactgggtggcatttcttcttcccttgctctacttggagcatatgttgttcgtggagccgaaaggaacgtagcaaaaagagtgttcccagccctccccggccccagccgctgggcagagggctgcatgctggctggctggccaggctggggcagcctggcctcctcggcccctacgctgcacccaccttccacttcctggagatgcacccacatctccaggaaaattgtttcagaaaatgcctacaacacagcagagagtggaacaaacagggtcccaacgcatgtctgcgctgtgattgtgaccatgtaagataatatctgcatgtgccaggaggggagagagcaaatcattacaaatcactgatgtgttaagggcgtgggatggcgcctgacctcttcctctttttgtgatttttgttgtttatacaataaaaacaggaggaagtggtaagagctgtttggtcagatgaaggagctttcttcattcttcgccaacttgtgccgtcactaccccttgtcccagaatgaggatccatgccaaggaggggaacagggcatggggggcacctgacattcgtatgccttccaggagccctgcacgtgtcatctcttttcagcttcagagaaattccatgaggtaagaattgttatccccattttatagatgaggaacttgaggctaggagagtccacacagctggtacaagactgagccagacagaccctggtacaagacagactctgcctaaggcctgaaagaggtggagggagccgggggccccgggactcactgtgtagacagattctgaaggatgctgcttggggctgctggcagatcttggatctgggcacttcctggtggggtccttccctggaccccgcatccgcttctgtagggagaaaggagtcagggccagggatgagtggctctcgtcttcctccccgcacagaccccccaggggaaaggatggcagattgtcatgaggtcacacagagattcatcactcagtccctcccactcaccctctccagggaaacatggcaaatgcctacaagacctgcatcaagccattcctgcacctggagacacaggaaatggaaaaggcccacacgaggtgatgtccctggacagagcacctggctggtagggacccaagctactgggaccagtgccagtggggcagggccccagggaccgagccagcagccatgggtgggcccctagtggtgccagccaggtccagtgtccagtcttcctctgctgtcactggctctggcctcgagcgagccagttcccctctgggccttggttttatttattattattattattattattattattattattattattattatttgagatggagtctcactctgttgcccaggctggggtgcaatggtgcaatctcagcttactgcaacctctgcctcccgggttcaagcgattctcccgcctcagcctcctgagcagctgggactacgggcatgtgtgccaccacgcccggctaattttgtatttttagtagagatgaggtgtcaccatgttggacaggctggtctcgaactcctgacctcaggtgatccaccgccttggcgtcccaaaatgctgggattacaggtgtgagccactgcacccggccatgggtcttggtttcttcagcaataaccctcttttgtgagactgatgcaaagttacaatgagggcacaaggagtaggtgcctggtgcttaggaggtgctgcttagaaggcccttgctcaaccaacacacacttgatagcactggcaagccaggcagtgtgaggaggtgggcaccgtccctaccctcctggagtttagggaccagtgaagagatggaggatgaaccagtggttttgccgaaacatggtatgtgggttgattgccaggcacagagcctctggcacatgaggaggaaaccaatgccccactgggcagaagcgatattgaaggtgaaatcctgagggcaagaagttcatttagcaaaagagggaggagggagcctcaggtagagggaacagcaggtgccaaggcctggaggtctggaggcacgtggagaaggtcagcataggccaggcacggtggctcatgcctgtaatcccagcactttgggactcggaggccgagtcgggtggatcacctgagatcaggagtttgagaccagcctggccaacatggcaacaccccatctctactaaaaatataaaaactagctgggcatggttgtgggcgcctgtaatcccagctactcgggagggtgaggcaggagaatcgcttgaacccagggggcggaggttgcagtaaatcgagatcacaccattgcactccagcctgggagacagagcgagatcccatctcaaaaaaaaaaaaaaaaagaaagaaagaaaaaaagagagagagagagaaggtcagtgtgtggcccgagagaggagcctgcctgggaggggcaggcgtggcgtggccgtgctggctgcatgaagagcataggaaacatctgagggctcgaagtgggagcgccagggtcagagctgtgctggagaaagctcccgctggtcacagtggaggctgggccgggcctgctgggaaggtgaaggctggggagtcacgaggcggtacaggcagccctctggaggcagagggaggtggcctggacatcccccctcattgcaggcaccacacggccactgctgacagtggagccacaactgcctcatctcagggcagaagctaattaaaaaccctggcctcctgccaaaccccagcccatttactgcgggattagctgctgagagctacttaactcgcaggcagaagccggcgccacccccagtcacagcacataatggctcagagcatggagccaggtagggttctcaacacctgacctgccttctctcacgcgccctccacaaaccgcaggtgaatctttccatcctctctgttctgtacatgagggagtgaaggctcagagaaggcaggtgacttgccgaggccacgcagccaggaagtggcagaggcaagatttgaatccaggtctgtgtttcaccaagatattgacgagacaggagctggagttttgactcctctgcttagttagaacgtgtgagcctcacagacacagagcagtgctggcgtctgtgtagcacttgacagtttacgaagtctgctgggacttgtccttattttcatttaattctcataacagccagaggaggtgggcatggaattgcccgtttaacagacagggggccaggtgcagtggttcatgtctgtaatactagcactttgggaagccaaggtgggtggatcacttgaggtcgggagttcgagaccagcctggccaacatagtgaaaccccatctctactaaaaatacaaaaattagccatgtgtggtggtgagcacctgtagtcccagctactcgggaggctgaggcagagaattgcttgaacctgggaggtggaggttgcagtgagctgagattgcaccattgcactccagcctgggcaaaaagagtgagactctatctcaaaaacaaaacaaaacaaaaacaggagggggaagctgaggcttgtccagctggtaaaaggctgtccttggatcaaacccagatgtgtgtcctcaaatccagggctgcctcccctgcaccacctgcttcttgagggcaccgtcacagtcagaggtagtggtctgccccagtgcacctcagtgcctcctcttgtcaaggcagctggggacctagtgtctgtctcttcgctgagctggccgacctggacaccaccagggctgaggatgtgagctcatgggcagtgggtctcccgcgaggctgacctgggctcagctctttggacctgccggggctggaaagcaaggtccctggagctcagttagctcttggtgtccctccctggccctcctacgcgctgggcctgggctgggcatggaagaccctgtggtgaacaagacccacgcctggcctcgaggctctgtcagtgagactgatggggttgccagagaagtgagtgccactggggatcccaagaaggggccccaagtctgcaggggactgaagcagacgtctcagggccatcttgcgctgtcttctgaagacacgggaggaacttcaaagctctcccagtctaagaaggtatcttagacattgcgaacagctcgggggcaggagtgtcatggatgcacagaagaatggacagttagacagaaaggaggagatgagccacaggctggcacgggtggggccacgaaaggccaaatgccatggtgtctacccgaagggcagtgggggccaccagggaagtggctgcagttgcattgtataaacctccctctgctgccacagatgcggggtggactgtaggttggggctggcaaggggaggaggcaggatctccaggagagaggcctcctgggggtgctggggaggctgggccggggcaaggggtcccgtggaggagggagggagccttcttgaaaactcacattacattatgggggtggggctgctttgctccctgcccatccctgcccactgagcgctctgtcctcggggccaacatttgcctttcaactgtgattttcagatgaatcacgagtgtggcttctcccaacacgcccagctctctgtggtccaagtctcccctccctagtagatggtggtgggacagggagtcaccaggcctgggctgagatccagctgtgcacaccaggggtgctgccatcagcagctcaggaagcctgttgggcctcagcttcctgctctgtaaaatgggagcaataatgtggccttgcccacctcacatcctggccacttctgccttatcttccaggtcctcgcatgcatttatcctgtcattccttccacaagcatgcactgcgtgccaggctcccccaggtgctggggacactaagtcccccgcctacaggggctatgctatggcaggacagacagcataaagacagacgccaggttgtgacagaagccagggtgtggcagcagagacctatattccaggagagggtgatggagcccagcctgggacgcctaggaagccccggggaaggggctggatccgggacagactgagtgcagggcttgctgagggatggatgtggggagagagaagagccgagcacaactccaaggcttgggcctgagcatctggagcacgtgtgctgggacgcagaggactcggggactgagcactgctctggacgcatgaggtggcggcaccctcaggcccccacgtggggctgtggaccatggtctggagcttggggaggggtctgagcagcagcatctgtggacagggaatgccacccgcagagcagaaactttgctgcaggagcacacacagagcgcggaagggctcggaggaaggggcccgggatgtgccagaatttagaggtcaccaagaggggggtgacccagcaaagctgcctatggggtgggacagaacaaggagggcatgttgtcctggtaccaagaggcggagtgtgctgtgaggcgggaggcctgctgtgcccaatgccatgagaggatgaggatgaggacgggccagccgcagggagcgcctgctctgggaacaccactttgacccctcaagtcaggcaggagcccccaaacctactctcatggcaggaatcatggcgattgctgccttctcaagagagagacctctcctggtactcaaagcgcctcagacccacaccggtccctctgtgccttcttttttttttttttttttttttgagatggagttttgctctgtcacccaggctggagtgcagtagcgcaatccaggctcactgcatcctccgcctcccaggtttaagcaattctctgcctcagcctcccgagtaactgggattacaggagcctaccaccatgcccggctaattttttttttgtatttttagtagagacagggtttcaccatcttggccaggctgatcttgaactcctgaccttgtgaccacccacctcggactcccaaagtgttgggattatagtcgtgagccaccacgcccggccccctctgtgccttctacaaccccatgacacagctcctctgtttggcatccccactggggaaaccgaagcctggagcacccagctcaagctcgcagaggttggtaagtggcagagctggaactgaacgaaggcccaactctgtgcttttaagccccctgctgatttctacttcctttcttcctgaacaggtcatgacagcataacagctgatctccccagctaagagtttagcttgctgtgttcccagcctctgtacagggcctgacacatagtaggtgctcagctctgtcgcccaggctggagtgcagtggtgcaatctcggctcattgcaacctccgcctctcggctaatttgtatttttagtacaggtgggggtttgccatgttggccaggctggtcttgaactcccgacctcaggtgatcagccaacctgagcctcccaaagtgctgggattataggcgtgagccactgtacccagcctgaatgaatgaatttaatgacaggtgtgaaagggccctataaatggtaagcccttcagcaaatgtttattgagggcctactatgtcaggggacctgtgctagaggctggggcttgggcagggaacaggccgagaggcacccggcctcacacagctggccttgacgaagagatggagtaagctcaggggacctacagatgacgagggcagaggcaaaagaggtgtcagggaagaaagccatggtgtcagagagggcctctctgagctgggtacatgggagctggatccagaaagcaaagaaggagatctctgggagggatcccaggtgccgaaatacagagaacaaggagggcctgggaagcctctgctgttgaagggcctgcgggcagggctgactgtgccacctgtgggtcatccattcctgggctctacccccatccctcctgccccagcccctccgggcagacttcatgcatcaccagttcttaccaccctccagctcccatcttcccgggggtgtgagctccgtgccctccctgctggcctttgcagaagtcaggtgcaggcattgccccgggaggcaatgccattcttccagacttgccccagtggagtcgcacactctgctctttgtcctcactgtccccaaagctgccaaccgcggttcgggtccaccctctgccacttctggttggtagtttccagcttcaattcatttatccaccactgcaggtgctcccgggtcctctgtgcctggagggagcctctttctcctggactctctccttaccccatcctgccgctgccatcaggggcatccacagcgaaccaggggctcccagggctgctttagcaatgcaaacgcagcagctgctctggcctccgggttctctttcccttccagcccaggctctcacatcagccgttctccccaggtacagagggtgtgtgggcagcagaaagcttctgctgtgtgtcaggcacccaactggtgcttcagaagtgctctcctgcagatctcctgatgtcaggagtttgagaccagcctggccaacatggtgaaacccagtctctactaaaaatacaaaattagccaggcgtggtatcgcacgtctgtaatcccagctacttgggaggctgaggcaggagaatcacttgaatctgagaggcggaggtgcagtgagtcaaggtcgcaccattgtactccagcctaggcaaagagtaaaactccatctcaaaaaaaaaaaaaaaaaaaagtgctctccttccatgttcacttagtgggcagggtctaccctccttatcccatttccagaggaggaaactgaggctcagagaggatccaaacctgacaagagggcttgctttcaccctgttggcacttagcctagtgatggcacacacgagacactttgcagacattcctggaagcacaggcagggtggtgagaggaggaagaggaaggcaggagtcactgaggccatcctggaggggagggagcagggaccagaactcaagcccagggctctgagctttgtcccctcctttactaatactgtgatccagtttctacggtccggtcccatctttgtagggcaggagctgacgttgctcagcaaatggggggctcaaggttaagatctcgcctggccccgttctgttccttgcctactgtgtttcgtgtacacagagggcacttgtgtgggtcactcctgtaagcctgggtgggggtccgcaggcggggggagtcccttgtcacctgtgcctgaagcccagtttctgtgtccacgccccagctcctcccctggcctcatttcgagtgcctggggactgctcggtagtgaacaaatcgagagataccctacttgctatcatcatgggaaaagccgaagcagggagggagggcatatattgagggcgagagtcgggggcgtgcaagaaaggcccaggccgggcacatggcaggtgcatactcgtgctggcttggggagggaggcagcctgaagccagtgggtctccatcctaaccctgggctcatgaaagctgaaggaagtgtttcccacccatctcgggtcttcttggctcagctcatccctctggctgggctggagtcaaggcggagcacagagccctcctggacttcacagtggtacccaaggcctgcgactcacttcaccctgaagctcattaacagggcaaggtcaaagtaggaccattcgcgccagtgtcagacccatgggaaggaggggagccagcatcgtggctgaggccctgacccagacgttggctcacagaaggcaggaaatgcagcccctggggctcccgggggtgaaaggcgccaagctcatgcttttttcgtacctcagagccttcttggaaaagcgatgacatccccagcctcaagacaaggatgggaaactaaggcacgggctccagacccaggcctgccacttgctctggctcaggcacgctctgaccttcagcttcctcgcctgctcttccagtccacagctcacctgacacctgcggggcaggcgcagatccaaataccccccggctcgcgcctcaccccccgagggagcagagcaaaccacttgcgcgagtccctttgggtccgcttccagcctttcatctgctttgctcaccacttccctgaggccaccctgatcccggctcctgtcatctctgcctggactttgcagtagctcctcactgggtgtccctcactcagacagagggtccatcagaatctaggtctgatctcacccccttccttgtatcacatagagtaagggctaaagtcctttcaatgccccctacctggctgcatctccttccacttcccatccgtctactctctgtgagctcaggctacaccagccacatgggcccccatgcagctcctgggacaccccatgcccgcttctgcctcagagcacctgcatccactattctcccactggcacgcccagccctgatgtgcacctgcctccctcattccaggtgcttctccattcccatgccgacctcccttcacattgctgagtttcccccaataattatcccatctgatatatacgacctactcactgggtggtgcatcgtcggtctcgcctcaacaggaatgccaatttaatgaaaacagatttcctttcttttctttttcctttttttttgagacagagtctcactctgtcgcccaggctggagtgcagtggtgccatctcggctcactgcaacctccacctcccaggtttaggtgattctcttgcctcaggcttctaagtaactgggactacaggcgtgtgaccaccacacccggctaattttttgtatctttagtagagacagggtttcactgtgttagccaggatggtctcggtctcctgaccttgtgatctgcctgcctcggcctcccaaagtgctgggattacaggcatgagccaccgcacccggaccttcctctttttttttttttttttagatggagtctcgctgtgttgcccaggggctggagtgcagtggcgccatctcaactcactaaaatctctgcctcctgggttcaagctattctcctgcctcagcctcctgagtagctgggatgacaagcatgtgccacaatacccagctagtttttgtatttttagtagagatggggttttgctatgttggccaagctagtcttgaactcctggcctcaagtgatccgcctgtctcggcctcccaaagtgccaggattacaagcataagccaccgcacccagccttttatttatttttcttgagactgtcgcccaggctggagtgcactggtgtgatctcagctcactgcaacctccacctcccgggttcaagcaattctcccacttcagcctcccaagtagctgggattacaggcgcctaccaccacacctggctaatgtttttgtatttttagtagagatggggtttcaccacgggggtcaggctggtctcaaactttctttcttttttgagatggtctccctctgtcgctcaggctggagtgcagtggtgtgatcacagctcactgcagctttgacctcctgggctcaagcgatccttccacctcagccttccaagtagcccaggaccacaggtgcatgctaccatgactggctaattttttaaaatgttttgtagagatggggtctctctctgttacccacgctgatattgaactcctaagctcaggaaatcctcctgcctcagtcttctaaagtgctggaattacaggtgtgagccaccatacctggcagacagatttctcttttttttttttttttttttttgagacttagtcttgctttgtcacccaggctgaagtgcagtagtgtaatctcactacaacctccgcctcgcaggttcaagcaattctcctgcctcagcctctgggattacaggcacctgccaatgcacccagctaatttttgtatttttagtagagatgggattttgccatgttggccaggctggtctcgaactcctgacctcaagtgatccacccacctcggcctcccaaagtgctggtattacaggcatgagccaccgtgctcagcctcagatagagatttcttgatttcagtttggtcattgctgtatccctggtgcctagaacagggcctggaatgtaggttttcagtgtttgttgaatgaatgaacacataaattcccgtggaagagagctcttctctgggtgtgggtagggtcttggccttcagatgcaggggctgagccttttttgacccagggagaccccaatgatggtgccagtgttcacgcctcacacccagggctgttgctgactcagctgcccccaggcttggccccgaaggtccccggagggtggagcagtagcctgagctgctaacagcagcctctgacgagccctgacccatcagctttgcacccctgagcctgggagaacctggtacccgctgggcactgcatcctttcactcagcatgctgtctgagcaccaccatgtgctgggcaaggagcccctgaacaagactgcctcggcctctggcctcctggcacttgctgccaggcagggagggtgggccagcatcgaacaggaatccatagggctgggtgatgatgagcatgaggggagccccagcagagaggttccctccccaggcaggtgccacccacagtgtgagcaggagccgtccaggtgaggaaatggaccaagccaccccatcctgcactctagccctgactgcagtacacttactatgcgaccctgggcaaatcacaacgtctctgagcctgaccttccagagctgtgaaatgggaaaaaacctcgtcatggagctatgctggagggtgtttgggagggtgtgtgggagggtgtgtgggagggttgctggagggcgtgcgagagggcgagtgggagggtgtgtgggagagcacctgtgtgagtggctggtagccccttcatcccttccagcctgctgggatcaagaaaacctgagcagggattccctaatctggggagctagaaatggtaggcaggagggcctgcagcctctcccaggttctcagagggacatgggacctgggaaagcctgcagagccctggtttcttgcaacaagatcaaaaggcaccccatggcagcacagggagtggcacaggagggatgcccccagccctggtgcaaggggccacgagggccacctgttacagatgtggatgtgccctcaccagggcccaccaaacgccctgcagagggcaggcgggcagccggtggcgtgtcgggtggaggggctgcatggctgtgagcactgatcccgtaccttgttccagagcagcagggccgtgcccactacactcaggacactcaggaggccggtgaagccaaagagcaggagcttctgtggactctgcgggggctctcggtaccctgcgtctaggaggaagcgcaggggagcagaggggtcagtgacccaggagaaagcggggcacacacacctgatgttctccctcactcaggaccctgttttcaatgctaccccgccaacacgctccacaccccactaggccccctgggagccagggttcgggccttcattgtcccctcactccttttcatgctcactgccttgcttctctgtaaggacaggggccatttgctcttccggtgcccctgcccccgtgacctggctcccctgtgggctgcttgtagggccctgagcgagatgtctcccctctcggggcctcttcttttccctgtgtgaggtggtgataatacgggtggatgtggctagggctgaaggaggcggatttatcctgggactgacagggggctgcacccaggctaggtgaggcccagccctcctaccccatgccatccccagtccctcctgctggcatccagtcctccttcccctcaccccatccatccatccgactggcaaaaacacacggagtgccaaccacatgccaggcacatgagcatgatttccccagcactgcctattgtcagccaccagcccatatgggcaccatctccttcaacctcatccaagtccttggaaggcagaggatcgccatgaagaccaggcccaagatcacatcgggcaagcagcaggacagaggttcaaacccaggtctatgggattccgaagcccccagctccttccaggggatcgcagaggtaggtcagagaatcagggctttggtgatgggctcactcataacttttgggatcatcactcctttgagaatgtgatgaaaactggctgggtgtgctggctcatgcctgtaatcccaacactcttggaggctgaggtgggcggatcacttgaggtcaggattcgagaccagcctggccaacatggcgaaatcttgtctctattaaaaatacaaaaagtagccaggtgtggtggtggacatctgtaatcccaggtacttgggaggctgaggcatgagaatcgcttgaacccaggaggcagagattgcagtgagccaagattgggccagtgcacttcagcctgggtgacagagcgagactctgtctcaaaaaaaaaaaaaaagagagagcatgatgaaaactaaagatctgtctctggaaaggtgtattatacatgagccaagtgctcacatacacgaggcccccacaaatacatacatgcacatacctagttctgcagaagttcccccaccatgatgcccatggcacactgagaccaagggcccaagggagctcttttaggtcacctgccagcggcgttcaggagcagatctgcatgcccggccctgccctttccacacccagatggagccctggcacagccgtaggccggggctccctgaagtgggtctgcctgctttgccaatgctggtagacaaggcaaaccattctctatttcttttcttttcttttttttttttttttttttttgagatggagttttgctcttgtcacccaggctggagtgcaatggtgcgatctaggctcactgcaacttcccatcctgggttcaagaaattcttatgcctcagcctcctgagtagctgggattacaggcacctgccaccatgcccagctaatttttgtgtttttagtagagacggggtttcaccatgttggccaggctggtctcgaatccctgacctcaggtgatccacccgcctcagcctcccaaagtgctgggatgtgtgagccactgcgcctggccccattctctatttccgatccaaagtcccaaactgccatttgaaacctctgtgtcctttgccctggaagagccacagaggaagccttacctctgaccaggatgaaggtgccgctgcctctcaccgtggagtgtggccagtggacagagcagtagtaggtgccagtggccgatgctcccggcagcacaagggtgacctggcagtccagggtgtggctctggttctctgtgcccagtccagggtggcagtttgttggcttcttagggctcctctgtccctggagatcttcatgaaagtagctgactgtgaaaaccttgaattggggagtgtatggataggtgatcctgcagctgaaggagatagctgtgttggccagggaggccatgatgggcaggccggtgtgggtcactgactgtcctcctggaggggaagcaaagggagagagcaacaggtcacttgaggctgcctcagtcccacccacttgcctgttaaggctcacgaccgggtgcggtggctcacacctgtaattccaacactttgggaggccgaggcaggcggatcactggaggtcaggagttcaagactagcctggccaacatggtgaaaccccgtctctactaaaaatacaaaaattagccaggctaacttttttatgcccataaccccagcactttgggaggctaaggtgggccgatcacctgaggtcaggagtttgagaccagcctggccaacatggcaaaacctgtctctattaaaaatacaaagattagccaggtgtggtagtgtatgcctgtaatcccagctactcgggagactgacgcaggagaatcgcttgaacctgggaggctgaggttgcagtgagcagagatcatgccactgcactctagcctgggcgacaagagcaagagtccgtctcagaaaaaaaaaaaagaaagacaagtctcgtgcatcgtgtgagcttacctctgcaggtgcagcccctacctctcctgcacttgctgtgtgccggagttgtgccaagcatattacgcacaccactctacctctcctaatataccccaaggcaaagtgagagcccctgttttatgaagaagaagagtctgagggtcagggagttgaagcacttagctccagattcctcagcaggtagagagtggagctacaaccccatccagggctggggaacaccagagcctgcgctcccaacccctcttcttcccaaaggccaagaggccacctgggatcaaagcacaggcctgagaagagagaaagctggtgatggatgagaaataaagaaggaggcaggaaaacaaaataaagaaacccaagcgtttcctggcggtagacagagagggaggcaggtctgcccacagttctccccgtgccaaagtaaggaggcattcaggcagcgggagacacaaacctctcccggactctgggctcggagaggatttgtcaggttttttacagtataacaggcaacatcctgagagcagtttttccaacaacgcagaggtgctccacgtggggccatttcggctgtgatcatgatgtcaatgaccatgacaaagccagttttgtaggagccacccctccccccactcatcagaggcacctcagaaaacagtttgaaaattcccaaagcagcagccctgcctggggggctctaacccctgctgcaggcctctgagatgctgtttggatcctgggctgggggcagcagccgccccctgccccagacttcagctgcacaggcccctcggctttagcgctcctgggttctccaggcccctccttctccagcagctgagcagcagacagttctaaattgaggtcggcagccagcagccaagaacatgcaggccggattgttaatcgggagaagatcgtgtctttgagatgctcagaggagccgcaagatttattttattggggaaagagaggtgtgggccctgcctgtggtgtggggctggagggaggccaggctcatctcttcccaggtctcttcagttcagctctgagccagagctctgggaagggggtcccaaagggaggccagccttctggaagatgcgggaacagagatggagttggccctgtgcgtcagttaatccctcaaaattctggcaatgctgatattttgagcttcctgttgagccactaaagagacacccccaggctgggcagggtggctcatgcctgtaatcctagcactttgggaggccgaggcgggtggattgcttgaggcctggagttcgagaccagcctggctaacatggtgaaaccccgcctctactaaaaatacaaaaaaagaaaaaaaaatcaggagccgcggtggctcaggcctgttgtcctgtcacataagaaggcaaggccaggcatttgagaccagcctggacaacacagaaagccctcatctatataacaacaataataacaacaacaacaaaaatttggccagggctgttggctcatgcccgtaatcccagcactttgggaagccaaggtgggcagatctcttgaggtcaggagttcaagatcagtttggccaacatggcaaaaccccgtctctactaaaaataaaaatattagccaggtgtggtggtgggcacctgtaatcccagctactcaggaggctgaggcaggaaaatcgcttgaatctgggaggtggaggttgcagtgagccaagatcgcgccactgcactccagcctgaatgacagagcaagacttcgtctcaaaaaaaacaaaaagaagaaagaaagaaaaagagagacacaccctccctcaaagaactaaaggcactcacagttccagggaatcgactcacatgtcggcagtcacagtgggttcgacttgtaattgacataacgacactcgcttgtgaaatgtcattccagggagctggcacccgggccccctccagggctcccctctggtggacggagcaggggggattttaccctggactttgtatctccggactctactgcaggattgctgctgtttaatgataacattacattcattttgtcataaaactaagagccttgcttcagggcacggacttatccgagatgggacaggggcagggtaggcatatagagatgggggctgttatattgtcccccagggacccaggtgggctgggatggtggcgcgtgtctgtaatcccagctactcaggagccaaagcagaaggacctcttgaagccaggagttcaaggccagcctgggcatcaaatttttttttttttaaattaaaaaaatttttttttagagacaagaggggtagagtgaaccacaaatgacatcaccaccgaccctgcccagcagccctgcacagcactcacaggccactgccccctctgtgtacctaccctgtggccccctcgacctgtgacctccatatcctcacccggggcctcctgctcctcctcacagtgtatctaagaggccactccagggggagggcagatacactgtcagcaccatgaaaccttcctgcttgtcctgggcaggaagacttcagaccaatttctttaaaaattctccctgtctgaggtatccttctagaaaatgatgaactctgctactgcaattaagccgatctttacaattccagggaaatctataaaaacagacgtccgttgttctatattcttttgggattcatttctttaaggtcaccgagttaggctcatgacaatgcactgctctggcttagatcagccacagcgaggagaggcttcgaaacgagaacctcagacctctgatgaaactgctgtgtccaaaaagtaaagagaggaagccgtctctgacgagctcagtcaataacaacgtccagtctggagacgtcaggccaaaaaacccgggggaggagaggaggtccgcagttacagccaagacctctgggttctggcctgcgaatgtagctcaccacctcccctgcacctacaccttcctttctttctttctttctttttttttttttttttttttttgagatggagtctcgctctgtcgcccaggctggagtgcgatggcgcgatctcagctcactgcaaactctacctcctgggttcacgccattctcctgcctcagccttccgagcagctgggaccacaggcacccgccaccatgcctggctaattttttgtatttttagtagagacggggtttcaccgtgttagccagaatggtctcaatctcctgacctcgtgatctgcccacctcggcctcccaaagtgctgggattacaggcgtgagccaccgcgcccggcctgcaccttcctttcaatggggcatcagcaccccagagctggaatcctgcaactgcccagctcccaccccatctcctggacccgtgcctcccagaggccccttcaggggtgtaggctgtagaggtctaggccctagttggctgccaactagaagcggtcccccgtgaaggcacagtgctgataggtttcacggtcatttccaagtccacaaattcttttcagctgtcatttgtttgtgcctcccacaaacattgaaggggtaccagttaggtcacaggccctgtcccagaccaggaggggctccctgccgtggcaacatccccagtccaaaagggaaggagcagaaagagcctgaggcagaagggctggtatggggagcattgagtttgcctgggatgaggttggggtgcagggtttgtggcccgggggtctagagggtgtccatgacccagaagtaggaacccacagacagaaggaaaagaaaaattacaggaattgtatcctggcttggtgtgacacaggtcctatgtcaattaaacaccacgacgatcctaggcggcaactattgcaaccgcgttctggagcgggtctagctaggagtggtggcacacgcctgtagttccagctactcaggaagtcgaagcaggaggatcgcttgagcccaggagtttgagaccagcctgagcacatagtgaaatcccatctcaaaaccaaaaccaaaaagcagaggatcttaaaggcccaaaaccacagagatcatgagtggtggggccaggcttcggaccccagttggtctggctgtgttgaggaagaagagccagcacccaggctgggaagctgtcatcagatatggcagggggtgctcacattggcactgggcacagtagccatcagatgctaataagaggtttgtcagaaccctggtgggcctcacaaattttcaccaccagatggccaacaagtggctacttggctccaggatcacatggagaccacggggtcacagaaggtgggtgtagagggggctggggagagctgcagggcatccggcctgccccgggggtgcctgcttctcaccccaggctgagaggggctttagcgggaccctggctgaacttgagcagtattccctgagtgagggcactcggccgctatctatctcatgccagggcgtggtgtggctgcatcatgctttgtcccttttctggcaaaggcagtatgtccccatgggataacgtggtccggggcagtgagctggctgagtgtccttctagactggctcatgcagctgcctagaggggcccacggcctggagaggaagaccagggtggataccagacgccgggggctgaggagggagtgagagccacagaattccagttagcaatcccccacttccgtgggggccccaacggactccacgcaacaccgcaagcacgcagagcccagggccagcctcccccgcacctgacaaggcaggtcttttctgcctccacccaggttgaccggtggggacggacaaggaaggggtctgggtgggaaagagaagaggcacctcgcccctcaccctcacacaggcttcaggtggcctggggaaccacttcagctttagagtttgaagttttgtctgttacacagggttagagatgtgaagaactgggacgcatttgtgactttcggtgaccatagaactttgacttagagtgaccagaggagctgagttttgccaggagaaatcccccagcaccaaggggcctagagggcccaggagctgctcccagctgcttttctggttattctccaggtcccatgggatctggggcaggcagagctggaacaggtcctggggcgcagggaggaaacgtctcaaggagccccaggtgttttctgtgcagggaacggatttgagaacttcccttccacttagagagtttaggaggatttgagatttgccctgtggagagcggggcctggaggtggctgcaaggagcacccctgaggctcagggagggcagagttggggcagagagtgaggaggggctggtgaggacctgaactctcctgcctggcctgccctgctgcaggggcagggagtttggcccagggggagttttctgaacaggagcttcttgaacctgctgaatgtggataggatggtgcagggagaggggagagggcacccatagtgaggaccatgggggaggaggggtggagcaggagggcagcagggccatcagaggcagggttgccacacggtgtctgggagggcccccgccccgtccccgggcttggctgtttgttttgagtcttcaactcctctcctgtgcctccccacccccacagaactgcaagcgcagacatctcatctgggcagcgccgtggatccctgcttagtctgcccaccctgctttacaggagactgtgttttggggggtgacacaccctccatccctcacttctctgcagctccagggaagtccctcccacactgtgaggaagccttgggcctggccagaaataggggcgatgagcgggggcgtttgggaaaagcccaggttctggaggcaacaggcctggatgcggctcctggctctgccacttcaaggctgtgcaacttgggcagctggctttacttctctgacctcagtgtctccccacaacacagggggagcaacaatgccagccttaaggggttgtggtgggattaattgggacctggaacccagctacttgccacgggccaggctgcctttccccagggacaagaatgagacagggagtcctccttggggatctacaaaggcaaatcccagctgggtgtggtggctcatgcctattaaccccagcactttgggaggccgaggcaggcagatcacatgaggtcagaagttcaagaccagcctggccaacatggtgaaaccccttctatactaaaaatacaaaaaagtatctgggtgtagtggcacaagcctatagtctcagatacttgggagggtaaggcaagagaatcgcttgaacccaggaggcggagattgcagtgagccgagatcgcactgctacactccagcctgggtgacaagagctatctctgttttttttttttttaaaaggcaaatgccagccctatacccttctgccgggttaaatgacatgccctcagtgcagggcacataggccctgatggtccaggcacagaaggacccccaggggtctttccctgacccagacttgggcactgtccctgtcccgggcgctggcctggcctggctgaaggcccctcaggggtgtggtgtgtgcagggctgggggcatgaacagccctctgccttcagcctccagctgctcttctcccacccttgttgggaaagagtttgtcaaccgcccacgggtgcctgagtccttccttttccggttcttcttatgaatctgtggctgcttgaacttggagtttgagagctgggcggagttgctatcctcccacacctggcgcggggaccacatgccgagtgagtccctggcggggtgtgcccccacgtgtttgtgtgcccacctggcagctttcctgtggatcactgatgttcaggatcagacctgcccaccacctgcacaacgcccccatccctccaactcaacagctcccatccagtcccctctcctgcccaaccagggctgtctctgtggctctgagtccccagcgatccacaaactcatcctgctcctgccctgcctgaaccggcaggggctccctgctggaggagacccaggaaggagtctgaaatcaatttacggggtcaagacaagcaattaaaaaaaatagaacatgaagcatttcatgcgtagtaagggcactgtttgcgaccttctagtttcagttatattcatacaattgggttcagacagggtcacgctaaaacatgcatctcttaactttgggccactgctaagaaaaatggaaagtccctggcttggaggatccagttcttgcctcccaggacctgcacagccccgctcagctgctctctggccctcactcgcccactcctgcgtagacgtcagcctgccacactccggcgccttcgcccgtgctgttccggctgtgcggaatgtcctacccattccttcctctcctgggctttggggtccccctctgtctccaggacatgctcacttcctccctgagccactcctgggtgtctggctgccccgcacagcacagactctcaggcgtcactgttaagccatgtgatcagaagagccaatgtcccctgggtttggtttcaccttttgcagatgacaaaactgaggctcagagaaggcaagaggtttgcccaaattgcagtggtagacatgggattttaagctgggtccctttgagtctgtaatcccactcttggttttttttttttttttttttttttttttttttttttctgaggcagaattttgctcttgtacccaggctcgagtgaaatggcacgatctcggctcactacaacctccacctccccggttcaagcaattctcctgcctcagcttcccaagttgctaggattacaggcatgcgccacctcgcctggctaattttgtatttttagtagaggtggggtttcaccatgttggccaggctagtctcgaactcctgaacttgggtgatttcttgagctcaggactttaagatcagcctgcagaatatagtgagaccccatctctactcaataaataaataaattagccaggcatgatggcatgcctgtagtcctagctactcaggaggctgaggcaggaggatcacctgagcctgggagttcgaagctgcaatgaattatgatcatgccactgcactccagcctgggtgacaaagagagaccctctctcaaaaaacaaacaggctgggtgcagtgggtcacgcctgtaatcccagcactttgggaggccaaggcaggtggatcactagaggtcaggagttcaagaccagcctggccaacacggtgaaacactgtctctactaaaaatacaaaaattagccgggtatggtggcaggcgcctgtgatcccagctactcgggaggctgaggcaagagaatcgcttgaacccagaaggcagaggttgcagtgagccgagatcacgcacgccactgcactccagcctgtgtgacagagcgagactctgtcacaaacaaacaaacaaacaaactcctcaaagcaagaaaagaaaacattctcaaaggaaagaaatatacttctttaaagggagtcaaaaattcagaggctgtttccttaaacttgggtcatctaataggtagacagggccagcaataggtaggggcctggggacaatggtagtcagaaatggccctgcagcactgggggactgttattgtcacctcagctcaagcacagcctgtggctcccaaaacaggagtgacccccgagccctctacaggctggccctgtgacaaagccagtgctgcagagggccagatggcatccctgttctgcagcaggggcggacattttgggaaaggaatgcaccgtggaaaacttggtatgctcttattgaaaatgctcccatgggctaggcgcagtggctcacgcctgtaatcccagcactctgggagcgtgaggtgggtggatctcctgaggtcaggagtttgagaccagcctggccaacatggtgaaaccccgtctctgttaaaaatacaaaaattagccaggtgtggtggggtggtgggcacctgtaatcccagctactcgggaggctgaggcaggaacctgggaggcagaggttgcggtgagccgagatcgcatcattgcactccagcctgggcagtaagagtgaaactctgtctcaaaaaaaaaaaaaaaagaaaagaaaaagagaagaaaagaagaaaatgcttctgtggcttcctctcacccccagaatctgccacccacaatctcccccgtccctcacactctgctccagctgctgaggctcctcccaccaccaagtcatgggccagggctttggtcccggctccccactgcatggaactcaatcccttctatggcatcaagcgcgcgttgtcagtcaagggcgtgaggacccagacaacgctgatcaaaggtatccatcccaagttaggtcgattttaaaggaaaacactttgattccccaggtacagaagaaagcagttcccacagtctttattttaggcatggggtttgccctccaatttaattctggcatctctcagagctgtgcctttttaaaggcccatctgaaaggctgcgatcggggctctcagagccccagccatgtgcctgagcacaaatcccaggatgccacagatgagcaagcgggcaggacacaggcatcaaatgcaaaagcgtgtggccaagtggctggtgagggaggggcattttgcaggacttggaagacaacctttgaacagagactatttcggagcttttagcaccgttgcctttggaatggcgccatcggacaggttgtcacatctttcaacacctccaaattacaaagatgcctcaagacgtggccatttccacagcccatccatggctcattttcatgcctctagacccccgaaccagggtgtacggtggccgctcggggacacaaaccaagtgcagaacgtccaaggtttgaatcgggaataagcctcacaagggtcaatcagtgtctttacagcagttgcctcctttttgcctgttttgaaagtcaaggccgggcgcaggtgctcacgcctgtaatcccagcactttgggaagctgaggcgggcggatcatctgaggtcagtagttcgagaccagactggccaacatggtgaaaccccatctctactaaaaatacaaaatttagctgggcatggtggcacgcacctgtagccccagctactcaggaggctgggcaggagaatcgcttgaacccgggaggtggagggtgagccgagaccgcgccactacactccagcctgggtgacagagtgagactctgtctcaaaacaaaaacaaaaaaagaaggtcaaaaaaaggtcaagtcgctccaactttggagctcatttgagagtgtggtctgggtcatcaggggactcagcctctccttttatagccacccctgtaccctcaaaggggcatcaggatggtgtggaaggtggcaatagggccaaaagggtgaggttgggtctgcttcttgtctctgaattggagtgggcaaaatgaagtgaggggaacaggctgggcgtggtggctcacgcctgtaatcctagcactttgggaggccgaggcgggtggatcacgaggtcaagagtttgagaccagcgtggtcaagatggtgaaaccctgtctctactaaaaatacaaacattagctgtgcgtggtggcgggcgcctgtaatcccagctacttgggaggctgaggcatgagaatcacttgaacctgcgaggcagagattgcagtgagccaagatctcgccactgcactccaggctaggcgacagagcaagactccatctcaaaaaaaaaaaaaaaaggaaatgaagtgaggggaacagaccccccagagagtgcctccttcagcagggagtgtttgttcacccaaagtctcaccaaggagggccaggccctgccaccaggaagggagctgacagatggagacagaaagaggtgggagaaaggaaagactgtgggctgcaggagtccagacaggggggcccatctcagcctgggaggggcaaggggttcctgggaaggcaactcttggagtgtgggtcattatttggtttttaaattagaattctttaggtacccctaccacctcccagtaacagagtgaaacatgttcactgtagaaattctaaaaatgcccagcattttcggaggccaaggtgggaggattacttgacctcaggaattcaaggccagtctgggcaacatagcaagaccccatttctgaaataaataaataaataaaattagctgggcaaggtagcagtgcctgcagttccagctactctggaagctgaggtgggaggaccacttgagtccaggagtttgaggctgcagtgagccatgactgtatcacctcagtccagcctgggtgacagtatgaaaccccatccctcttttctttttttttttttgagatggagtctcaccttgttgcccaggctggagtgcagtggcatgatctcagctcactgcaatctctgcctcccaggttcaagagattctcctgcctcagcctcctgagttgctgggattacaggcatgtgccaccacacccagctagtttttgtattttagtagagggagggtttcaccaggttggccaggctggtcttgaactcctgacctcatgacctcaccatgttggccagtctcaaactcctgacctcatgacctcaccatgctggtctcaaactcctgttcactgaggcagtgatctgcctgactcggcctcccaaagtgctgggattacagatgtgagccatcacactggctgagaccccatctctttaaaaaaaaacaaacacatggctgggcgcggtggctcatgcctgtaatcccagcactttgggaggccaaggcgggcggatcacaacgtcaggagattgagaccatcctggctaacacggtgaaaccccacctttactaaaaatacaaaaaattagacgagcatggtggcaggcgcctgtagtcccagctactcgggaggctgaggcaggagaatggcgtgaaccagggaggcagagcttgcgatgaaccgagattgtgccactgcactccagcctaggggatagagcgagactccgtctcaaaaaagaaacaaaaaaagaaacacaaaaaacatacaaacaacaagaaaaagaaattctagaaatgacaacaaaatctcaagaagcaagccgaacttgttcagctgaacagttctgccacccgacctcacagctgagtatcttgctatctttcttcccatccctttacgaagctgaacttggaaggaagagaagagcaggaggcagacagttgggggaggggtgtggagagaggtttcaaacgcaagaaagttctcgggtaaagcttctcaaattcttgaaatgggcactgtgccttggtggagttggaaggaatgatttgtgtctgggaggggggtacaaggggatgcctcagaggtggggagcagcttgaacactgccctggaaacctagtggagcctgtgagggcttttaaattggaaagtgacatgatcatcttccttccttcctccctccttccctccctctctctttctttcctttctttctttcttttcgtatttatttatttatttatttattttctgagatggagtcttgctctgtcgcccaggctggagtgcagtggtgcaatcccgtctcacagcaaactctacctcccaggttcaaacaattctcctgactcagcctccccagtagctggaattacaggtgcatgccaccatgcctggctaattttttgtatttttggtgaagaaggggtttcaccatgttggccaggctggtctcgaactcctgacctcaggtgatccacaaacctcggccccccaaagtgcgggattacaggtgtgagccactgtgcctggcccatatttgcattttagaacaaggacaagagaaatactagaattccagtctccctcagcctttgaaaccctgcctcgcattagtgattccttctgtgggatctgttgcactcttgctctcggcctccttttaaaatatatatgcttctggctgttaacacactaactccttcccctggacaacttggctagctcacttttatcctgacttctcttaaatctctacctcccacaagatccctcgccctccaggcacacaacctctccaggcctccatccttccctctgtcctcccctccttacccttccacttcctccaccctgccagctccctccttccctccctgtctgccgcctcctgcccgccacaggatgctttcagctggctggctccgctgccaccaaggaggtcagcaaagatgctggtgggtcctgaggcttctggccttgaccatgaccctgcagaccctctctctttgaccttccctcctcttcccctccacgcccagccttcctgagcccgcgtactctctctgcactgtccctggcttttctcacacagcctgcctcttaaagttggatgcttgttccttggctctgcccacagcctcacgtgcctcaggcgagctcagtcatgccccacatgcctctgagcgcctgtgtgctcgggatcacagatgaacaccttgggggagagggaggggaactgggtttgttcagggtggggaaggggccagagggggtactacagaagagcctatgagtttgaccttgacagagagtttggatgtcaccaggtgggcaagtgagaggataccctccagacccagggagcagtgtagaaagaagcaaaggttcaggggagtgggtgtggctggcttcttcaggggatgggagtcctctgcctccggccaacctcaaaggtgggagtggccataaggagcaggcacccaggaagaaggggtggccgagggatggggagggtcttatctgaatacaccagggttaggggcctgctgagggcagtgaggctgtttgcggttatgctctgtggacctctggcccctggcccaccagcagcaagcaaagatctggcccaggccctgcccctcctccacctcagcacctgcaatggggtgcgtggggagcagaaacagccagggtcagcattccacctcctctggctcttctcggcaccctgcacagcctccaagccctagaatgaagcccccaggtgcagccactcatcaaatagaccctcagcagccaagcacatccaagtcccagccaagactctgcagcccctcctctgtgcttggcctggtgctggactcggcctcagagaaccggctcaggtggggcctggccctccaggccctctgttttggcaaaggcgccatcagggctctggcctgagtgcaccctgggacagtgaatcacccctgcctacagggggactggggaggccatggtgagccccttggcctgcaaggacctgagtctcagggtgcagaggaataggtggggccagtggctgggcccagagaagcctggtgggcaggacccccacgatccacgacccatgactcacgaccgaagatgagcactgagtcccctccctcactgtgccctcgagccctgtccctagggccaaagcctcacagaccctccctgaggggtcccaggtgccacgccctgaggccatcatggtactggatgtaccttcctattgctgtctgggaggatgctgagcacccaggcgggggggctcgtggaggttcagcgtactccagagacttggccaaaggctcccaggacccaaatccagcctgctcagaccttaccaggagcccaggcgccccacttgccaatctcatgtccatacccctcccctccctctcaccaggctcaccccgtccctttctctggtttcagccccatctgggtcctgttgcccacgtccccactagggtatggccttgcttagatccacaaggagcaagcagagggtcagatcctgcctccgggtccacatttccccaggatgcctgtgtcctccctcccattcactacacagggggtctcattaccctaccaacgctggagaggagccagggctcagggagggcagaggaagggcagaggacgactacccagcccttccatctcctcccccaggcgcccctcctgtggcatcgcgtctccaccctgctcagagcttaattcatccttgattgtcaccatttcctgagcatctgctgggtgctggtcccgtgctgggagtcaaggattagaagccacatgagtccgcacagtaccttttgattttttcaaccacttaaaaatataaaaaccattcataactcacaagccatacaagaggcagtgggctgggtttagcccaccggccgtggtttcaactcttgctctatctatagcaacaaaacgaacttcagccatatcgtggactggatctatcttaaaaaacataatgctcagtgaaagaagcgggtcaccggagaatacacacagtatccttcaattacacaaagttcacaaacaggcaaagctagtccatatggtttcgggatgtgtactaatgataaaactacaaagaaatgccagtaagtgatccccccacaagctgggatgggggtacctttggtggggcacggagcggggcagtgtctgtggggcgaggggagtagaaggggctctgaggcactgggatgttctcattcttgacctggtgagagtcacacaggactttgttttctagtgcttaccacgcagcactgcggtttttgtgcgatagttcaccatgacagaggagacagcagtgagacaggacccgctgggagtgtgcccggacccctacctgaggggcatttgtgatccacccaaccacaatctgcatcccactcctgtgtcagacttcccctgccgtcaagctgagcctctcccggccctcctggccctgccttttgggctctcagccctcattccctcagccacctcccgctctgtccccactccgcgggcagcctttccagcactcccctgcctctccccgcccacctctgcctgtgcctcgaaagtcctttattgggatttagacaaagatgaaaaacagaggctactcctgacagaggtccggagcggcgggaagggaggcaggaggtctcagccgggagcaggcaggggctcctgaacatctttttttattattattacttttttgagacagagtcctgctctgtcacccaggctggagttcagtggcacgatctcagctcagtgcagcctctgcctcccaggttcaagcaattctcctgcctcagcctcctgagtagctgggattacaggcgcacaccacctggatccagaacaaacttgtctggtaactccggccaaggctcacggtcccaccaggctgagagtggggcctatggcttgttcacgtctgggtccctctggtgcctagaaccggtccttttcaatggatatgtgagaaataaatacagcccagagttctggaaaggccacagagaggggactgacatttgcagaggacactaaggtgcagagaggttaagtaattgcctgaggtcacacagctgtcaccagaagaaggcaggcctggaactcaggtctgtccagccccaaagtccttggggaggactgaggcccatggaagctgagttgcagctgctcctggaaaagccaagcccccagcaattcctgtcttggggagaccaccagtggctgcctttgagaaaagcaggctttgcagaggggtcaagaagccagaggacaggcccaagtcccggctcaagtgggaggaggaggatggctgggagcaggagcaggtacccaggatgagctggaggccgtgggctcaccaactgcacctcaagtttccatggctctggcgaggctggcaggtggctgacactcactgaggactaatgacatactgggcactcagtcctcaggatgtgtttaggcaggcagtgttatcacatccatttaacagaggagacaattgaggcatagcgatagaagtaatctgcccagggtgcctgggcaagtagcagagctcaaattcaaactgggccgggtgcggtggctcacgcctgtaatcccagcactttgggaggccaaggtggggggatcacctgaggtcaggagttcgagaccagcctggccaacacggtgaaaacctgactctactaaaaatacagaaattagccaggcatggtggtgggtgcctgcaatcccagctactcaggaggctgaggcaggagaatcgcttgaacctgggaggcggaggttgcagtaagccgagatggtgccactgcactccagcctgggcaacagagcgagactccgtctcaaaataaataaataaataaaaaatcaaactgaagatgaatgcccctggcctgtactcctaagccagcatcctctcgcaagttcagggatacgatgcagaatcagggacgctggccttcagtgacacccctgtggacacagctgagggatgcaagctgggttggtactgacaggtggcagagctggttgcaccaggctgatggttaaggctgatggttacggtcaggggaggtttggaagatgtgggaggggcaagattccttccagcaaaccctcaaagctctgagacgagaaggcaggggtgtgacatggagtgacagatagatgaagggggatgcacaggggtaggacaaagagcgggttgggggttgggcacagtggctcacgcctgtaatcccagcactttgggaggccaaggcgggtggatcacctgaggtcaggagttcgagaccagcctgggcaacactgtgagtctctatctctacgaaaaaatttaaaaaatagctgggtgtggtggcacacgctgtggttccagttattcgggaggctgaggtgggaggatcatttgagtgagggaggcagaggttgtagtgagctgagattgcaccactgcactccagcctggtggacggagcgagaccctgtctcaaaaaaataaaaacaggacgggcacagtggctcacgcctgtaatcccagcactttgggaggctgaggcgggcagatcacctgcggtcaggagttcaagaccagcctggccaacatggcaaaactctgtctctactaaaaatacaaaaattagctgggcatggtggtgggcacctgtagtgccagctactcgtgaggctgaggcaggagaatcacttgaacccaggaggcagaggttgccgtgaaccaagatggcgccattgcacttcagcctgagtgacaagagtgaaactctcaaaaaaaaaaaaaaaaaaaaaaatcatgggtgggggtttgtctgctgctccaagggactctaggacaccgtaagggtgttttcacctcttgtgaaagaacagtttctcttttatgtaatgtttgttgcaataccgggtgggagggggtggcactgggaatgttttgttatagttgagactgttacaaaagagcttttccccagtagcaccccataaaacctcttactgctcggttaccagggtgtgctgggtgtcttttggggaggaggaaccacacaaagggaaaggatgggaattggggggaaattaaattaaaaatgactgtagttgagacacattgacactaacaggctgcatttccggggtctggccgtgtttgcaccaactgtctggggtgtggggcgaggcgtgcacaggattaaaggagatggtgtcctagggctctgggctgcagcctggggaggtacacacaggtcagcctttgcctccccagggtaagtttccggtgaagaacattctttacaagtaagaggatcctctgagcctactggccgaggggcccagcttggggctgaggctggcctggggctgaggctggcctctacttaccggctaggtcttgagcaaacgaactggcttccctgggcctccttttccctgtccttaaaatggtgcaggtgaggacaataggagccccaaggggtgctgtgagggtggccagtacgtgccctgctaagggctccataaagcctaatttgtggtcatgagagggggtgcagcaggacagggtgggggcagctcttgaaagccccataaactaagagaatagaaaggaaggcaccctgtctccacagtggaggccacccctttggccagagggagggttggctgctgcccggccaaggaggggcagagagaatctggcagaattcactgagccctcgtgctggcagccctggaatgggaccctcctgggccgtccctggcctgatgaactggccctgaggctacctaccccacagcttggctcggatcccggccacccagcttccaagaaagcctggaaccaggaaaggagcgccgctggcgtggaaagacacacttgcatcctaaaacacttggcctctggttgtgtttcaggaactgggaggtgagaccctttctggtgactgacagttttgtgcctctgggcgcagagccctgtggctggccctggtatccccccctcccccctctccccgctctccctggccaatgccagcaacaacccagagggtagccccaccacttgccaggttcaacgcagtgtcccccgcagcagccacgtgaggttcctcggatggggagctgtccctcccccctgccccgcccctggccccagccacacagcgcccaccctccttgtttaagggccaggaggccagactgctggggcaaagctgtcacagcagcgagggagagagcgctgtccccctccccttcaaaagccaccttggcaaggcattagctaaacatcttctcggtcccagaaggcttcccctgtgaagtctgcagcgttcaaacgacaaccagcaaatccccagagacaggtccctgggaattagctgcgccgggcgggatgaaagccgctctgatgttctggagcgagagagtagagagaaggaggaagacagacactacctgccagtcgcagggtcccgggcagcagcagcacgccaaggaggagccagggggctgcggggagcccaggagggcgtgggaggcctggcagggcccgccacctcacaggctggttctccatctgggggcctgcttgtctgcggcgactctttagttcacaggaggggacggccggcgctgacagcttcccctttgctttccccacgaagctcctccctggcagcccctgaccttccgctcagaagcaaagctggaacagcccagcagggtggccgccagatgaggaacctggcactgagactggtccaggccacacaaccagaagaagagctggagacgggacccaagcctccccactccaacccctggtgggcttcaccctgtctcggcccctttccagcaggggccccgtccaggagacactggtaactgtgcagagggatcatgggatttccatgagtgacttcgggccttggtttagcctctcacttctgaaacacttttaaaacgaccacaagcatgttcacacaaacttctctaaaatattctgagaatcccttaataatgtgtttaccaaaggtaggttttttggtgaggggtggtagggaggctggggtgaagggcaggagcctcatgttcccagccctagagagggccaaacacccagggcaggtgaaaggcaggctgcccatcattcacccagcgagaacctctgtgggtcccctgcagaggcccaggagacgcctcctctctggtccatctctaacgtcagctcctccctgtggctgccctaaagcttagctcactcggcctcccaactgtgagaccctcgaactgcttccccattggctgcaggtcacagcccctgctctcacttctagcagcatcagccggggacaggaattgtttgctgccgggacccccttccccagcagactgggagcccctcacccttggcacccacacatctgcctgcgtgtctggagtggcagaggaaaggggctggggtgtggtgatggctggtggagctggaggcacctggtacatggaagacgcaggcgggaaggtggctgagtttcagcgcatgctgagcgcttacctcccttctctgcaggtgtcccttcactcaccagataaatgtgatgatcccagttgtacaaaagagaagacctcggccccaggaggcaaaacaacatgcctaggatcagggcaggtctgtggggcgggcatttgaactgccagtggtatgatgtccgagccttctcccaccctgctactgcctgctcaggtgtgtccagctgcagcccccggtgacggcatcatgagatccatttcagttctttgcacacatgcttttccctgggctgctccaaacatgaacagtgaaagcctaaagacgtttccaccaatgccacgagcactgggaggctggcaagagcaggggccgcccaccaggggaggaagacatatgaacaggagaagtttcctaccgcgcagggggcaggcggggaccccagtgttattgactgttgatccatcacagtgatacatgctcacatatgtcacagtgagatgcagacccgctgcttcacgctattcctggctcctgggagtagcaggttgtctaagcaccttgatgccatggtgatagacctcgtgtcaatgcctcagggtacacggggagcattggaaaagcatcggtctgtgcctctacaagtctcattacgacttggcactgggaggcagctgaatgccaaactgcctcggaacaagggagcctgctcttccagccctggtgccgcctccgctcctgcccctgtgccagctcactgaccctacctctcagcctgtcacggtgccccccacaccccaactctgtacctcggactcccgggagttctgccgcctctgagtctgggtctagcctgctgcacacctggtttccacgcttgcctgcctgagctgcctgtcttcctcccctctccttcttgagcctggcccagggggtgcaggaatggacggatgggtgagcataaggcagggagaagccttcctccaggcttgatatgaaggcaggtgcccaacaccacgctggtgcacaagaggcctcaagggaaggggtagcctctgggaggcagggtgggaggaggcgtgcatactccccaggcaggccctgggctgtggagcgcagacatgactggacaagaagcagctgagggtcccagctcattgcccagtttctgagacgctctgcagccacgcagcctcctggggagaggcagggacgcaccttggcaaggagcccagcagccctggctgcgctgtcggggcctcgtgtctggccctgatcctcctcgggagccagggggatagaaataaaaccgcagcgcatccaggagcctcatttctaccaaaactttctagcacctctcatgtgcttcctctcctgtgccctcagccagagctgtgaataaacagtaaaggccccaaaggctgaaggcggagcagaggaatgaggaggctctgtgggtgtcccaggggcagcttcagtggcacagccttcgagctaggccttggcagctgaatttgcaggtgaggtccctggggaccacacgtctcagccactggcttttgcccagacctccgtccattccccgtttatccgtgcatctatgcctcacagtatactgaacacctgccctgccctgggccctggcctcacggaggctgtagaagtgaaagagcctagcctccctgggaagcctaggggcacggcaacctcagcagagtgaagcaataatagagcagttccgggaagcttccaagcgcctgacactgctccaggggacctgctctccttgccagtttaatcctcactgcagccctatggggcaggcactctaatcacctccattgtacagatgaggaaactgaggaacagggaggttaaagtaatttctgagtggcagccctgaaggaggtggaagctgggtggggaaatgggggagcccaggtgtcccctgcagtccccaggggcctcctcgacaccaagactaaggctttccaaatgagaccacaattactggcctctgttttctttttcttttctttcttttttttttttttttgagacagaatttttctcttgttgcccaggctggagtgcaatggcgcgatctcggctcaccgtaaactctgcctcccgggttcaagtgattctcctgcctcagcctcccgagtagctgggattacaggcatgtgccaccacgcccggctaattttgtatttttagtagagatggcatttcttcatgttggtcaggctggtctcgaactcccaacctcaggtgatccgcccacctcagcctcccaaagtgctgcgattataggtgtgagccactttgcccagctggtctctgttttcagtttagttccacaaacacttattatgtgcctactgcgtgccaggcattgggcagacaaaacataagtcatggttttgccctcaaggcgctccctgtccagggagaaaaacagatcccctacccacgaccacctccaagatttccttttcttcttctttttttttttttttttttttgagacaggctcaaaaaagactccactaggctggagtgcagtggcatgatctcagctcactgaaatctctgccttgcgggttcaagtgattctcccgcctcagccttccgagtagttgggattacaggcgcctgccaccacacctggctaatttttgtatttttagtagagatagggttttaccatgttggccaggctggtctcgaactcctgacctcaggtgatctgcccgccttggcctcccgaagtgctgggactacaggcgtgagccaccgcacccggcctcaatccaggattttcaaatgccccagccagcaagtggcagctgagaggcctccagccgggacacagtgaggtcctgagctcttcatggttcctttctgcacaggaagcagaagtgccgtgggaaggagatccctctgctccccgctgcggctgcgaaaatcacttccttcctccccaaagactccagcaccaagaggagctgagccgaccagcaggagggacccctcagaatgaccctctgagctggcttcactgaggcaaaaagggttccagggtactcaggggccgatccaccctctctctcaaacaccctcactatcaaaaagggcagcctccatcctaggagcagccgggtttacctctggggccgtcttgtgcctcgcagtggccctgcagctgggtggtgctgaccccaccagaggcaggcagacccacctggaggccatctgcccgcaggctgcccgggctggaagcctggcctggcttgtctccagaatcccctctcagttccagctgcttgtatttttggctcttaagcatttgtttgatgccagacacagttctaaaggcttttcttgtacttcagccctcatagaaaccttgtatgggaggtgttatgactgctcctgcttcgcagatgaggaaactggagttcagagaacacaagccacttgcccaaggccacacagcgaagacgcagtggaacaagggctccagctcccgggacctggctttaaccactgcgctctcctgcaattcacctggtcctttaatcagggcagatattatacgcctcagctgacatatttagtgagggagaaaaacagtgactcacctgcttgaggtcacagaggggacccgggcttttctactggacacataccatggtccccctgctatgctcagtttctgggaggcagcaaggagctagtgccaactccccaaccccgccacaccaaaaggaatcttcaagatctggaagaaacaaaaaacaaaggtggcatgattttttctttttgtctttttttttttttttttctgagatggagtctcgctccgtcacccaggctggagtgcagtggtgcgatcttggctcactgcaacctcctcctcccaggttcaagtgattctcctgtctcagcctcccaagcagctgggattaaaggcacccaccaccacacccggctatgtttgtattttttagtagagacggggttttaccatgttggccaggctggtctcgaactcctggcctcaagtgatctgcccgcctcggtctcccaaagtgctgggattacaggtgtgacctaccatacccggccacaattttcaacatttattccacgtccaccatgtgccaaggttctgggaggctcgggcccttgacacaaccatgtccctgaaagagacgagcacagaaccaggaggccctcagacaacagacgccagagccaccaagtcccccactaacggtgccacccacttcccctcctggccacgcaggacggccccagggttggcctgtgctgatggtgccacctggtggtagacatgggaacgccctcacctgagatttcctctccgtgacccttcttccccctctaggggtcctgggctgccctgaggccaccgcctagcaagatcaagatagggcttgagcggcagtgggatagggcagtgggggttccgggggggtccggtgcaggcagaaccaagagtgtgccggcggagggctgtcggtacagggtgcagggcgtggcggctgcaggacctcagcttgcctctttaaatcccttcctgggcaccgcggtggcccggccctttcccctcgtgctgtttctgctggaaacgccgcacagtctcctcgggggcagccgccagcggaaacggttattggccgccaggcaagccagtcccatccttcccagcaactgggactttccgggcagggctccccagcgcgggttcagctaattaaggaagcaattagcctcccctgaggctattcatgcttcctcacccacagttctcaggttctgtgagaccagagcctcagtctcccgtgagcagagggtgtgtgtgtggctgccactattctgcagacacgctggctccaccccagagagttgcagggccaggaaatctgcatttaaacagaccctggctctcacacttcggaaactgcccgaagcacctctcaaatatgggacaggtttgatactccctccccctctccgttcccccgcttctcccttcttcgccctccttcccacttcctccctcctccccgccccttctgccccccacctgccctccctccctcccttccatccttcctcctcctcccggcaacctttctcccttccccactccctcccctctccctcctccttgtagggacagcgccgcgtcctgggaagggcaggggctctggcgtgagctcagtttgcatcccagccttgtctcctcaggcgttgaagtggggggcagtttctgcatccacaaaatggggatgaaatacccactttgtcagggtttagtgaagaacaatggaagtaaacgaagtgagagcactctgcaaacagtgagatgttgatagaaaagtagttttaggccaggcgaggtggctcacgcctgtaatcccagcactttgggaggctgtggcgggtggatcacctgaggtcaggagtttgagaccagcctgaccaacatggagaaacaccgtctccactaaaaatacaaaattagccgggcatggtggcgcacgcctgtaatcctagctactcgggaggctgaggcaggagaatcgcttgaacccgggaggtggaggttgcagtgagccgagattgcgccattgcactccagactgggcagcaagagcaaaactctgtctcacaaaaaaaaaaaaaaaaaaaaagaagcttccaggagtagacaggagggctcgcaggagggactggggtgttccttccaggctgagaggctgaggctggagagagacgcaggggaagtggaatgagaaggcctccctcctcccctaggcctcctctgatgaaaactaccttctctctccagcatccacagtcagatgcataaaaccatttattttttctgttcagaaattactggtattgcaactagtattgatttttactgttttcatttcacatgtacagattttcagctgcattcagagttcagcagctttcgggcggttcctggaagcccgacgtcatttataatccggtttctgagtgggaacggctttctctgggagacagctccttgggaagttagagacttcctgcacttattggactcgaacatccattctgtacaaaatgccccgcaacactgaggagatgctgttttgtttttgtttgtttgtttgttttttcgagacggagttttactcctgttgcccagactggagtgcaatggtgcgatcttggctcactgcaacctccgcctcccgggttcaagtgattctcctgcctcagccttctgagtagctgggactacaggcaagatgctgttttaggaccagaaatctcccaggggtgtgcagatcaacagtaatcccagtctgccctccatcgtcggaatagaatcagagggagggaaaatccgcctttggatctctggaccatgatctttccagcaggtcacaggtgaccaaaggcttcacttgcagaagccccctccccaggaaactcccctggggcaaaacgaaagtgttttgggcgtttttgtctgcctggcagggagcctgtgcctgagtcactgtttctcttgagcttcccttttcttttctttcctcccggtgtctgctgattttgtgtcaaacaaggagcatggggccaggccatctctgagctgcccgtgggacggggacttgggcacttgccaggagcggctggcctaggagtgggcgggaggcccttggtcacccaccccagggcctggcttcaggtggccacagctttctgacccccttctgggcactgggccaccagctgctgggcatggccagtgagtgagggtgagggcaagatgaggaagaggtggcgtaaggtgggaaaggattacttgccagacgcttggctgagtctgttctctaagccatgctgcgaggcaggtgctattgtgtctgcattttgcggatgaggaaactgtggctcagagaagggaagtcactgttttaaggtgaagtggccagtggaggtggggctagggttcgaatcctaggatcaggcacactgcctggggataacctctagaggtgtctgtgcttcccagctagaccggagctcgctgcagcccctcactttttccccggtcctgcttcaggccccacttcctctctgcaggtgcttaggccgaaaatcaggaatctcttgaatgaatgcatgaaggtggagccctttcccttaatgcgcaggtgaaaagggcacctcggtggattctactaaatttaatagaaggtaagtaggacctgggtcacaccggcttgtggaaagtggaggtcagaatctgagaggctgcgtttggcactaggtgggaaggagctggctagggggcagaggaaagagggcaggtggcttcggatccggggtctctctttcgttcaactccgtgggtgttaagggagccccatggcggcctgggcaagcgctgagagcacctggaaagagaacaccccgctggaccctcctctcccctcacttccagttgcacaggcgaggcccagccacctggacgcaggcccagaagcccaggaggcgggctaggggaaggaggggtttcctgggtcaccagcccctccccaccgggtccctggttcgcaggaggcctcgaggctcggtcccctgcccgccccctctactctgtttccccactgcccacagcctggcctggtaaacagccctttccctgggaatttctccccagcatctccggcaggtgtggatgggggtttgtggccacccagcctccccttctccaggccaagacatccctggtcctgtttgtcctcccaacatggcttccagacccttctccgtgggggaccccagcctgcatttccggttcagatagggtctgaccaggatggaggttggaactgtggtcccctcaccatggacacatggctcctgggagacccctggctcctttcgggtcccccatttccttccagctggggtcagggccagccagctgcaggataccctctgctgtgccccttctgggccccaggaggcccttccttcctcttgggatgagggcgccgtccctacatgcttgtcttgtgggtgcctggtgatgctgaaccacctgggcctccctcatggcgaggcccttccttcctcgcagggacccattcggggtggcccttaggaagggagctgttttggaagaccccttgactgcccttctcctctgtctcatcctcattccaggaccttgctcagtggctgagattgtatactcgtcattttgatttagaaaaagacatgatcaggttctgggatctattctccctaaggatgtctggccagggtaatagccctgcactgagcagaaggcatggagaccacagggtgggccacagagcaggaaagatcgagggaaggggcaaagaatggcagaggtgaaggaatccagagtactccaggtgctgcacacacaccagacctcacagccccctgtggagctcagattattcccttatttttctttttttttttttttttgagatggagtttccctcttgttgcccaggctggagtgcaaaagtgcaatctccgctcaccacaacctctgcctcccaggttcaagctattctcctgcctcagcctcccgagtagctgggattacaggcatgtgccaccacgcccagctaatttcgtatttttagtagagacagggtttctccatgttagtcaggcaggttatccccattttatagggaaagaacttgagtctgcaagaagcaagtcacccaggattctcagggcgaggaggaggctgaaccaggatttggacccagatatctctggctctcaagcctcctcttttctataaaccacctgtttacagcacagagggagctggtcattggggccgagctgggtttatggtatctgaagcttacacaatttcaagaggactctcatttaaaaaaaaaaacaaacacaattacaaaaccaaaattaggcataacagtgaattttatttatttatttattttatttttaatttttttttttgaggcggagtctcgctctgtcacccgggctggaatgcagtggcgccatctcggctcactgcaagctccgcctcctgggttcaggccattctcctgcctcagcctcccgagtaactgggattacaggtgcccacaccatgcccggctaacttttgtatttttagtagagacagggtttcaccacattggccagactggtctcgaactcctgacctcaggtgatctgcctgcctcggcttcccaaagggctggtatcacaggcttgagccaccacacctggcttccctatgtttttctatatcctgatcgcttccttgtacaacaaggattttgcaatgccatattctatagagaaaacaaacttcaatcaaatttctttgatatggtagcaggaagagttcagggcatggctgtgtcaagttttctcatgtgggacctgaccttacatgctccttggatgggccacactggtgaccacgcgaggctttgatgctctcatcacagggacctgttctgagttttatgttgtctttgttggtttcaacattttatgccaaatcagcaagaaatttaaatcttttttcatcatgatcattgtattcattctccttcattcattggtgagcctgttcctggaagccatctgtaccctcggacagccagcaacgactgagctacacatggatagaaccatgaaccacaagaaatacccctgaattctgaactatttccatatcaacttctcccaaaatacccacagccagtccaacaccatccaactggatgggagcagggaaggcggggaatcagagtggaaagagacttagctgagttatttttattatttttaaaagccttattcatagacatatgtgtatatttagagacagagtctatcactacgttgcccaggtttgattctttttttagagacaggtctggagtacagtggtgcaatctttgctcatcacagccttgaactccagggctcaagccatcctcccacctcagcctcctgagtagctgggactacaagcatgtgctgtgccaccaagctggcttggtgtgactaactgatgtctcacctttgcaaactttacagaaacatatgacataggaacacattgcaattacatattgcaattcagcagaaaaaaaaaaaagaaagactttctttttactgaatggcactgacttaccaggtacatacaagcaagtggagtctggggaccactttttggctgttctagagaaagtgccccaaagaggattcagcagccagactcctgttagttttctcatctcactcagaaggctcagcctctgaaacaaccattccaggacttggaggcaggggatctgggttaaaggcccagctctgccgtttcctaactgtggggccttggcaagtgcaggtcctgtgagcttcaccagcctcattagcaagaatagttcatgttcccctgccacggaagtgccctgtgaactagaagagagcatgggcaagtatggggttagtctcgctaacagatcagccagcttctgtctgggcaattctgtcatttagggttttgctggggtggccccgggagtcgtttgggagttcacctatctccccaggcatggagaaggggtggtgtttctgaatcaggattctgagctgaactgcaaacctgactgtgctccaagtttcttggaccagcaagcccagctcccagagtcccgctgccctggcctgaacccgccgctccacaccccgggctctcggcagccgggcggctcgtgggaggaggcgccatgagccttcttgcatttcctgcttcagacttgatggattacagaggactcctgctccagctgtggggaactccagcccgcactttgcctccagcccgatggtgcaagatccagcttctcttcagcctggcatcaaacgtctttttgatcagcttttcatccattttctgaaaatgtagtgattgagagatgttctgaatcttgcagaattctgtgtcgcaccctggccacacatcaatgcaggcctgaacctgaccctgggtggactccctgctctctgccagcccctttctcacccctgggtccccacggcccctggctctctcccctctgctagaatctcgctgagggattggtggggagggggtggtcacgcactgggtggagatctggtgccccctggaggccggacaggaagggccagggcggacaaggtctttgagaactcggtggcatcccgctcctgatggcctgggtcccaccgcccctcccccagccttcctgacagcagaggagattgatggggcgctgctcgaatgttcttcatcagcgtcttcagtaataagcttctccattgggtaaccgatcctagtttagcaaaaccgtttgtcaaccatttcctcccttgagcttgataagaaccccgtgggagaggagagaggggggccccccaggatctgaaaagctgtgcctcagccaagttcatgagtcactggcgaggaggcctgtaggtcagcaaagcctaggaggtcaagagtgcccacatggggacctacgggcctcagggccgcaggttgctgggttggaccctggcttggagctcaggatagaaacccggaaaccccacaggcaaagaaggatgcagaacagaacagggcagaaccaaggacccagtgagggtggctggcgtcagagcaaatatcagagttcacaaggtgaaataatccaaaaatctatacagaaaaagctaatcattttctccaatctctcccccaaaggtgtctactcctgcaggcttacctgtaacctttgtcactcactcttctgattctgcaaacatataaaccacggagccacagccaagagaatctggacttgttcgtttttcctgaaataggatatcttaaataatccgtggctcagcactgcgcccttttttttcttttcttttctttttttttttttttttgagacggagtctcgctctgttgcccaggctggagtgcaatgtcatgatcttggctcactgcaacctctgcctcctgggttcaagcaactctcctgcctcagcctcctgaggagctgggactgcaggtgcaagacaccacgcctggctaatttttgttatttttagtagagacagtgtttcactatgttggccaggctggtctcgaactcctgacctcaaatgatctgcctgcctcggcctcccaaagtgctgggattacaggcacaagccacagcacccagcctcactgtgcccttttcactggcaggcattttattgtccctacagacccaagacggggtgggggagacgtgctttgtgctcacctggctggttcatgggcaggtggcctggaggacccagccctggcagctgtggggtagctccagcctgggccggacaggtaagcggaatcaagagatggggccagttgcggctacagggccaggaggggctgcagctcctggtcagggtcttcagaaaagcagggttctgctggctggcctgcagtggaaagaagacagagggacagggaactgggggtagggacaaccctgctcaactaagtgaccttgagaggacaggagtccccacaggaaaatcaggagactgttcctctggctggggtgggctgtggggaggatgctgggccagcagagcctgacagagccaccccagtcataaaaggatatgtttttgtcaagacttttctaaacccataatcacctccctcctatgtcttgggtcagcttctttcatcgcaggcaccactgcggacattgctgggaggaagaggagggagaagcgacgggcttcattaggaacggtgagtttgtgactctgccgctaagtggcagctccagctcacccccccagctccctcccacaggccacggctgggcatggagaactggtgacttcagaggcccggacagaggagacgggggagagcgaggggccgccgtgcctgaggtctgggggtgacagcaggggatggccaaggagtgcagggccagcttgccctgccctctctaagagagtcttactgaatgtaggggttgaattgtgctccccaagagatatgttcatgtattaacctctccctccccccgactcttccattcctgtgactgtgagctgaatttggaaacagggtcttttcagatgtaatcaggtcctttcaactcacgataaaataatcttggatttaggctgggccctatgtccaacagctggtgtccttataagaaggagaggagacggctaggcgcggtggctcacgcctgtaatcccagcactctgggaggctgaggtgggcagatcatgaggtcaggagatcgagaccatcctggctaacacggtgaaaacccgtctctactaaaaatacaaaaaaattagcccggcatggtggcaggcgcctgtagtcccagctagtcgggaggctgaggcaggaaaatgatgtgaacctgggaggcggagcttgcagtgagctgagatcgtgccactacactccagcctgggtgacagagcgagactctgtctcaaaaaaaaaagaaaaaaaaaaaaaaaagaagaagaagaagaagcagaggagacacagaggaaagagggccataggaagatggaggcagagatggcagtggtgaggctacaagccaagggatgcctgtggccactggacgccggaagaagagagggaggattcttccctagaaccttcagagggagcacagccctgccaacaccttggtgttggacttctcgcctccagaactgggaggaaatcaatttctgttgccttaagccacccagtttatgttattttgttacagcagcctgggaaaaggaatatactgaataagaacccaagtgagcttattagaaagaatattgaggcctggcgcagtggctcacatctgtaatctcagcactttgggaggctgaggcgggtggattgtctcagtccaggagttcgagaccagcctgggcaacaaaaatacaaaaattggccgggtgtggtgatgcacacctgtaatcccagctactcgggaggctgaggcaagagaatcccttgaacctgggaggtggaggtggcagtgagccgagatcatgccattgcactccagcctgggcgacagagcaagactctgtctcaaaaaaaaagaatgttgaacctcctcaagaggaggtaagtgattttaaacactctgaagccacacagggacaagccttttacaagccaagaggagaaggaggaaaaattgaagtcacttttttttttttgagacatagtctcactcttgtcgcacaggctggcgtgcactggcgcaatctcggctcactgcagccaccacctctgaggttcaagcgattctcctgcctcagcctcctgagtagctgggattacaggcgcccacgacggcacccagctaatttttgtatttttagtagagatggggtttcaccgtcttggccaggctggtctcgaactcctgacctcaggtgatccacctgcctcagcctcccaaagtgctggtattacaggcataagccactgtgcccggccttgatttttcttttttaatggttaaaaaataccttcaaatgtacacacagtaaaattcacttcttttggtatatagttcaaatgcatagagtcctatcaccatgaccgcagtcaagatagggaacatcccgtcactcccagaactcctgtgctgccgctggcaaccactgctctgttctcccgttgcttttccagcaacgggagtcctgaaagtggaatcgtgcgagtccaggttctttcgctgagcatcgtgatttgaggttcacccacattgttgtatggttccttttcattgctgagaagtgttccactgtctggatggactgtggtctatttatctattcaccaagtaaaggatgtgggcgatttccaggtttcgacgattatgaataagctgctgtaacattcacgcacaggtgtttgtatgaatggaagttttcacttctcttgggtgaatacctgggagtggggtttctgggtcccgatcgggtttctagtggtctgtaagtcagacttgctaagagttttcgttggggagacgcacacaggcaaggtcagctctcagggtcctttctgcaatgcggggatgtcgaggtcacctgacagaggggcaaatgccagctggtcgcccaacctgctcttgtccattccttttccctcagaagctaatagaggaaagtaaacctgttgtttcactctcatttccttttattttcattaatattaggaaatgccaagattagtgaaagaatgaaaagagtcaaaacagcctagaaaaggcttcaatgatcctcaaactggatgatcgaatcccgaataattgggaatcaacagtaaaggccaaagtaagacttctaaaaagtcctcttttttttttttttgaagagatggggtctcactacgttgcccaggctagtctcaaacttccaggctcgcccagtcctcctaccttggcctcctaaagtgctgagattacaggtgtgagccactcaacccagcccaaaatccctattatatcctatttttttgctttgcatgaaacattttatttacttccatcccaccctgaacataacagcagagggaatttctttctttcttttttttttttttttttttgagatggagtcttgctctgtcacccaggctggagtgcagtggcgcgatcttggctcactgcaagctccacctcctgggttcacaccattctcctgcctcagcctcccgagtagctgggactacaggcatgcgccaccatgcctggctaatttttttgtatttttagtagagacggggtttcaccatgttagccaggatggtcttgatctcctgacctccgtgattcgcccgccttggcctcccaacatgctgggattacaggtgtgagccaccgcgcccagcccagcagagggaatttctaaaggcaaagactgttcctgaattaggcgaaggcatggcagcttcacctcttactgcctggggtcaggcaattctctgcagagcaattctcaaggaggtgtcttagcttgacttgccccagaattgctgctggggagtcccagctgccccatctaattaccctgagcccttctacctaaatgcagccctggcccagctcaggctgagaagtcccaggatctgcagtcaccaagcagaagaaaaccagaagagccaacagtgtcattgcaggctaagtccaagttcaaagagaggagaagaccagtgtcccagctcagctcacagtcaggcagacagagcgaattctatctcaccgtttttttttttttttgagatggagtctcactctgtcacccaggctggagtgcagtggtacaatctcactgcaacctccacctcccaggttcaagcaattctccctgcctcaacctcctgagtagctgggattacaggcgcacgccaccacgcccagctaatttttgtatttttagtagagacggggtttcaccatgttggccaggctggtcttgaactcctgacctcaggtgatccacctgccttagcctcccaaagtgctgggattacaggagtgagccaccgcacccggcattattttttttttttttttgagacaggctcttgccctgttgtccaggctagggtgcagcggtgtgaacgtggctcactgtagcctcgatttcctgggctcaaatgatcctcttgcctcagccttctgagtagcggggactacaagtgtgccacacctggctaattttttaaaaatttttttgtagagatgaggtctcgccacgttgcccaggctggtctcgaacttctgggtttaagcgatcctcctgcctcctgcgtagtcgggactactggcatgcgtcaccacactcggcttactctgtcttttgttctcttcaggctttcgatggattggacgaggcgcgtccaccctggggagggccatcattttattcagtctactgatgcaaatgcttatctcttctggaaacaccttcacagacagacccagaatatagttgaaccaaatactgggcacctcatggctccaacaggttgacacaaaaaatgaaccattgcagaaaacgaagaacagtcaccaactcccacccatgcagctggctcatttgctgggctgccctccccagcaggtggcacaggaatccctgccttggcagggaggaggcctggggtgtgtgcaggtacccatgggaagtttctttgccatggggaaagccagagtcaccccttgcttgaacacaagagttggaggtttcagtgagctgagattacgctattgcactccagcctgggcggcagagtgagactctgtctctagataaataaattaaataaataaataaatataatttaatataaataactagaaatttttcaatacttgcatctctgtaggttacctctggaagtgcagggctttgtctttttggattaactcagaaattagaccttcagaaaacaacatcagctctgattctctgcacccttgatgctgccggtggcgactgcggcttcctgatggaaatgtagacctgaacataagtcgcagaaaaatgcagacttgagttggagctaagctgactcaggtattttgagatctataatctgagtggggagcagagagattccaagatatttgcattcagtggcttttgcacacagcagaacctgtgctgagggcatttctagggtcattactcataatctgcagtgtctctttccagggttccaggcgtcttaccccagaggtgatttccagatttcgagaaaaacccaggatttagggctggcacggtggctcacgcctgtaatcccagcattttgggaggccgaggcaggtggatcacttgaggtcaggagtttgagaccagcctggccaacatgatgaaaccctgtctctactaaaaatacaaaaaaattagccgggtgtggtggcatgcacctgtaatcccagctactcaggaggctgaggcaggagaatcacttgaacctgggaggcagaggttgcagtgagcctagatcgtgccattgcactccagcctgggcaacaagagcaaaactccatctcaaaaaaacaaacaaacaaacaaacaaaacgcaagatttagatcccctcactgtagcgccctcatggcctggtaactttagcaaagcctccccctcctccccctcctcctcctcctcctcctcctccctcctccctcttctaggtacagaggatgagcagtggctccccacaccatcccctgaagcagaggcccctcttcccttcattccccattctgtacagatgctatgggagcttcaggctccacactcaggtccccagtccctgaaacataaagctgaataagacagagtccctgggctgaaggggccactgttggccatggaagcagagtaaacagagtggggccgacgtaaaggtgagctggggtgcactggaggcacaaaacgggcaaggatggagacgtgggtgacgaggtagggcagacaggcagagctcagactgggtcctaggcagggagaagtcaccattgtagagcaaggacgatgtggtcagatctgggctttagaaatctaggtgtctagcctaggcaatataatgagacctcgtctccacaaaaaacttaaaaaattagccgagtgtgatgccacatgtctgtagccgcagctactcagaaagctgaggatcccaagtggaaggataactctagctcgggaggtcgaggctgcagtgagccatgatcgtgccattgcactccagcctgggcaacagagcgagaccctgtctcaagaaaaaaaaaaaaaaagtaaaagaaaaagaaagaagaaatacagctctggagctgcctaggacagggttggggactctcctgactagctgccagcgaatgtttgctttctgtggccaggccctgcctggccagggtgcacagggctgagcgaggcagatggagcccctgctctcagactgcttttccgaatgccatcttgacgctgctcaagtttggattttggttttcatggaagtcaactatggttctgacatggccacctctgtctcaactgatgcacggcctagggaatccggtgatgcttcagcaggtggcagggctcagctgcacccgcccgggccccagcgccgcctgccactcctcctcctcctcccaggcttcggctgagagcagggcctggagccagcctgctgggtggactcccagctccacagttggctagctctggggccctggggagatgtccaccctctctgtgctttaatttcttcacctgtgaggtggggatggtagcacctccctcatggggtggctatggctgtgaaatgaggtaacgtctcggtgttaggcagcttccaaaacggctctccaagatcccctgcctcctggccttcatagccttgtggaacccctggccctgtgtgtgggctggactcactgcctgcttccacccaagagaacagggcacagctgatgggggttacttctgagactaggtgatcaagactggggcttgctgggtccctctgtctctgactctttcctctgctctctcctgctcacttgctcaccctaatactatatcaagagctgccctagaaagaggccccgtggcaaagaaccaaaggcacccagcaacacgagtgagggtggaagtggctctttccccattccagcctcgcggtgaccgcagccctggctgacaccttgcttgcagcctggtgagagacagcagcccgaggaccctgctaagctgcacccaggctcctgacccatggaaactgtgagatgataaacatgtactgcttaagctgagattcgggctaatttgttacacagtcatagacatcgttttttgttgttgttgttttttgagatggagtctcactctgtcgcccaggctggagtgcagtggcacaatctcagctcactgcaacatccacctcccaggttcaagcgattctcgtgcctcagcctcccaagtagctgggattacaggcatctgccaccatgcccggctaatttttttgtatctttaggagagacagggtttcaccatgttggccagctggtctcaaactcctgagctcaagagatctgcccaccttggcctcccaaagtgctgggattacaggcatgagccactgtgcccggcctgttacacagtcatagacatctataaaatactcaacacggtgccggcgcatggcaagcatcagttactgaccacggtgacccttctgtgtacaccaggggaactcaaaatactcaggaaatctaagcatataagcctagtcaccaggctgtcgacatgacccttaacaatgaacctgtgtcttttgccacctcatgatgtcatagaagaagagcagcatcaatgttaagagtctggaggagggactagatgctgtggctcacacctgtaatcccagcactttgggaggccgaggcaggtggatcacctgaggtcaggagttcgagaccagcctggccaacatggtgaaactttgtgtttactaaaaaatacaaaaaattagccaggcatagtggcatgcacctgtaatcccagctactctggaggctgaggcaggagaatctcttgaacctaaaatctaaaaaataagaccacgccaaggaaaaaaatcagtaacagtatagaggggatggaagcagacctctttaatacaccttgttcttcagttttgactttgccatcatgtaaatgctttatttagttctaaatcaaatttaaattgaaaaaaaaaaattcccaggccagggcggcggctcatgcctgcgatcccagcactttgggaggctgaggtgggcaggtcaactaagcccaagaatttgagaccagcctgggcaatatgacaaaaccccatctctacaaaaaatacaaaattagccagatgtggtggtgcaggtgcttggaggctgcttgggaggctgaggtgggaggatgacctgggcctgagaggtggagtttgcagtgagtcgagattgcaccactgcactccagcctgggtgacagagtgaggccctgtctcaaaaaagaaaaaaaaaaaagtatttcctagttgatttttgttcaacttcaattaatcataatctaccttcttttttttgtttttgagacaagagtctcgctctgttgcccaggatggagtgcaatggtgtgaactgcaacctctgtctcctgggttcaagcaattcacctgcctcagcctcttgagtagttgggattacaggtgtccaccaccacacctggctaaattttgtacttttagtagagatggagtttcaccatgttggtcaggctggtctcaaactcctgacctcatgatccacccacttcgggctcccaaaatgctgggattacaggcgtgagccaccgtgccctgccaatcacaatctacctttaagtgataatatgctacctttttttttttttttttagacagtctcgctctgtccctcaggctggagtgcagtggcgcaatcttggctcactgcaagctctgcctcccgggttcacgccattctcctgtctcagtctcccaagtagctgggactacaggtgcctgccaccatgcccggctaattttttgtatttttagtagagacagggtttcaccgtgttcgccaggatggtctctatctcctgaccttgtgatccgcctgcctcagcctcccaaagtgctggaattacaggcatgagccaccatgcccagccaatatactacttaatataaagcataagaacattggccaggtgcggtggcttatgcctgtaatcccagcactttgggaggctgaggagggtagattgcttgagcccacaagtttgagaccagtgacaccccatctctacaaaaaaatgtaaaaaattagctgggtatggtagtacatgcctgtagtctcagctacttgggatcgcttgagcccaggaagtcaaggctgcagtgagccatgattgtgccactgcactccaacctgggcaacagagcaagaccctatccccactccccaccctcccaaaaaaaagaacctaaaagtagtgtatttctgattctccacatacacactccatctatttaagaaactacaataaatacaatgagttcaggctggatgcggtggctcatgactgtaatcccagcaccttgggaggcagaggttggtggatcgctccactgtactccagcctgggtgacagagcgagactctgtctcaaaataaataaatgaataataaaataaaaagtaaatggtctaggcctggccaacatggtgaaaccctatctctacaaaaaatacaatatttagccgggtgtggtggtgtgcacctgtagtcccagctactgcggaggctgaggcaggaggatcacttgagcccaggaagtgaaggctgcagtgagccacaattgcgcaccactacactccagcctgggtgacagagtgagaccctttctaaaaaaaaaaaaaaaaggaaagaaaagaaaatgtccaaatttaaaggcagagattgtcagattggattaaaaaaagattcagtatcctatttataagaaacacacttcaaatataaagacacaaataggttaaaagtagaaggatggaaaaagacatacctaccatgctatcacaaatccaaaaaaagctagcgtggcttatcaatatcagaccaagtagattgtatagcagaagacattaccagggataaagaggttaattcaataatgattaaggggtcagttattccagaggacataacaattctaaacgtttatgtacctaataacagagcttcaaaacacttgaagcaaaaacttatagaacagcaaagagaaatggaaaagttgacaatcatagttgaagatgtcaataccctgctttcaataattgatagaattgatagaatagctgggtatagccgtgtatcacctgtagtcccagctactcaggaggctgtggcaggagaagcactttagcccaggacttgagtctagtctggacaacatagtgagatcccacctctgaataaatacatagaaattgatagaatgaatagacagaaaaccagcaaatatatagaagatttgaacaacattatcaaccaactcgatccaatggacatttataaaacactttacccaacaacagcagaatacacattcctctcaagttcacacagaatatttaccaacatagacaatattctgagacattaaacaagtctcagtacatttaaagggactcaagtcattcaaagtatgctctcttacaatggaattaaattagaaattggtaacagaaagagctctgaaaatgcccaaataacttgaaaacgaaataacacacttctaaataatccacgggtcaaaaaagaagtcaaaagagaagtcagaaagtattttgaactgactgaaaaggaaaacccaacatatcaagttgtgtggtattattagctgtacgtttctttgtagatgctatttatcaggttgaagaagttctctattctcagtttgctgggaatttttttttttgttttttgttttttgaaactgattctggctctgtcactcaggctggagtgcagtggcgtgatctcggctcactgcaagctctgcctcctgggttcacaccattctcctgcctcagcctcccgaatagctgggactacaggcgcccgccaccacgcccggctaattttttgtatttttagtagagacggggtttcactgtgttagccaggattgtctcgatttcctgacctcgtgatctgcccgcctcggcctcccaaagtgctgggattacaggcatgagccaccacgcccggccattttttttttttttaattatgaatgggtgttggatttttgtcaaaagcttttcttgcatcaattgatatgatcctatgattttcttctttatcctgttggtatgctaaattgcattaatttttttgtgtttttgttttatgagactgagtctcactctgtagtccaagctgaagtgcagtggcatgcagtggtcagctcactgcgacctccgcctccggggctcgggcttaagctattctcgtgcctcagcctcccgagaagctgggactacaggcgcatgtcacatgccaccatgcccagctaattgtttgtattttagtagagatggggtttcaccatgttgcccagagtggtctcgaactcctgatctcaggccatccacctgcctcggcctcccaaaatgctgagattacaggtgtgagccactgtgccctgcctaattaatttttgaatattgagtcagctttgcacactgccaatgcaatcaagatgtagttattcttaggctgggcatggtggctcacacctgtaatcccaggactttgggaggccgaggaaggtggatcactggaggtcaggagttcaaaaccagcctggccaacatggtgaaaccccgtctctactaaaaatacaaaaaactaatcaggcattgtggcgtgtgtctgctactcaggaggctgaggcagaagaatggcttgaacccgggaggcgggaggttgcagtgagccaagatcacgccactgcactccagcctgggcaacagagcaagactctgtctcaaaaaaaaaaaagtagtagttattctttctctaccccctctcccttcccactgactgaggcaggcaatgatgatgaagccttaggcagaggagatggaaggtgatgtgctccggaatcactgtatgggggaaaaccccctcatcaaccacaaacactcacactggtcagtcatgtgagtgagaaacacatgtcttttgggttaagacgttaatatttggggatttatattaggggatttatttattacaacagctagcgtttccttgctgttaacctcaaaaatcatcagtgtatctcgaaagacacattcttcttcttcttctctttttaattgagatggagtctcgctctgttgcccaagctggagtgcagtgatgcaatcttggctcactgcaacctctgctggccaggttcaagcaattctcctgcctcagcgtccagagtagctggtattacaggtgcccatcaccacgcccagctaatttttgtatttttagtagagacagaggttcgccatgttggccaggctggtctcgaactcctgacctcaggtgatccacctgccttggcctcccaaagtgctgggatgacaggttggagcctctgcgcccagcccaattcttgagtattaaatgcttaactgccttgttatacctcctgtactaagaacactaaaaatgtagagcattttagacaagaaacctaattaaaaaaaaaaaaaaaaaacccagttcaaaagcatttgggagtgattcagaaaaccacagccccggagctatagtctctgaagatgcggggcctggacctctctgcattcccccattggtgtctgctgaagactagcgtctgcagaaatcccagtctgtacacaggctgagactattccttttccctacatcctggtgatgggcacacacacacctcaagggaggcgtcgatgctctcaggcactgaacttgttcccgtgtctttatgtttcatgatcgtatatgagagagggagcgtggcctggaactgtacacaaaatgtgaccgaaaacagcctctcgctgtttccaattaaacaacctgctcgagcctttggtttctctccatcacttcctgtctcaatctcactgacgtcttcttttttagcaaaatgcatttgtatttcaagcagaagatcaatggttacattttaaaacgctaaatatcttttctgccaggccgaatgggggtgtttctcccatccttctctgcacgtcttctcatcttaaagcgatggaattgagttctgtgaaatccgatctggtgtttaagctctgatttataacaaattacctatgtggcactcaagaaagaacttgtatgtcagataacactggagtttgatttcaccaccctgcccccaaacccgtttattcattcatggcggggagagatccagagggccggagcaatttcatcaaccctggaattcgcgcatggagcctcctctccccagaccatcctgctaccatgaatagacagcacgtggccgccttttatgataaggtcagaggaaaggagtgcatagagagaggccgtttggagagtcggagctgtaagtttcaggtataaaacctgaatagtaccagtcctcttgcctggggccagatcagacaggagggaggaggtggaaggcaactgttccacctcccgaggtgattcctttggacgcctgaatcctttggattccctggctcccagcagcggactctgccctcagccatctttatcactcctgattagggctgcagacgcctccctccccaccctgccttgccaggctttgtggctccccgggctcgttttctgatagagctgtcagtttttactactgataggagaaatcattttctttcttagctgaatgttaattggctcccctcccccattcacttagtatatcccgtcccctattttttttttttaccccaaggaaaaggtaccttagtagagacacatttcggaaagacaaagaaggtgtttcttgctaaattgctaattggtaactgaaatcagaggttaagaaaaagctaaagaggagagcgaggaaggaattaggaccacatgtttctgtagcttgaggtgagctggcgccgcctaaatgctcctcggatgcagcacctgctttctgtagcgggctcaatattcaataaggagacccacgagatcagctggggccagttgagcaaacattgacatcttggaggtaccaggcaccaagacaggtcctagagatgcggaggtgactaagaccctttgacagtcctatgggacaaagtgtcagtttgatgtgatgggagcagtggcaaaggtaaaccaggatactgcgagactcaccgagggtcacagaaacttcctggagaaagcgaagttagagctaggctttgtacgataactaggagttggctgggagatggtggcggcagtaacatcccaggtagaagagacagcttgtggaaggtcatgggcgccgtggagcatggtggtgcctgagaggagcagtaagaagtttgctatggctagagattaaggtcacgtggaggaccagctccagcagggcttgggtgccttgcaggttttctccctataattctcatacacttaaacagcaaacaaacagaccaagcgtggtggctcacccctgtaatcccagcagtttgggaggccgaggtggaaagatcacctgagatcaggagttcgagaccaggctggccatgatgaaacctcagctctactaaaaatacaaacattagctgggtgtggtggcgcacacctgtaatcccagctacttgggaggccaaagcacaagaactgcttgaacccgggaggcggaggttgcagtgagcagagattgcgccactgcactccagcctggttgacagagtgagactccgtctcaaaaccaacaaacagctttattgaggttgaatttacatactgtaaaatgcacctgcttaaagtatgcaagtcaatgggttttagtatattgacagagttgtgtcaccataactaactttaggacatcccacagaaaagcccttctgaggagggtttttgacagggtcatggcctgcccaaattatgtctctcatcggtttggcagcagagcagagacgggcttggaagggacaagtgtgggccctcatcgagccaagaacatgagcaatggcacagcagtgattgtgcacaagggctaaagatttatagcagtgacagggggaaatatactccatctcttagattcttctttgccgggaaaagaactaggttatgaagacgcgggtcattttttgctggctggctatttagtggcagttctacaaatcagtattatggatgatgttgcttatttacaaagaaaaaaatgacagagtggctatatcatagcaaaatccagaatgctgaagtttctgcaaaatgggaacatgacagagcactcactgtccagcaagtttcctgcagcaaaaaccgcagccgatctggaccaaataaagggcacaggctctgtcctcaaaggctctgcagggggctgcattcagactgaagtgttgagtcacctgtgaatcctgggttgtgagcagacctgcctttgtccagtgcaggtgcaggctccttagcgaggaaaggctcagagagagacaggtgcacctctgcagcagctttgctggcaggtgggtctgatctgagcctgttgctgcaatcattgatcagttaggttttttaaattgcaaggaagaaataaaaccaaattaaactggctttaccaatgaaaggaactccagtctaacattatatttgactagggtcatgggaaaaacctctccctacaaaaacatagaaattcatgataaaatctaagtaaataaataaaatgccagtgtgtggctgagttagcaagcaagaaaggaatatccccaggggccagaaacaaagagggaaaagccagaatggtaagcacagggttctgtcccacagctgcctccaggaggcacgtaagagaaggcaggggttatcagagccagcaaccaggggccttggttctggtggctgtgttgagactggagataagatcttcagctgacaggagtagagaggtgaatctatgcctccttgcaaaagccagactcctctgagggcaaatctctcagtgaaagatgggctagaaaaaaacctaccctctggcacagggagataacaagaaagcttgtttatcatagcaggagcatagagcagtgggggcctgggggacatgctacaaaaggatcccttgaaaaatccaagcctcatatctgtgctttgagggggtttgaggtccaaatttgtacttcatgcatggcctgggattcctatgccaagagaagaaaattggtacgaggctggtgttaactctgggccacctggtgtggcagctgcaaaatggctgtggaggggtatttctacaactccagcagcaggaaattcccacgcgaaaaacatgctccactgaagatgagctcacaatcaaatctcagtacacacaaggaaaggggtcacctggagcacagggacagacagtacacacagaaggaatagaggccgagactctgagataacagaatagcaggccaaaagcgaatatcgaataagaatgttcgtgatgattaaaggccaaaataaaagattcaaactctcaagaagatagtgagacatcatgacaccaagaatagaccgattttttttttctttttttgagatggggtcttgctctgtcacccaggctggagtgtagtggtgcaatcttgactcactgcaacctctgcctcctgggctcaagagatcctcccacctcagcctcccgagcagctgggactacaggcgcatgccaccatgctcagctaattttatttatttatttttgagataaagtctcaatccctcacccaggctggagtgcagtggtgtgatctcaactcactgtaacctctgcctcctgggctcaagcgatcctccccgctcagcctcccaagtagctgggactacaggtgcaagctaccaacaccaggctaatttttgtattttttctagagacagagtttcgccattttgcccagtctggtcttgaactcctgagctcaagcagtccacccacctcggcctccccaaatgctgggattacaggcgtgagccaccgcacctggctagaatagacagatttgaacaatatttatggatgaaatgatatggtgtctgagatttgcctcaaaataatctcagagtggggagctataggaaggatcatggatgaaacaatatgagatatgggtcggtacttgttgaaggtgaataataactacacagggccaggcaccatggctcacacctgtaatcccagtgctttggaaggccaaggtgggaggattgcttgaacccagcagttcgagaccagcctgggcaacatagtgagatgccatctctataaaaaaaaaatgagtaaataagaaaaaggttaataagtagagaggtttattccattgtctctaattttatatacatttgaattttctataataaaaagtatgaaacaaaacataaagctccaaatagagcttctagaaatgaacaatatcaataatgaaatttaacacttaggacaggcttaatgacagattggacacagatgaagagagaattgataaactagaagatatgaaaaaaaatatctaggctgggcacagtggctcatgcctgtaatcccagcactttgggaggctgaggtgggtggatcacctgaggtcaggagttcaagaccagcccgactaacatggagaaaccctgtctctactaaaaatacaaaattaactgggcgtggtggcgcatgcctgtagtcccagctacttgggaggctgaggcaggagaatcacttgaacccgggaggcagaggttgtggtgagccgagatcgtgctattgcactccagcctgggcaataagagtgaaactctgtctcaaaacagaaaaagaaaaaaaaatccagaatgcagagtggagagagaaatatacaaaaaaaaaaaaaaaaaaaaagtcaggagagattaagagacacagggaataaattgaaaggcatgctgctcatttaataggaattctaaaagaaaagggcacaggcgcagtggcttacgcctgtaatcccagcactttgggaggctgaggcgggaggatcacctcaggtcaggagttcaagaccagtctggccaacatggtgaaacctcgtctctactaaaaatacaaaaaaattagccgggcgtggtggtgcatgcctgtaatcccagctcctctggaggctgaggcaggagaatcgcttgaactggggaggcggaggttgtggtaagccaggaccacaccattgcactacaccctgggcaacaagagcgaaactctgtctcaaaaaacaaaaaaaaaaaaaaaaagaaaagaaaagaaaaaagggagaggtgagattcaaagaaatcgcatggacagttttttgagaattggtagaagacctaactcgttgggctcaagaagcagaaatggctctgagcaataagtaagaataaatttacacctcggcacgctatagagaaactgtaagctacaaaagacacaaagacaaccataggaacaactagaaaaagaaggcacctcacctacgggtaacaattctgctgacagaagacttctcaacagcaaccaaaatctccgaaggcagctaagcagtgttttcaaaggaattgtcaacctagaatcctatgcttagcatgattattgttctaggatgagggcaaaaatatatatattttagaatgaagacagaggctgtttgccacactcactggaaatgctgtactagtaaaaatgcactttatgaaagagaaaagtcaacccagaggaagaaaagacttggaaacaataataatgtctcatttattgagtggttgttgtacaccaggcactgttctaaggattttctctacaaaaaatgtaaaaattagccgagtgtggtggtttgtacctttccttatttatttaattctttttctttctttcttttttttttttttttaaagacagggtcttgctctgtcacccaggctggagtgcaatagtgcaatctcggctcactgcaaactctgcctcccaggttcaagtgattcttctgcctcagctccctgagtagctgggattacaggtgctcaccaccgcaaccagctaatttttgtatttttagtagagacagggtttcaccatcttggccaggctggtcttgaactcttgacctcaagtgatctgcccgcctcggcctcccaaaatgctgggattacaggtgtgagccaccatgcccggcctcttatttatttaattctcatgttaaccctcagaactgggtgtgattactatcatactccctttacagatggggaaactgagtcacagaggggttaaaacttgccctggtcacaggtcaaggtttggctacaacagtccacattcttaaacactatgctataccaactcaagaagcggtagtggagagccaggtgtcgtagctcatgcttgtaatcccagcactttgggaggctgagacaggaggattgcttgaggccaggagttccaagactagcctgcacaacagagtgagaccccatctctacaaaaaatttgaaaattagccgagtgtggtggtgtgcacctgcagtcccacctactcaggaggctgagtcaggaggctcccctgagcctgggaggttgaggatgcagtgagccatggttgtgccactgcactccagcctagccaacagagtgagaccctgtctcaaaaaattatgatattactccagctctcttttgacagaaaaaaaaatgtttaatagaagcaatggtgtgcttttcaagtaagcaacattgcctcaatgagtaaaaccgtttccaaattctgacagatattaaagtttaagattcaggcaggaataagaaatcagaattcccaggaattcttgggaattccccaaatcataagctattcctaaaatgcttccaacatgattcatactcttaacccaatcacctaaaaatgtatttgacaaataagaaacattaagcttaatactatttataaagaactgtagcctatagggcatattacaacacgggaaaaaccagtgaccattattgggtgatattcaaataatgtaatttttggatttcctagcaaggttaacagtacttcatgtgtcactgcaaataacacttcatgtgtcaacattgccgattttaagacttattttgattcccaaatttgttcttggaacaccactgatatgatagagtttatataaagtatgttatgcatatagacaagttgataattattttatttgcaagaatgacttgcagcagcagacagggccatccatggtcacaacatggaatagctgcgggcaagatgccttctttttttttttttttctgagacaggttctcactctgtcacccaggcttaagtgcaatggcacgatcttggctcactgcaactgccgccttccaggttcaagcacttctcctgccttagcctcccaagtagctgggactacaggcacgcgtcaccatacctggctaatttttttgtatttttagtagagacggggttttgccatgttggctaggctggtcttgaactcttgacctcaggtgatccacccacctcggcctcccaaagtcctgggattacaggtgtgagccactgggcccggccaccatggctcacacctgtaatcccagcactttgggaagccaaggcaggcagattgcttgagctctgcaacctgtgagtttgagaccaacctcggcaacatggtgagacccagtctctacaaaaataaaataaaattacctgggcatgatgcatggctgtagtcacagctacttgggaggctgaggcgggaggactgcttgagcctgggatgtcaagtctgcagcgagctgtgatcatgccattgcactccagcctgagtgatacagtgagactctgtctctaataataataataataataataataataataagctggcctgatgcagtggctcacacctgtaatcccagcactttagaaggtcaaggcgggcagattacctgaggtcagaagttcgagaccagcctggccaacatggtgaaaccccatctctactaaaaatacaaaaagtagccaggcatggtggcgcacacctgtaatcccagctacttgggaggctgaggtgggagaaccacttgaacctgggaggcggaggttgcagtgagctgagatcgcgccattgcactctagcctgggtgacaagagcaaagctccatctcaaatacatatatacatacatacatacataaaaagccacaataagatagtatcagattgtcaaaaatatcagagcctaataataccaagtataggcaaagatatggagacaagaaaacccatatctgtgctagttgtgtgtgaataaggacaaacactgcagagagcaattggacattttttctattgaagatgtacatgtgctatgacctaggagttttattgccaggcaaatatcctaaggaaactttcgtatatgaacaccatgttctatgcgtaagaatgtttacagcaggctgggtgaggtggctcacacctgtaatcccagcactttgggaggctgaggcgggcagatcacctgaggtagggagttcgtgaccagcctgaccaacgtggagaaaccccatctctactaaaaatacaaaattagcagggcgcatgtggaagatgagcatgcgggtggtggcacatgcctataatcccagctactagggaggctgaggtaagagaatcacttgaacccaggaggcagaggttgcagtgagccaagatcacgccattgcactccagcttgggcaacaaaagcgaaactccatctcaaaaaaaaaaaaagaagaaagaaaagaaaagatagtctacagtagccttatgtgcaatagagaaaatttggaaataagctatgtgtccttcagtaacagaggagataaatagatcgtattttattcacataacagattaatgtaaagcagtaaaaataaactgcaactacacatatctacatgaataaacctcaaaaacataaattggagaggaatacttcaaaacaactttaaagttgcaaaaatatagaacaatactatgtattgttcaggggcatagacatttgataaagtgtgctattaagaattaggattatcatatacaataataggaacaattcatcagcaatatataagaactttcatgtaccccaaaatacgtcaagaattgtcagaattacaaggagaaatggacaaattccctgtgctagtttggatttcaagaaataaacaccaagatggcattagatacacaagagatctggcgaaggatgaaggggagagagtgcagaagcaggctaggggctgggcatggtggttcatgcctgtaatcccagcactttgggaggccaaggcaggaggattgcttgaggtcagggggttgagaccagcctgggcaacatagggagacccccatctctacgaaaaataaaataattaggcactaaggcacatgcctgtggtcccagccacttcggaggctgaggcaggaggattgcattgggccctggaagttgaggctgcagtgagcagtgatcatgccattgccctccaggctgggagacagagtgagactgaagcaaagaagtagcaggagagccttcaggccacagaggcaggtctgacgtataaaggagggagggaagaaggaagcctcaggctgcagcaggactctgagcaagcttggccaggcagatgatgagtctccaagcaatgactgttagaggagtcttgcaccaggcagatgtggtggggctccagcacccccttggtgattagtcattgcctgggagcaactggggtcaggtccctttgaaggggaatctgagcggtgtaagtccatggccaccacatgtaatattacagtagaaagtcataatctgcatcctatccatctctcaggaattgacagaccaagcaggcaaaaatggagatattctcctaaagatgaatgggcaataagagactcctatacccaagaattagagactatatctttccaagcacacatagtacttttacaaaaattgtacatgttgtctttgaagaaataattttaagactgaaatgaaaaaaaaagtttttttagactgcatgtgtagcaggtcgcagtgtcatgctcaacacgtacaataaattggtatttggctacaatgcaatcaggttagaaagacattataaaatgattttctaaacccgtatgttttaaaatttaaattcatggattgcctaacataaaagttaaagaagatatcataagggaaatcagaaaatatttagaactgaaagataattaagtcactgtgtgataaatctcgaagaatatcactaaaggagtatgcagagggaaatttacagccttaactgcgcacattagaaaagaagaagattcagccaggcctggtggcttatgcctgtgatcccaacactttaggaggccaagataggtagactgcttgagcttgggagttcaaggccagactgagcaacatggtgaaaccccatctttacaaaaattagccgggcgtggtggtggacacctgtagtcccagcgacttgggaggctgagacaggaagatcatttgagcccaggaggttgaggctgcagtgcgctgtgtttgtgccactgcactctagcctgggcggcatgacagagtgagaccctgtctcaaaaaaaaaaaaaaaaaaaaaggctgggcgcagtggctcacacctgtaatcccagcaattggggaggccaaagtgggtggatcacttgaggtcaggagttcaagaccagcctggccaacctggtgaaaccccgtctctactaaaaatacaaaaattagccaggtgtggtggcacttgcctgtaatcccagctactcgggaggctgaggcaggagaatggcttgaacctgggaggcggaggttgcagtgagctgagatcacgccactgcactccagcctgggtgacagaatgaaactgtatctcaaaaaaaaaaaaaaaagaataagaagattcccaattcatgagctaagtgtccaactctaaaagtaagaaaaagagtagaataaaacaacaaaaacaaaagtagaaggaatgaaacaagaaaatcataaagataaaaacagaaattaatcaaagaaaaaaatgaatagaggatacacaaaactgcagctggatctttaagactcatgaaaaaggcagacctctggcaacagcagcagagcaaatgcaagagaaagcacaggcttgttaggaattaacccaaggaactgaacacagctaaagtagagagccagaaataacgatagctcacatttatgagtcagtttcatgcctcattctataatgcaatatgtatttacagtttaggttaaaatacaaatcctttctacagaatcctctgcttatgtatattaatagtcatgggctagcatttacccagaacttactaggagccattccctgctctcgttaggaactctcttgcctctatacctttgattaggctgttttctcagctccaaatgcccttcctctcctttgcaacctgtgaggtttggctaaaatgtaacctcctttggctgttactgccaagagcacagccagtatccattctgccccacttccttaagaatagaaccacgattttgttctaatatggtccttttaaaatgactacaactatcgtattatattcccagctccctctgtatctcagggtggccaagtgacacagttttggacaatgagatacaggctgaagtttgctaggtttattaattatcgatgcatatcaaagtatcccaaaacttagtggtttaaagcaatggatgcttttattatctcacgatttttgtgggtcaagaatttgggagtggcttatctgggtggttctggttcaagatcttaatgaggttgcagtcaaggtgtccactggggctgcagtcatccgaaggcttgactagatctggaggatcttcttccaaggaggtttactcatgtggctgttggcaagaagtctcctgttgtctggatgcaagtcatggtacatgtaagacgctttaagagtttttattgttggcatcaaggaaaaaagtatgacctcttcctttgcctatctccaatcccttttatccccattttatttttgatctatccacccatgtactcatccactacccatctacccacccatccatccacccacccatccatccatccactcacccatccagccaacaactcactcatccacccatccactcatccaccaacctttcacccacctacccacctatccacttacccacccacccatcctttcacccatccacccatccatccacccacacacatatccatccatccatccatccatccatccaccatccacccacccatccacacactcatccacctatccatctatccaatagtttctgggagcgtataaagtgccaggcacaatatttaggcacttgacataaaaagtgagtaagatttgtgcccttcctttaagtaattcctctctatttaggatgacagatatggaacaattctagtacatttgtgataagtgctatgctacaagtaaaagagggatactatcttttttttttttttcgagacagggtttcactctgtaacccaggcgggagtgcagtggtgcaatcttggctcactgcaacctccatctcctgggttcaagcgattctcgtgcctcagcctcccgagtagctgggattacaggtgtgtgccaccatgccaggctcttttttttttttttctttttggtatttttagtagagacagggtttcactatgttggccagactggcctcgaactcctgacctcaaatgacctgcccacctcagcctcccaaagtgctgggattacaggcatgagccaccgcacctggccagatactatcttagatgtattaatattttttccttctcttattcagtcagaagcttctgttggcctcaaggataattatgattttcatagtaggtaggtgatgagaaagaaagacgctttcacttttaagtattaagactgactccaagtgcatgtgattcggtagtcttgaaactgagctttcagagaaaaaagagattttctaaattccaaaggctctgctttaagacgtaaataacagaatcctggacttggattataagcagtgcacagggtctgaaggtgtgacttagggaagttcccatcagtaggaagacacaggagatcagatgtcagcgtcctgattccctcctcggggttaacacagtggtagcaaggcctgcggtgagcatggcagcagaacgacaggggctgctcaggcatgctttggaaatggccaggaaagggtctaggacagtggcctggaaggcagcctcacagatctagtgtgaggctacacccagcctacactctctagtgtggagtgggaaaagcagcccaggccctgatgaatcaaaagactgagattggggtacagaggccaggctgggagccctgggctggaggttgagaataatgcatgatggtatcgcctcgtggacaccaggacggaaggtccaggaaccgccctggccatggctgagaggcaggagccaggagggtgccctagttaccccgcaccctagcagcatctcagaaaggagcagggagagacacttgatcggaacttgaacctgaacttgaactttaatcttgacgcgttaatgaggaagggagttttggaagactgaagaggctgagttagctctgatgagcatgttcctggtgttatttcctttctctcttttgccgtgagcaagagtggggacttgcgagctcaagggaatcagttatagaccatttttagttctatttctgtgcacatctgcctgcatacagcataaagatttttaccctggttgaggcgtgcacgggatgctgggattacaggcgtgagccaccgtacccacctgaccctaaattatttttggttcctccaatccaactttcttccatagaatactaagaatgggaattgctctgttcctaaggcactataagctgaaactaaatgaattttaagggatgagtcttgtgtgtgatctatggaccatatagaaagttcactggactgcctcatgccatgagcagagacagtctaactgtaaaccaggacaagcagttgatggcttcatgctgtgggtggcttttcccaagacaacagaacaagagtccccatcatgagcctcttgtccctcttaattcttccctgcttatgccaattttttccacttggcaggataatgatgcaactgaaacttcccaatcagtagcttctgctggtaacttgacagaacctgacctaagagatcctttaggccacctagtgggtaactttggcaacatccctaatagaactgttgttcactcggctttaatgcatcccagttgtgggatactagatgatgaatttgctctatattatttattggttggataaggaaatgtctgtgctattgctaatactacatgccacacctggataaatttctttggggaagttgagacccaaatacacaaaataagaaaacaagtcacttggttacaacaggtctcatctaattctccatggtcattcgatttattcaatgtattccctttaagtctaggttcatagctcaaaaccattatgcaaactagggttaccatttttatttatttatttattatttatttatttatttatttatttatttatttatttatttttgagacagagttgcgtgctgtcacccagactggagtgtagtgacacgatctcagctcactgcaacctccgcctcctgggtgtgaatcctcctgcctcagcctcccgagaagctgggactacaggcatgcaccaccacgtccagctaattttttttttttttttgagccggagtcttgctctatcacccaggctggagtgcagtggctatatctcggctcactgcaagctctgcctcctgggttcacgccattctcctgcctcagcctcccgagtagctgggactacaggtgcctgccaccatgcccagctaattttttgtattttttttttttttagtggagatggggtttcaccgtgttagccaggatggtcttgatctcctaacctcgtgatctgccctcctcagcctcccaaagtgctgggattacaggcgtgagccaccgcgcccagccacgtccagctaattttttgtagagacaggatttcaccatgttgcccaggctggtctcaaactcctgggctcaagagatccacccacttcagactcccaaagtgctgggattacaggtgtgagccactgcacctggctatcccttctcttagaaggatgaatcagtctattcagtaaatttaaaaggtgactggggctgggcgtggtggttcacatctgtaattccagcactgtgggaggccgaggcaggtggatcacctgaggtcaggagttcgagaccagtatgaccaacacggtgaaaccccatctctactaataatacaaaaattagccaggtgtggtggtgcacaactgtaatcccagctactctggaggctgacgcaggagaatcacttgaacccaggaagtggaggttgcagtgagccgagatcgcaccagtcactccaatagagtgagactctgtctcaaaaaaaaaaagaaaaagtgaccttatgaatgggtaacaattgcctgtgtcttacagccagatctcaaacaacttcgtgaacaaatctacaagaatcacacattgttaaaacacagccatctcacacacagaatcaagcttgtgtttgacaatggcatggaaatcacactaattatgatgacctaggctgggagagaaaaccagtgcacctgcactatctgatcccagcctccctctgagcctcacctggggtcactcttccccttagtgtgctgtagccactctagatcccacctgctcctaaacacacccatctcttctctgccccggggcctttgcacgtggcactccctctgcctgagaagctgccacttgatgttgtcagctccttcttatgcttcagatcttcctttcaatgccagctactcacagaagccctccctgaccaccctgttcaaagtagcatcctcactgtggtagcaggatgatgcctcccccaagatgtccatgtcctaatccctggtacctgtgaatatgttatgttacgtggcaagagggaatgaaggttgaagatgaaatgaagtttgctaattagctgactttgttttattatattttagtttttttgtgaaggagtctcactctgtcgcccagactggagtgcagtagtgcaatctcagctcactgcaacctctgcctcccaggttcaagcaattctcctgcctcagcctcctgagtagctagggttacaggtgcccgccaccaggcctggctaatttttgtattttttggtagagatggggtttcgccatgttggccaggctggtctcaaactcctgacctcaggtgatcccctgctacctcggcctcccaaagtactgggattacaagcgtgagccactgtgccctgccgagagccccctttaaatcatcaggcccagagaggcattgaaatgtgatggcagttacaagccccctcccccacccgcccctaaagccacctgctattgggaccctagactgactatcaacaccaacagccataaattaacctaaccatgccattcgctggataccataactcatactctaatcaatgtgatttcaataaaccaatgagaattcctgtaacataacttctgtaatcgcttctctcctgtttcatacttttttttttttccttgagacaggttcctgctctatggcccaggctaaagtgcagtgatgtgattgtggctcactgcagcccccatctcccaggctcaagcgatcttcctgcctcagcctcccaagtagctgggactacaggcacacaccaccatgcccggctgattttttttaaatagagatagggatctcactatgttgcccaggctggtctccagctcctgagttctagcaatcctcccacctcagcctcccaaaacttctgggattataggtgtgagccactgtgctcagcctgattcatcctttttcctttccttcttttttttttttcaagacagagtttcactcttgtcccccaggctggagtgcaatggcgtaatcttggctaactacaacctccgcttcccaggttgaagcaattctcctgcctcagcctcctgagtagatgggattacaggcacgtgccaccatgcccagctaatttttgtatttttagtagagacagggtttcaccatgtttggccaggctggtcttgaactcctgatctcaagtgatccacccacctcggcctcccaaaatgctaggattacaggcgtgaggcaccacgtccagcccgatccttttttctttaaaaactccagtctctcctttgttctccagggcacttcccagtgtgtctgaggccgtagtcctcagctttggcccaaaataaactctctacctatgttaatttgacctcagtttctttaggttgatgcatccaaaccagggccattcaggagtgaaagtggcactattaagaactatgctgggccaagcgtggtggctctcacctgtaatcccagaactttgggaggccgaggagggcagatcacttgaggtcaggagttcgagaccagcctggccaacatggtgaaacctcgtctctactaaaaatacaaaaattagctgggtgtggtggcgggcgcctataatctcagctacttggaggctgaggcaggagaactgcttgaatcctggaggcagaggttacagtgagctaagatcacaccacagcactccagcctgggtgacagagtgagactctgtctcaacaaaaaacaaaaacaaaacaaaaaacaaaaaactgtgcattaccaacagacaccagcctggacacaggtcacctctaaacagcaggatccccaagcagcaaggacaagtggctggatcacagtaaatggggggataaggataaggcccgagagaaggaagggggcaggttttgtttgaccttacaggccatggcaagaacattggcttttactctaggggagctccatgagggagttttaaacagaataatataattgggcttacttaaaaaaaatcagggccgggtgcggtggctcatgcctgtattcccagcactttgggaggctgaggagggtggatcatgaggtcaagaaatcgagaccatcctggccaacatgctgaaaccctgtctctactaaaaatacaaaaattagccaggcatggtggtgcgcacctgtagtcccagctactcgggagactgaggcaggagaatcgcttgaaccaaggaggcggagaatgcagtgagctgagatcgtgccactgcactccagcctgggtgacagagcaagactccgtctcaaaaaaaaatcagaatattattttatctcattttttaattggcatagaataattgtacatatttatggagcacacagtgatgtgttgatacatacagtatgtagtgatcagatcaagatattttgcatatccatcttcttgatcatgtctatcatgtcactgtgctgggagcattcagtaccctcctcccagcggtctgagggtttttaaaggattgccctagctggtgtgggaggaaccaaacctaagggcaagaaggcagaggcagagaagcctctgagggctcctaggacccccaaggaccttgcttggtagactcaagaaatcgaggttgacagccaggcacagtggctcaggcctgtaatcccagtacttttggaggtcaaagtgggtggatcacctgagatcaggagttcgagaccagcctggccaacatggtgaaaccccatctctactaaaaatacaaaaaattaaccaggtgtggaggcacacacctgtagtcccagctactcaggaggctgaggcaggagaatcatgtgaaccagggtggcagaggttgcagtgagccgagatcacatcattgcactccagcctgggtgacagagtgagactccatcccaaaaagtaaaaaataaaagttaaaaaaggaaatcgaggttgccatcaaacaggaagtggggtgagtgaaaggggagtagtgatattgatatggtttgggtgcgtcctcacccaaatctcatcttgaattgtagctcccatcattcccacgtgttgtgggagataattggatcatgggggcagttctcatggtagtgaataatctcacgacatctgatggttttataacaggaaaccccttttgcttggctcatttctctcttgccgccacctttcgccttctgccacgattgtgaggcctccccagccacgtggaaccgtgagtctattaaacttcttttccagtcttggctttgtctttatcagcagcgtgaaaacaggctaatacagacacagtgacatatgtatttagtcttctacctgatttcctgatacatgacttctaaaatccttggaccctccaaaaggacagtgtctttttgtatgctaatgtttggctggtgactggcagcccccagtggtttctggaggaggcctggttaccgggaagaccgagacaagattagagaattaggactttgagccccatccttcaatctccccgaaaggagaggggctgaagtttgagttgattatcaattgccactgatttaatcaatcacgcctgcataatgaggcttccataaaaccccaacaggactggattcggagagcttacaggcagccagacacacgggggcttccgggaaagtgaacaggaacacatccacatgctgggggtggcccacccaactccacggggacaggagttcttgcgctcggggcccttccagaccctcgcctgtatggctcttcatctggctgcttttttaatttttaaatatatttttttgaggcccagactggagtgcggtagcatgttcacggttcattgcagcctcaacttcctgggctcaaatgatctttccacctcaggctcccgggtagttgggaccacaggtgtgtgccatcacgcctagattattgattgattgattgagacagggtcttgctatgttgccgaggctggctcctttatactaaaggagatttggggctcagaaaatgatgccccaaaatgaaggcctcagcagcagcctcagaagcaaaagtttctctctgaccttctcctgccctcctgtctgtggtccctcattccgccctgaggctggccatagagactagaatctctcttcctcagggtgggtcacagaaaccagaacccctttcccccaaaccagccatacaacctaaagtatgactctaacttcccctctgccctatctgtgtaaaaactggccataaagaaattctctggcctactttgtttgactgtagaccaaaagacccccattccaggccaggcgccgtggctcacgcctgtaatcccagcactttgggaggcttaggtgggtagatcacctgaggtcaggagttcaagaccagccaggccaacatggtgaaaccccatctctactaaaaacacaaaaattagccaggcatggtggcatgcacctgtaatcccagctattcaggaggctgaggcaggagaatcacttgaacccaggaggcggaggttgcaatgagctgagatcacaccactgtactccagcctggacgacagagcaagactctgtctcaaaaataataataataataataagaccaccattccaaagagggtcctccccacacccagaaggaactctgctcagagagaccaagaggaatctagccagacaggccctgctgggttccccactccatctgctagcattagatcagatcgtttttgtccaatcctatgtctccacagctgcccatactgtgttgaacctcagtatgaaaatggacaatttcccctgtatctttgggtcttcattcccaagtctcctgtgacaggtaaaactataatcaaataaatgcgcatccctttctcctattcatctgccttttgagagttgattttccatgaaccttcagagggcgaaggggaagttttcccttcacccctacatggtaaacctgagtaagtgttcccccgagttctgagcctctctagcaagtgaagtgaacccaaagagagggctgtggaaaccccaatttatggctggttggtcagaagcaaacacaaaataggctagtcaacggtggctcactcctgtaatcccagcactttgggaggctgaggtgggtggatcccttgaggtcaggagttcaagaccagcctggccaacctggtgaaacaccatctctactaaaaatacaaaaattggtgtggcatggtggcgcaggcccatagtcccagctactggggaggctgaggcagaagattcgcttgaacccaggaggtggaggctgcagtgagccaagatctcaccactgcactccagcctgggcaacacagtgagaccctgtctcaaaaacaaaaataaagaaagaaagaaagaaagaagaagaagcaaactcaaaataacctgggcttgggatcagctttgggagtggggctcaggtcttgtgggacgaagtcctcaacctgcgggacctgaggacatctccaggtagacagtgttgggactgagtggaagcagaggacacccgactggtgtctactacagaattgactctgcaggaagtccgtgcaggagtctcccccgcctgcagaggctgcacttggatggtgcccgtgcccctggtggaagagggaggaggcatgtggaggaaaggagacccttgggtgaccatggccaagggtgtgaggggcaggtgtgtcccccagctcactctggagactttttcctgggctttctaccacagctaaagtaaaatgaccatgaactgggtggcttaaaacaacagactttattctctcacagttccagaggccagaagtgtaaaatgaaggtgtcacatcaaggaagggatccttcctcacctcttctagcttctggtggttcctggctgttatgaaccgagtgtatgtgtccccccaaaattcatctgttgaaccctaatccccagttcggtatggtattaggaggtgacatctctgggaggtaatcagggttagatgatgtcatgggggtagagccccctgatgccatgatgggatgagtgcccttataagaagagatgggggacgccgggtgcagtggctcacacctgtaaccccaacactgtgggaggccgaggcgggtggataacttgaggtcaggagttcgaggccagcctggccaacatggtgaaaccccatctctactaaaaatacaaaaatgagccaggtgtggtggggggtgcctgtaatcccagctactcaggaggctgaggggggaaaatcacttgaacccgggaggcagaggctgcagtgagctgagatcaaatcactgcactccagccagagtgagactctatgtccgaaaaaaagaaaaaagagacaggggatcgcgcgctctctcgcgctctcctctctcattcttctcccccctctgccatgtgaggtctgaagtaggaaggcagccatgcttaaaaccaggaagaggccctccccagattgaaccgaatcttccagtaccttgatctctaactttccagtttccagaactgtgagaaacaaatgtctgttgtttgagcctcccagtctaccacatctttagcagccacagcagacgaagacacctgcagtcattgccattgccgggcttgtgggagcatcgctctgacctctgcttccgtcttcatgtggccattgctcctctggggcagtgtctctgtgtcaaaatgttcctcttctaaggatgccagtcattggatgagggtgtgacctcatctgaacttgattacaactgcaaagaccgttatttccagataaggtcacattcacgggtaccaggtagccatgaatttcttgggggcgctttccaactcagagcacctgccattccctaggcgtcctccctggcccagcctcccccacccaccctcacccgctgtctttgagctccacgaaccaggagccaccttctcagatcccctttgcttgatcatggttctgcatgcgagctgccctcctccccatcacctgccagctctcccccaacctgcgatggcaactggacccatttttacccatacacaatttcaaagcatactgaatgcagttaaaattctccagatacttcctttcaggtccacatccctctgtaagtgttcatctttgaaaccctgggtagaatctgagtttgatcttttttttttttttgacacagagtctcactctgtcacccaggctcgagtgcagtggtgtgatcatggctcactacagccttgacctccttggctcaagtgatcctcctgtctcagcctcctaaatagctggggctacaggcatgcaccaccatgctcagctaatttttttttttgtagagacggtgtttcaccatgttggccaggctggtctcaaactcctgggctcaagagatccaccctcctcagaatcccaaagtgctgggattgcaggcatgagccaccatgcctggccttgatctttataccaactaattggcatacacacaagctcatgctatgaaatggggtatttcacactgtgtgccgctttgccttgggctctctaaaatctcatcaccccccagcggactctcactgctgtggcctgtggccctactcaaggagctcaaggaggccactagccatttggagaaggaggtagttggggccctgaaagtttacaggacttcctcaaggccacagcaggtgtgtgagaaaaggaagatggccagcctgcctccacttctctttccaatctcccactttgcctgagctaagctcaagctcagggccacccacgtcttggaagggcttcctaccagctggtcttgtgagatgagagctgccctgcatatcatgcttgtcatcgccaaggaccccaagctccagttagctcaagtcctagagaatgtgccagctacatagagctatgcagagcgtggccctggggatgcgggatgttattgcccttgggatgggaaggagagatgagagggagaattggctggatcttaaaattgtgttgcaccctttcaaacactctaccatccttgcctctgtagttcaatattagtctgttcctatcttctaaacttgcaaatgaacttgcatggcaataaatctctgcacactcaaagccatgatttcctcagcaggtggatgcagaatgcttggagacctataataatcagcctttggcaacaagcactttttcttctgactcattattgccgcgttttaagaggagaagggagcaactgctctcacggggctacagagacacggaaacacgctggggaggctgctctgtcaccaggaaagacaatggaatccatttaaaatgtcttattttcccttgctctgccaagcaaaagcatcagaaccctttggggaattcactttacaaggaaacaaaatgaggccccgcatctgcagcctggccctccccgccacctgcaccccttcctctgaggtccccggctctgcaggggccgagcgggcggcacccgctcctggtggtggcattgttgggacccgctcacaaaacacagttgttctctgcaatggctcatttccctttctgagactttttgtttatttgtttgttttgagacagagtcttgctctattgcccaggctggagtgcaatggcacaatctgggctcattgcaacctccgcctcctgggttcaagcaattctcatgcctcagccccccgagtagctgggattacaggtgaccaccacattgggtaagttatgtatttttagtagagatggggtttcgccatgttgcccaggctggtctcgaacacctgacctcgggtgatccacctgccttagcctcccaaagtgctgggattacaggcgtgcaccaccacgcctggcctccctttctgttttaaaggtgctctgtttattcccattgaacctggacttcacagagaggatggacacaattacaaagctctgagagctctgtccctcacttttcttttgtcctcactgggtaggtccttaaggctctgtcgtacctttagggcacagcattggcaaccctcaccagtgcttgaggggtggatacctacgctgtctccagcatgaagttcccaagggaacagaggtcaccaaagagtccaatcagcaaggacttcagaggtggagcgcttgaattacttgctctgaacttcttcagaggtggagagcttgaattacttgctctgcacttcttgctaagccagcagggtcattcggatcactgatctgcaacccagctggatcaggagtcaatgcccggcctagtgcaccgggcaagtgacaacagtgacagaaaattgggccaatttggaccatttggcagaaagctagactcagtcagtgacaagcgtgaattaaacaaactaataaaacataactttaatgtatttttacaatgttcttttaaactattgcatactgtaaagaaaagtttttattaagataaatttggggccaggtgcggtgactcacacctgtaatcccagcattttgggaggtcaaggcaggaggattacttgaggtcaggagttcaagaccagcctggccaacatggtgaaactctgtctctactaaaaatacaaaaattagccaggcatgctggcacatgcctgtaatcccagctacttgggaggctgaggcaggagaattccttgaacctgagaggcggaggttgcagtgagccaagatcgtgccattgcactcccgccgtggcgaagaagcaaaactctgcctcaaaaaaaaaaaaaaaaaagataaatttggggcaggtccttgtctatcagaattgaatgaaatgttattttgacttttactatgaatataattggagactggccgggcacggtggctcacgcctgtaatcccaacactttgggaagccaaggcaggcagatcacttgaggtcaggagatcgagaccatcctggctaacatggtgaaaccccgtctctactaaaaatgcaaaaaattagccgggtgtggtggcactcacctgtagtccagctgctcgagaggctgaggcaggagaatgccgtgaacctgggaggcggagcttgcagtgagccgagatcaagccactgcactccagcctgggtgacagagcaagactctgtctcaaaaaaattattattattgttattattatatatatatatattatatatataattggaaaccaaagtaaataatttctacttcgtcaccacccaggaggaatgaagatgaagtatttattatcagacactcaagtgaagaaaaactttttggccaggcacaatggctcatgcttgtaatcccagcactttgggagactgaggtgggtggatcacttgagtccaggagttagagaccagcctgggcaacgcatcaaaaacccatctctacaaaaaatacaaaaaattagccaggcatggttgtgtgtgcctgtagtcccagttacttgggagactgagatgggaggatcacctgagcccaggaggttgaggctgcagcgaactgtgtaaggtgagaccctgttttttttgtttttgtttttgtttttttttaaaagccaggtgcagtggctcacacctgtaatcctagcactttgggaagctaaggtgggtggattgattgagtccaggagttcgagaccagcctaggcgacatagtgagactatgtctctatgtaaaaacattttattgatttaaaattttttgaaaaattagcctagtgtggtggcagtgcctgtagaatcaaatcagctactcaggaggctgaggcaggaggatcacttgagcccaagaggtagaggcagcagtgagctgtgatcacaccactgcacttcagcctaggcaaaaaaccaagacactgcctcaaaaaaaaaaaaaaaaaaaaaaaaaaaagtggccaggcgcagtggctcacacctataatcccagcattttgggagcctgaggtgggtggatcacctgaggtcaggagttcgagaccagcctgaccaacagagtgaaaccccatctctactaaaaatacaaaattagctgggtgtggtggcacatgcctgtaatcccagctacttgggaggctgaagcaggatgggaggctgaggcaggagaattgctcaaacctgggaggcggaagttgcagtgagccgagatcgtgccattgtactccagcctgggcaacaagagtgaaactccgtctcaaaaaaaaaaaaaaaaaagaaagaaagaaagaaagaaagagaggtggggcacggtggctcacgcctgtaatcccagcactttgggaggccgaagtgggcggatcacctgaggtcaggagttcaagaccagcctggccaacatagcaaaatcctgtctctactgaaaatacaaaaattagtcgggcgtggtggtgggcacctgtaatcccaattacgcgggaggctgaggcaggagaatcgcttgaacccaggaggcagaggttgcagtgagctgagatcatgccattgcactctagcttgggcgatagagccagactccatctcaaaaaagaaaaaagaaagaaagaaaaagaaaagctcttctttcattaactaaacttataaaatagtaagatctatgaaaagagaaccaatggtaaagaaaactatttagaagccaagtgtcttcccaaaactagaatataaggttcctaactccagaaaaatcactgtaaccatgtcttcctcatctcctttgcagctaggactttctgggaatgtttaaatctggacctaacttgtgcgattcagagttctgcaggtttgtcagggcagagtcaggcctgaattaagaccaggaccctcaccaaggctaactgagcttcctactattagttgtgaaatatttgctaagcacctttgagagaaaaccattaagcccactgatgtcatgcatagtagacaacctatacaaggcatatgtggtttttaatttttttttaaatgttcacattcaaaagaaacattttccagaatccttgtgcctaataactgtaattacagaaaatgtggggcaactttcaataatttcaaattattaccttcggccaggcgaggtggctcacgcctataatcccagcactttgggaagccgaggtgggtggatcacgaagtcaggagctcgagacccgcctgaccaacatggtgaaaccccgtctctactaaaaatacacaaattagccaggcatggtggcacgcacctgtaatcccagctacttgggaagctgaggcaggagaatcgcttgaacctgggaggcggaggttgcagtgagccgagatcgtgacattgcactccagcctgggtgacaaagtgagactctgtctgaaaaaaaaaacaaaaattattacctttgagggccaggtgcagtggctcacacctgtaatcctagcactttgagagcccaaggcaggcagatcacttgaggtcaggagtctgaaaccaccctggtcaacatgttgaaaccccatctctactaaaaatacagaagttacccgggcgtggtggcgggcacctgtaatcccagctacttggggggctgaggcaggagaatagcttgaacctgggaggcggaggttgtagcgagctgagatcacgccactgccctccagtctgggtgactcagcgagactctgtcccaaagtaaataaataaataaataaaattattacctgtgaggccaggcacagtggctcatgtctgtaatcccagcactttgggaggccaaggcaggaggatcacttgaggtcaggagtttgagaccagcctggccaacatggtgaaaccccatctctactaaaaatacgaaaaaattaggccacactcacgcctataatcccagaactttgggaggctaaggcgggtggatcacctgaggtcaggagtttgaaaccagcctggccaacatggtgaaaccccgtctctactaaaaatacaaaaattagccgggtgtggtggtgtgtgcctgtagtcccacctacttgggaggctaaggcaggagaatcactggaacctgggaggcggaggttgcagtaagccaggatcatgccactgcactccagcctgtgtgacagagcgagactctctctcaaaaaaaaaaaaaaaaaatcctcttcctccaaggtttaaaaatcatataaatgtaccttcctctcaattatgctgtgaacctaaaactgtttcctcaaaatagtgtctttaaaaaaatcaagaatactataggcatgttctagaagaaaaatgtacaggttgcgggcaggagacaccaagcaaatcatttcatatctggaggccttcatttattgctccacaaggttaagagttcaactcacaccggggtctatgagctaacctctcaccagggcattctgttcaaaccttgggcctcactttgtaaaagtccaggaaattactctccctttctgtttgcactcagcctcatgccacgggcctcctgggcaggtgcactgctgctccaccggcactcaacacatttttgctaaaggaatggaaacacatacaagctgggcacagtggcatgtgtctgtaatcccagctacttgggaggctggggttgggggatcgctcaacgccaggagtccgaggctgcagtgggctgggatcacacctatgaatagcccctgccctccaacctgggcaatgcagcaagaccctgtctctaaaaattaaaaaaaaagaaaaaaataataaacatatgaataactatggccgggcacggtggctcacgcctgtaatcccagcattttgggaggccgaggtgggcggatcacctgaggtccaggagtttgagaccaacctgaccaacatggtgaaaccccatctctactaaaaacgcaaaaattagccgggcatggtggcaggcacctgtaatcccagctactcaggaggctgaggcaggagaatctcttgaacccgggaggcagaggttgtgatgagccgagatcgcgccattgcactccagcctgggcaacaagagcaaaactccgactcaaaaaaaaaaaaaaaagactgataggccagcgtggtggtgtgaagaaagatggaaaggtgaaagctactgagaatgggaactgagaactcctaaccgtgccacaaggtgtgattagtgccatcgacaggcatcatcctgaataggtatctacctgttctttctttcttttttagagatagggtcttgttctgtcacccagactggagtacagtggtgcaatcatggctcactgtagcctcaaaatcctgggcttaagcgatcttccccctcagtctcccgaagtgctggatgatggctgtgaaccactgtgcctggctggcaccactattaaagagaacgttagtcagatgttgacagtggttcatctttccctttttttttttttttttttgagacagagtctcgctctgtcacccaggcgggagtacagtggcgtgatgtcggctcactgcaacctccacctcccaggttcaagcgattctcctgcctcagcctcgctagtaggtggagttacaggcgcccaccaccaagcccagctaatttttgtatttttagtagacacagagtttcaccatgttggccaggctgtttgcaaactcctgacctcaaaagatacacctgcctcagcctgccaaagtgctgagattacaggcgtgagccgccgcactcagctttccttttatttacctattaatatagtttgtaatatcctatttggagctgaggcagagttttctaggagcaaaggagagaggaaaaagcccatcctgctatctatggatgtgcctctactaacacctaggcttgttgtgaaaccagcaccccgggtccaaccttggctggccacagggattataaagtccacacttgtactggatgcctaagggaggcacatgaggagccgtccttaataggaaaaggagatatgccaaccactgagcaagtcttaaataaaagttcactccccattgtttctggtctgtgtctgagtttgtaggtgtcttttaggagaagaacatactagcagcccccactgtgccctttcaaaagctgtaaagcgggaaaggaattaattatgttgaaagcagagtcacaaaccctccacggggacagcagtaggggagcaggatgatctatttaggttcaaatagatgtcttcagccttccttctaaaactttatatgggccaggggtggtagctcacgcctgtaatcccagcactttgggaggccaaggcgggcagatcacgaggtcaggagatcaagaccatcctagctaacatggtgaaaccccgtctctactaaaaatacaaaaaattagccgggtgtggtgatgggcgcctgtagtcccagctactcgggaggctgaggcaggagaatggcgtgaacccgggaggcggagcttgcagtgagctgagatcacgccactgcactccagcctggacgacagagcgagactccgtctcaaaaaaaaaaaaaaactttatatggacaaccaccatttaaaaaaatagcaataacaggctgggcgtggtggttcatgcctgtaatcccaccactttgggaggccaaggcgggaggatcacccacggtcaggagtttgagaccagcctggccaacatggcaaaaccctgtctctactaaaaatacaaaaattagttgggtgtggtggcgcatgcctgtgatcccagttattcaggagactgaggcaggagaatcgcttgaacctgggaggcggaggttgccgtgagctgagatcgcaccactgcactccagcctgggtgacacagagtgagactccatttcaaaaaaagcaaaataaaataaaataataaaataataacaacaggccaggtgtcctgactcatgtcagtaatcctggcactttgggaggccaaggtgggaggatttctttttttttttttttttttttttttttgagacggagtctcgctctgtcacctaggctggagtgcagtggctcaacctcggctcactgcaagctccgcctcccgggttcacgccattctcctgcctcagcctctccgagtagctgggactacaggcgcccgccaccacgcccggctaattttttgtattttttagtagagacggggtttcactgtggtctcgaactcctgacctcgtgatccgcccgcctcggcctcccaaagtgctgggattacaagcgtgagccaccgcgcccggccggtgggaggatttcttgaggccaggagttcaagaccagcctgggcaacatagcaagaccccatctctacaaaaataaataaataagtaaaaataaccaacagcaaggttggtccaggcattctagaaggggcacttaggtaggatgctaccgccttgccattgattgctgacacaaagactcacatctcagcagtgcccattccctggctggtagccactgtcccaaatgggcgccagtcctggtgtcagcaggtctctttctcccacacagctgaaggccccaacccgtcctgcctcttgtcctcctgaagctctggcctcttgtcctcctgaagctctggccatggcaggcctggtgctcacccatgccgccatctcagtggacagagctcctctgttgcttttgcaatcctttccagaagcctccccatgaagtccgaaaacgctcttcagccggaagcagctgaaggaaatcagagatgggggtgacagcgccacacactcgagctaatgggcagtcgcggtcacagtggcattggccacagtaggagtcccaatgtgtgggacgctgggcgaaggcctggggacgcgatgggactcatgcccgcccccaacccacctcccctgagcatctcgcatcaccatttgtccaaggacgcagcggccctaaacattggtgtatctgtgctcagtaccgagggcaccacaactctcccgggctcgcagaacagtggacgccacaggccgtgagccacctaccaagaggtgctggcgtgcacatctgcacaggcctggtccttccaagtagccccaggaggctttgcggtgatgacagcggcaatgccagtgaccaaacttttgggaactgtttttggagcatagggtgcatattctggggagttctttgccttgtctttaaactttatttgagtatcatttaggtggccgggctgatagctcatgcctgtaatcccaggaggccaaggcaggaggatggcttgagcccaggagtttagaccagcctgggtaacataggaaaaccctgtctcaacaaataatttttttttttttttgaaacagagtctctctctttcacccaggtcggactgcagtggcgcgatctcggctcactgcaagctccgcctcccgggttcacgccattctcctgcctcagcctcccgagtagctgggactacaggcgcccgccaccatgcccggctaattttttgtatttttagtagagacggggtttcaccgcgttagccaggatggtctcgatctcctgacctcgtgatccgcccgcctcggcctcccaaagcgctgggattacaggtgtgagccaccgcgcccggcctacaaataatttttaaaaattagctgggcatggtggcacacacccatggtcccagctactcaggaggctgaggcaggagaattgcctgagcctgggaggtcgaggctggagtgagccatgattgccccactgcactccagcctgggcaacagagcaagaccatgtctcaataaataaataaatctgtctgtatttctctctatgtattttattggttctgtttctctggaggaccctaatacagatgccatcataggcgaagtgattgtgctttcagaaccaaaattaaggcatgtagtctgaaaaatgcaagtatactttccagaacaaaccaaaacaatggccatccacccatgcgtctcacactggaatgtgtgtgtaaattacttgagcatctcattaaaaggcagattctggctgagtgggtctgggattctgcattacaaacaagcttccagctgagacagatgctgattttgcctgaccactgtgcggatagttaagtacctggaactgcactgtgcaaaacagtggcagttagccacgtgtggccattaagctgtgaaatgtggtttctccgaacggagatgtgctgtaagtgtaaaataccagatttcaaagacttgacatgaaggggaaaaaaaggatgtaaagcattccaatactttttatattgattgcatgttaaaaaggtaatgttttttgctgggcgcggtggctcacgtctgtaatcccagcactttgggaggccaaagcgggtggatcacaaggtcaagagaatgagaccatcctggccaacatgatgaaacctcatctctattaaaaacacaaaaattagctaggcgtggtggtgtgcacctgtggtcccagttacttgggagggtgaggcaggagaatcacttgaacccaggaggcagaggttgcagtgagccgagatcctgccactgcactccagactggcaacagagcgaaactccgtctcaaaaaaaaaaaaaaaaaagataatgttttggaggcgggcggatcacctgaggtcaggagttcaagattagcctggccaacatggagaaaccctgtctctactaacatacaaaaattagctgggcatgatggcgggtgcatgtaattccagctacttgggaggctgagatgggagaattgcttgaacccaggagacagtggttgcagtgagccgagatcgtgttactgcactccagcttgggcagctgagagagactctgtttcaaaaaaaaaaaatgttttgagtaagttgggtaaaataaaatgcatacattattaaaattactttcacctgtttctttttgtttttaaatgagggtcctagaaaatttttaattgcatatgtggcttacattgtatttctgttgaacagagctgctgcagaatgttataaattgggactctctagaaagaatttgcagctgtaagtttggggatggcatttgccaggacaggtggtattaataggagtatgttaaaagattggtggggccaggagccagactttggaggactgaggactctggtgacctgcctagtgtgtaggcaaggtcacctgcagagtagtgtgtgtgtgtgtgtgtgtgtgcgtgcgcacacacatgcataggaatgcatgtgtgataaaacggggtatgggccagacatggtggctcatgcctgtaatcccagcactttgggagaccaaggcgggcagatcacttgaggccaggagtttgagaccagcctagccaacatggcgaaaacccatctctactaaaaatacaaaaacatttagccaggcatggtggcacatgcctgtaatcccagctacttgggaggatgaggcatgagactcacttgaacctgggaactatcataccaagggcccatgggctttgctgatctgagagtaggaggcagaggttgcagtcagctaagattgcgccactgcactccagcctgggtaacagagcaagactctgtctcaaaaaaaagaggggtatgaagagagaggtaaagaattgtaccagctgagtgcagaggctcacacctgtaatcctagcactttgggaggctgtagcgggtggatcgcgaggtcaggagttcgagaccagactggccaacatggtgaaaccccatctctactaaaaatacaaaaattagccgggcgtggtggcaggtgcctgtaatcccagctactcggaggctgaggtgagacttgctcgaaccctggaggcagaggttgcagtgagccaagatcacacgccattgcactctagcctgggcaacagagcaagactccgtctcaaaaaaaaaaaaaaaaaaaaaaaagaattgtaccagcccctaagaatcaccaaaggtagcagaggagggccaagtcaaagccacagagtgtagaagcctcaagatgaagttcaaagccatacagtcttaaggaatgctaggagtcggtaacacagcaagttaatatctttgggtagacacgtgcagctaccgttgtggaataaatttcctcctgagagtgaaactctacagtgcatgccacctacagtgcattgaagcagacattatgcaaacacttcaagagaaaggacacttggtctcggaccagcgaagcccgtgggccctcggtgtgatagtctcaatgtatctgtagaagagtaggtcagtgggtggtcagcatcagataaaacagtcaacaaagccagctctggctgtgcccatagctcacggcaactcacttcctccagctgctcaggccaacacccgtgggtcatccctgactcctcccactctcacaacacccagcagcaaatcctgctggctccacttcaaaatggattctgggccaggtgctgtggttcacccctgtaatcccagtactttgaggggccaaggagggtggatcacttgaggtcaggagtttaaagccagcctggccaacatgatgaaaccccgtctctactaataatacaaaaacttagccggatgtggtggtgggcgcctgtaatcccagctacttgggaagctgaggcaagagaatggcttgaacctgggaggtgcaggttgtagtgagccgagatcgtgccattgcattccaccctgggcaacaagagcctgggcaacaagagtgaaactctggctcaatatataaaaaaccacatcatttctatttgatgttctctctggatgtgtatatgcaaatttccctttttcctaaggacacctgtcatattggaatatggcccagcctgatgtcttaattttaacttgttcacctctgagaagaacctatccccagataagatgacattctgaggtagtaggagttggaacttcaacatgtgaatttagtggggagaacaagtcacaattcaatccattacagtcctacccaattgtgagctaacaatgtgtgttatttgaagctactgaatttggtgtaatggtgtgtgcctgtagtcccagctactcaggaggctgaggcaagaggatggcttgagcccaggagttcaaggctgcagtgagccatgactgctccacggcaccctagcctgggtgatcttgtctcttaagaaagaaagaaagaaagaaggaaagaaggaaagaaggaaggaaggaaggaaggaaagaaagaaagaaagagaaaaaaaaaacagctgggcacagtggctcatgcctgtaatcccagcactttggaggccgaggcaggcggctcacgaggtcaggagttcaagaccagcctggccaacatgatgaagccccgtctctactaaaaaatacaaaaaaattagccgggcgtggtggtgggcacctgtaatcccagctacccgggaggctgaggcagaagaatcgcgtgaaaaccagaaggcggaggttgcagtgggccgagatcctgccactgcactctagcctgggcaacaagagtgaaactctgtcttaaaaaaaaaaaaaaaaaaaaaaaagggccgggcgcagtggcttgcgcctgcaatcccagcactttaggagaccaaggcgggctgatcacctaaggtcgggagttcgagatcagcctggctaacatggtgaaacctcgtctctactaaatatacaaaattagctggacgtggtggcgcatgcctgtcattccaagctactcgggaggctgaggcaggagaatcgcttgaacccaggaggcagagtttgcagtgagccaggattgcaccactgcctggcaacagtatgaggctccatctcaaaaaaaaagaaaaaaatctgctaaatttgtagtaacttgttgcacagcatagaaaattaatatagtctccctaaatattatagttagtactgcctgcttttaagagtctctttcaatctatagattccccctgcatctctttattctctctcaattttttattgaaaaatttgggatggttaatttgtatcgcttcccatagtctggattttgctggttacattcctgtggtataggttaacaggtttcattttttcctcctgtaaattgatcattgcatctagagtgttaatcagattaagctttttatgtttttgttaagactctttctaagtacacagctacaaggtgtttgtgtgtgtgtgtatatgtatatgtgaatttgtgtattttttttaagataagatgcctcatgaaacatactgatacttctgattcaaattcaggagacaagatgttactcattctcttctatttcacatctgtaactccttttccctacaccaagaattcagttctctggccactggggatgatagaatttgaatatcacataattactaattgctttgtcccatgttcgaaaacattcttagaataaaaatataacattaccagtccatatgatcactaaaaacagttccaaaacattttattttactttagtattattattacttttttttttctttgagacggagtcttgctctgtcacccaggctggagtgcaatggtgtgatctcagctcactgcaacctctacctcctgggttcaagtgattctcctgccccagcctcccaagtaactgggattacaggcgcccaccaccacacctggctaatttttgtattttagtagagatgaagtattgcaggatctggccagcagcctgcaatgcaacggggctctctctttgttcccaagcggattggcaggttgagaaataatagacacacacaagatagtgaaagctgggtccaggggggtcactgccttctggtccctcagtgccaacaatgcacgggatataccagcatttattattaagtttagtgaggtcgggggtaggttagtgagggatttagggtcatttgattatgaggtgagatggtcacatggggatgaagcaattctttaacataacatttgtatgtagaagtacagtacatttgtatgtagaagtatagtatacagagataagaatttacaacatagtgtgtgcgtcagtaatttctaacagagccttaaaacagaaacacagtctttccataacctatgattagcaagattttaatcagtagtaaaaactgcaacaaaagctggttacaaacaatccatggaaacaggaagctagacaaccggttagaccagaaattctcagaagggagtatgccttaaccctaaagaggcctagaagagccacggcaagatgagggcgtttatagccctatcttatccatatggacaggcaccccctatgcgtccatttataggctctccacaagggtcgcattccattcccagagctatgaacatctgctttgctgggatacgaatcttggtgatgtgaaacttccctgactgcaagtccattcataggctctctgcagggggaagcacatcacgtgctattggctcattctggcagtccaacctggcattgtctttacacaatcctgcatgcaattttgtatttacaataatcaggagcatttcatcttttattccatagcaatagtttcagggggtctccctacaatgaagttgcgccacatcggccaggctggtctcgaactcctgacctcaagccacccacctgccttggcctcccaaagtgctgagactacaagcctgagccaccgtccctggccaaaaaacaaaaaacaaaacacacacacacacacacacacacacacacacacacactttaaagatatgcccacaccattttctccccctatttatagctgtactttgtctatgttgttggcgaatgtaaccattacactccatcctctcctttttactcctcatcttctcttggttctccatgtaaatatatctttaatgttcacaccaggctaatgtcaatgtctttttagtctcgttggttgtctgaagcttattttctagtaattcctcaggaaaggctttgggaacaatattctctgggttcctgcacattggtgagaatctgctattttttttttctttttaactcactctgtcacccaggctggagtgcactgccgcgatctgggcccactgcaacctccatcccccaagttcgagcgattctcctgcctcagcctcctgagtagctgaaattgcaagcgtgcaccaccacgcccagctgtttttctattttcagtagagacgcagtttagccattttgaccaggctggtcttgaactcctgacctcaagtgatctgcctgctttggccttccaaagtgttggaattacaggcgtgagccactgcgtccggcctgacaatctgctatttttatacttaaaagttagtttgaccaggccgggttgggtggctcacacctgtaatcccagcattttgggaggccgaggcgggctcaccaccggatgttgagagttcgagaccagcctgaccaacatggagaaaccctgtctctactaaaaatacaaaattagtcgggcgtggtcgcgcgtgactataattacaggactgcccagtggtcgggaccctgctaggttccagccagtgggagcggatggggtagtgggaaggcggggcctggcgggtgagggcggggcctggcaggtggggcggaggccttccgggggtggagccggggccttcctggggtggagccagcggccctgggcacagggcccgccggggctctggcagggcggtgggaaggcggggccttctgaatgggggcggggacggctggagttgcggggactgctggagttgcggggcttgcctggggtggggcggggcggcctaggggtggggcggggcggcctaggggtggggccgcctaggggtggggccggcggccctcgggatgggtcctgccagggcgcagagatggcggtggaaaggcggggcgaaggcggggcgtgaggcgtggaggtgtggcctgactggggcggggcggggcggggcggaacagcctagaagcagggcctggaactgcaggatacactcccctcctgctacctaggcaggcgtgagggtgtgacggccgcgcattcgccagacgagagcgatggctgagaacgccgcaccaggtcgccttagactcaccaggtcgccttagacttagatgggacggggaggcctcgcgcgagcgccccattgcccacccacctggttgggactgtggaggagggcggatggagtggagggttcaccgaccgcgtcgcccttctgggtgtcgcagctccttcctcggcagtcccggggcgtgagagcgcgaccggccgggagttgggggacccgggacacggccgcacgtggcctcccagggttctaggagaccctgagttagccgggcgtgcgcgtgggtgtcgggggcgcgcaggtctccagccttgcagagacggaggaggctgccagctgtggggggcggcggtgggtcctggagtcccaccgcctgccctaaatttccactccgcccctgtcgcccagtgtgaccttgggcatgtactgcagctcccagtgcctcagtttcctgctctgtggagggagagtgacagtgctcccacctgctgcgtgtgtgagggtttggcacccctctggcctttgtgaaaggcttaggaaacgggctgtttctttactccggttttacaggaaaggaaactgaggctcaagacgttttagtaacttctccaaggttacccagccagcaagtgatggggtccaggcctgaccagcgcccccgccccagcacattctagaaggttctgccccagtttaaatggggtgcatgctctgaggcctgtcacagctttttccggcttagcttctctgtccctcctctgggagtctccactcccatgtctgactctctccccataaccttctggggcagctaagggtctgagtccctctggacatgagcccctggctcaagcacatcagggagagataaggggctcagggagcaccagcttcatgggtgaatgaatgaaggaatgaaagacccggctgtgtctttcaggtctgatctcagagctgaagctggctgtgccctggggccacatcgcagccaaagcctggggctccctgcagggccctccagttctctgcctgcacggctggctggacaatgccagctccttcgacagactcatccctcttctcccgcaaggtgtgaggctggggctgaagggaaggccagggggaaagtgggcaggaaggtgaggggggaggtctgcaggggaatgaggagggcggggagacagctggcatagacacctcttcctaccctccaacccgcttctctctgtttcagacttttattacgttgccatggatttcggaggtcatgggctctcgtcccattacagcccaggtgtcccatattacctccagacttttgtgagtgagatccgaagagttgtggcaggtaagaaacagagtgtgtattttcggcggtgtggggggtgctctagggcaccccctcttatcactggaggcggggtaggatccaggaagcagcgctggcctgagagtggggcctgggctctggccccaggtctgccagcaattcacgggagatcttgggaaagttgaagagttcgcttcctccagtgggtcccccaagctagtgtcctgggtggacaccccagatgctgggaagggatttcctgagcctggggactagaagcaagatcgtgggctgagcctgtgcccagccggaccttctggctccttgcatttccagccttgaaatggaatcgattctccattctgggccacagcttcggtgagtacagtggccaggagctgaccgggcccggagtagggctgggagggaaggataggagctgctgccccacccctttcccctgcacttatgagatctgcaaagagagatgagagggtcagtcagaggttgaccactgtaccctctgacctcaggcaactgccgcaagggacacagggatgagggaaatgtggtcttttgagtggtcaggtctgatgaaggggacatcatggcccagatgctgagcccccagccacccatatggtgccccccccccaactggtgggaagaagctttagggtatgcagctggggagggagtgagggaatgtcacccacagctcttttgtcccccaggtggcgtcgtgggcggaatggtgagtagatggctttgtctggccaactggggctcccttgggtggagtggggaggggagcacaaaggaggaaggagaaggtacctgggacagaaagtgcctcctcctgtcacagtgatagtccttataccaggaagttggtgtaaacggtggagactcctggtagagttcatgtttccacgcccccatacccggtcccaccgcaccctggagtccagccatcaccaaggtctggagctcagtgctgggtgcagacttaggggtggtgggggaaggcacaccatagatagaagattctcctctggcctcttggtcagcaccctccccccagcctaaaagatgtttcggggaactccagggtccccagggaaaggcgggagtgtcctttccttcttcatcctattcattctccccttttggcatcctcacagtttttctgtaccttccccgagatggtggataaacttatcttgctggacacgccgctctttctcctggaatcagatgtgagaagcgggctttcgtgcatgctgtcattagggaggacctgggccccgggcagcgctcccagccctgtctcctttggtggacactagggaagcacgaggaggcggcagagggtgggaaaggggagtcagggacccgctccccaacagatgacacccttctgctgcttatacccctagcagtggtcaggacaaggggtgtgggggaccccttggaaactggatgtgtggctcgggatctgcagaatgccaggctgatcacgcagtggcaggcagtggaagagggcagcggccatgggtggaagatgttctagggcacacagctgggccggcacactgcactcacacccagtcgaatgcctttgcactgtgtccacattgcaccaccacacatgacagccctaaatgtgaactgaaggaacaaggactgacccctctgaccaccactacccataaccagtactgtctctgcgtctgagtcctggcctggtttacctgctgggtgacccctggcaagttactttgcctctctgggccttagttcccgcacgtgtaaaatgaggttgggctcaatgacctggccagctctgacatcctgtcattttcttgccaaggtctcagcctatcagttgtgacacaagtctcatcagtttcagttttcttgtccatagaatgaccacagatcggccagatgcggtggctcacgcctgtaatcccagcactttgggaggccgaggctggcggatcacctgaggtcaggatttcgagaccagcctgaccaacatggagaaatcccgtctctactgaaagtacaaaattagctgggcgtggtggcacatgcctgtcatcccagctacttgggaggccgaggcaggagaatcgcttgaacccaggaggcggaggttgcagtgagccgagattgcgccattgcactccagcctgggcaacaagagggaaactccgtctccaaaaaaaaaaaaaaaaaaaaaaaaaaagaatgacggcagatcccataaggataaggatcatgtccatctctgtcaccacatccccaatcctggcacctagtaagggctcagtaaatgttccttgcatgagctcagctagctcaggggctattataaggatccaatttacagatggcagacagcagacactcccttctttctgcatttcacccactgaattgacaagtgcagtgcccccaggggcttcctcctgggcgagtcaagaggggcatttggtcctcttgtcctgcattctcaggcatgggtagatgggagatgcccccctctgcagccccaggcagtgggcctgaggctgtcctcacagagtgagccacacatcatgggggagcttggaagccccagaaatgcgccctttctgccagtccctttctgccactgagaatgatggcattcgttgaaccagatgaaactgccaaccccagatggttcgtggcctccggaccctaatttcatgcctttgcaaagcacttggcagttgacagagattccccttcctctccatcatcccacctgatctcttcaactgtccctggccgcaggcaagaccaggctggctgtgactgaggcgaagcaaagactcgttcagaatcgtggggctgactagccagggctggggctgtgtgcccctttgccgagaggggctcagctgagagcagagggcagggctaggaggggcagagacctcgtctgcagcctggatccctgcccaccagccaactgtgcctccttaggaaatggagaacttgctgacctacaagcggagagccatagagcacgtgctgcaggtagaggcctcccaggagccctcgcacgtgttcagcctgaagcagctgctgcagaggtgggtgcccggtgtggacggggagctggtggggtccaggggaggacatcccgtgagacgtggagaagcttctttctccctctcacccaacaagcctgtttctccctggggtcacgctgagcaccaggcttcccagggtcttcagggacgttctctctttccctctgcccctgctccagccatgccccttacttccaataccctccccacacctctcacgcacccgcctctctcccaagcacatgctgcttccacgccttctctcccctctgggactccagcctgggctcccttacctggaattctcccctgtgcttgctcactggcttccccactccttggggcctcagctgggaaccctgccctgacacccccaggcaagctgtccctgccctgcaggtaaccacactgtccaataagagcctattgattcctctgtttcccgaggcatgtgaactccgcaacccccactatggctgatttggtcatctttgtgcctcctgcatctggcagtgggcctggtaggtcagagctccacacatatttgttgtctgaaggaggagaagccccccactgccccaccacacgcacgcgcacacacacccacacacacacaccctgccgctgtaaacatgcaatcgaaacacgggacacaggccaggcgcagtggctcacacctgtaatcccagcacattgggaagctgaggtgggaagatagcttgagcccaggagttagagaccagcctgagcgagatagcgagaccctgtatttaaaaaaaaaaaaaaaaaaaaattagctggtcgtggtggcacacgcctgtggtcccagctactcagcagccttagttgggaggagtgcttagccccaggaggtcgaggctgcagacagccatgatcatgccactgcactccagtttgggtgacagtgagaccctgtttcaaaaggaaaacaagggccgggcacggtggctcacgcctgtaatcccagctactcaggaggctgaggcaggagaatcgcttgaatgggaggcagaggttgccgtgagccgagagagcaccactgcactgcagcctgggcgacagagcgagactccatctcaagaaaaaaaaaaaaaaagaaattacataggtgacataatacataatgattgtcaatttaaccgtttgtaagtgtgcacttcagtggcattaaatacagtcgatggaggtgaggagaggagggagacatcccaggcactggctgctgcacagggaaaagctcgaagtcagctcggtgcatctgttgagagggggattcctgatagaggctgtgaagattaaagaggggaggggcaggatgacaaaggttctcaaaaaacagcgtcccatctggaggcctgtgtcactggagacttgtattaatagaaacttggccatctctgccagtgaggggctgtaggaccttgggcaaggtgcttaccctctctgagccttggttgtctcacgtgcaaaaagaaagtgctttcattcgctcagctggtttatgagcagcttggctaggggagccaagccctgggcctgcctttgaagggttgttgtcgagactaggtgaggtcatgtgtgttgagtggcctcgcacagtgctgtcgcttcaggtgctcatggcctgtgctattttgtgattgttaaaatatggtagaacattggacacatgtgagacactgtcattagaggtggggatgctctaactgcagggagaccgctgagagctgctgcccaggcccaggccaagagatgaggcttggaccagggcgtcagccaatggtctgggaatgttaacgtgtttgtctttgatccgtgtgggatttgttcttgagcatggtgtcagatagtgattcattttcttttttttttttcatgttttaaaagttctatttttctttattattattattattattattatattattattattattgatacagagtctcgctcttgttgcaaaggctggagtgcaatggcaccatctcagctcactgcaacgttcgcctcccaggttcgagtgattctcctgtctcagcccccaagtagctgggattacaggcacccaccaccacacctggctaatttttgtgtttttagtggagatggggtttcaccatgttgtccaggctggtctcgaactcctgacctcaggtgatctgcctgcctcgacctcccaaagtgctgggattacaggcatgagccacagtgttcggtctatttgaattgtagagacagggtctccctctgtcacccagactggagtgccatggctcaatcatggctcacgcagcctcaacctcctgggctgaagtgatcttcccacctcagcctcccgagtagctaggactacaggtgtgcgctatcacacccagctaagttttttacttttgtagagacagggtcgtgccatgttgcccaggctggtcttgaatgcctgggctcaagctatcctcccgcctgtttcccaaagtactgggattataggtgtgagccactgcagccagccattgtaattgtttttctagatgaacagctagttattccaataccagctgttgggtggtcctccctacccactaaggctcactcactggtggtttgtcccttgtgtgtgctgaccttcgtggtgggagtttattgccagatcctagtcaatctgacttttggagatgcccctttccctgtccttagggaccatgtcttatgtgacctgatctgtagtgggatctgtgatcacccataatgctggaaggaggaggcttcccagggatggaaagacttcgttaggacataaactaaattgcagaagatacacattccaagatggggctggcccaaaattctttttttttatttttattttttaaatttctggccaggtgcagtggctcacgcctgtaatcccagcactttaggaggccgaggcaggcagatcacttgaggccaggagttaaagaccagcctggccaacatggtgaaaccctgtctctaccaaaaaatacaaaaattagccgggagtggtgacacacacctgtagtcccagccacttgggaggctgaggcaggagaatcgcttgaacccgggaggcggaggttgcggtaagctgagatcacgccattgcactccagcctgggcaacaagagcaaaaaaaaaaaaaaaaaaaggttctataaattcttctcatatttttatttaacatccacaatgtgatttaagatgtaatcaacataaagcttgattgcattattttgcatgctgttttccaaatccagcttcgtgtcacacctacagcacatctcactcaagctggccacatccccgccatccagacgtaaaacagtcacaagacagggcaggcagggccgcggaggaggctggctggggccatcacggagtgcccatcctgcactgtggtcccagcaagtttctttctcctggcaagaagcctgtcccaggctggcaggggacagcgtgaggtgcagcctatggactgggaaaggggtgtggaagggccacacctaagtcctaaaatccaggcccaaaagtggcccaactcacttctctgactttaatcacacagccatacctggtggcaaaggagtattggaaatggagtcaggctgggtagccacgagcccaggaagaggggagaacagacttggagagggcaggagtctctggccaccaggggctaaagagccttcgatgaggcagtgatgtggggtcctgggctcagacccagggtgggtggctaaggtgccctcgccagggcttagccaccccaacagagatgggtttcgtgcccacgagagtgcctgtgccttgtgacgagaattcaccatgtttttgtctctgcaggcagagaacagcattgacttcgtcagcagggagctgtgtgcgcattccatcaggaagctgcaggcccatgtcctgttgatcaagtgagtctggacccatccccttcagtcaccccccaaggagacatgggcgccaggaatctctgggagggggccctggcatgaggctccaagttctctgcgtgtcgaccacatcgctaagactcaagatcttttttgggaagcccccctggcagcagggtcatggaaggaggaaggtcagaggaggggagggctcaggcagcaggggatgggccggggctgtcccatgcctttccacaggtgtcagcggggggcatgcccaggtaaggctccataaccagtgagcccagtctcgactcactgcaacctctgcctcctggattcaaacgattctcctgcctcagcctcccgagtagctgggactacaggcgcccgccaccacgcctggcttatttttgtatttttagtagagacgaggtttcgccatgttggccaggctgctctccatctcctgacctcatgatccgcctgcctcggcctcccagtgttgggattacaggcgagagccaccgtgcgtggcccaccatagacgatttttaagccataaaaagaaacgaagcactgacatgggctccagcatggatgagccttgaaaacatcgcactaagtggatgaagtcagacacaaccgtctacgtgttgtatggctgcattcacgttcaagtccaaataggacacacggcagagacaaagccaggtcatggttgctcaggaccggaagcctgttgggggtgggggggtggggtgtgtgtgtgtgtgtgtaagctcagaggtttgcgatttctttgggggtgatgaaaatgtaattgtgacgatggtctcacaactcaatgtattaaaaaccacgggattgtagacttttttttttttttttttgagatggagtctggctctgtcgcccaggctggagtgtagtggtgcaatctcagctcactgcaaggtccgcctcccgggttcacgccattctcctgcctcagcctccggagtagctgggactacaggcacccaccaccaagcccggctaatttttgtatttttagtacagacagggtttcaccatgttagccaggatggtctcatctcctgacctcgtgatccacccgcctcagcctcccaaagtgctgggattacaggcgtgagccaccatacccggccaggattgtagactttcaatgggaggattgtgaagacataaattctctctcagagcaagtgtgggctccagcgcctgttcagatcccagctctgctgttcagggctgactgtgaccaagtcctgaactccctgcgccccagcaaggctgtgccttcagcacttgcttgcgcctggcttgtgccagctgagcgtgagctgagattaactgagcctcaaatccaacccagggtcaagggacccagctgtgggagttggggtagcccaggctttggtttctcctcagaggcctgaacccagggcaggatgggggcaccgctgggaggcggttctaagatgaaccccaacaacccccaactcctcactttccagagcagtccacggatattttgatccaagagagaattactctgacaaggagtccctgtcgttcatgatagacacaatgaaatccaccctcaaagaggtaaggcggggctcaggcagctggtgtccagccactgtcgcccactctggtcccacctcacccatctcttctcatgcactgggaaagacccctggtctgcccccaggcccaacaagtgaccaccaggatctatcaggcctcatgctccagtgatcagtccctagaggcctggggacacatgtaatcagaatttaagaaacagagacctttggtggggaggttctttaccatcctcaagtacccacccctccttcttggggccaggcacaattaggtgacccaactgccagagacagtcccacattttttgagagacagggtctcattctgttgctcaggctcagtcatagctcactgcagcctcaaactcctgggctcaaatgatcctcccacctcagccacctgagtaggtggcactacaggcgcatgccatcatgcccagctaatagtcacactttttttttttttttgagatggagtctcactctgtcgctcaggctggagtgcagtgggaagatctcagcttactgtaacctccacctcccgggttcaagcgactctcgtgcctcagcctcctgagtagctgggattacaggcacctgccaccatgcccagctaatttttatatttttaagagatgggggttcaccatgttggccaggctggtctcaaactcctgacctcaggcgatccgcccaccttggcctcccaaagtgctggttttgcagatgggagccaccatgcccagcctagtctcactttataggctcccaaaccacagcagaacacctggctgcctcatccctctgcacccatcacgccagtgggcatgctggctgtaggtggggatggcctttgcccgggttcctgggagcacctggtgttttatggtcacctacccacttacacctgaccctggggcctctgcagttttcttggcgttgtcaccacaaaaggaagaagcccacctgtggctggctggctggccgccaggtcagagccaaggcaggcagggccttcctgtctggcttcttgaaggcagacacaagtctgcaggctgctcacgtcatctcattatcttttctcacgaggactacttcggatacaatcacagcaaccctggcctcggccctgccctgtccctgccatgcaacttcacaactcagctggcctagacccctgggaggcctccaagtccctaaggttagacatctcctggggtgctatggactgtcggggctccaaggagccgagtgtgggggaaactcactgtgggaggcgctcctgacctgcagggagctggaatgctgtgggagggccctgaccccggggcccatggagctccctaggctcctctggccacatctcactacccaccccctcccctctccagcggttccagtttgtggaagtcccaggcaatcactgtgtccacatgagcgaaccccagcacgtggccagtatcatcagctccttcttacagtgcacacacacgctcccagcccagctgtagctctgggcctggaactatgaagacctagtgctcccagactcaacactgggactctgagttcctgagccccacaacaaggccagggatggtggggacaggcctcactagtcttgaggcccagcctaggatggtagtcaggggaaggagcgagattccaacttcaacatctgtgacctcaagggggagacagagtctgggttccagggctgctgtctcctggctaataatctccagccagctggaggaaggaagggcgggctgggcccacctagcctttccctgctgcccaactggatggaaaataaaaggttcttgtattctcactgcttttgaggctttttcgttgccagcaagggcttttgcattgagggaaaaggaagcacagaacggattcatccagggtcctggagaggagggtgtggaggcaagaagcaggaaggacaagtcctcctctcggcacgcctgggtccccaggactgctgaagcacaagacccgaggggtggcctggtccttccctcctggcctgtgtggactctgatggggctgttggacgcggtggccttcaacctggggcccgttggccagagctcggcctctcagagaccgctgcaggccctgcctcgcctcctcctggccctgcacctccagccattcactgcggctctcacagctcagtacggtcggaatttgcgctgggcccgcagcagctcgatcctctgcttgtcctcctcgaacttcttgcgcagctgcgctagatctgggggtgagaggaggcgcggggcagggtcagacagcgcgccccggggaagctggcttgctcatgccccacccctcctcccagttactgtgggggtggggctatgtctcccccaccagcccatccccctcccagctctgctgtgggggcagggtctggatcttgtcaggaaacagaaccgacggcaggccgagtccaagggcaaggccaaagtgggagatgctggcacccccagcctggagatgaagccctagcgacaaagcaaaggtacccgcccccacccccatccctgcacagggggaaggaaggagtcttgagcgctcggcctggagaaccctgagaatcagtaaaggcaccccagcccttgtgctggtgaatgcagatggcaaccctggtcagtgggaggctgatggcactgagggggaagctgagggtctagagcgagcacgagcgggagccaggagggccagccaggcagggaaagcaccagtgactgggcgggcggctcagggcctgccgcagagcccgtccctgtgccctagccagggccaggagaaccctcccctgggcccacagggaagctgttctgtagacagggacaccaggcagtggggcaggaggctcagccgcagcaccaggagtgggccacaggcgatcgggcccacaggcatgggagggtcctgtgcggggccacctgacagacacacacacacacacacccaccaccaacccaacacacatactctgcagcaccttctctgcacccacagtgggttcagaagccccctctgcacttgaactcctcgttagctggaggctgacgagcgccagcactaagtgcacagggacccagaggtgggcactgatgacctagggtccccacccactgagcaaatgcatctgcccctagggggtgatggggaaccgccacacagggtgctgccaggctgggcctctttccacagagtctggtgcgagccccgtgcttagggacgccctccctcctcgaccaccaagtccagcgcccgccctcaggagcactggccacaggcctcatccgtggctggggccaaggccgaggggtctgaggatggactgggggtggcttacgctccatcttgctctctcgatgctgccaggcgtagaagttgagcagctcttttcggctgcgcttccgtctctccctctccagcacccgcaagctggctgcctcagtccgggggagcacaggccgccggccccggcgggtcaccttcacccagccctcctcgtcagggaccccctcctcctccttggccttagcttcttcctgcaaggaaggtgatcccatcctccggtgggacctcctgcagcctccagcagcgcgccctccacgccctcctcccaaagtcagaactgccctgagcccccgcaggggagggctgctcccctcctcccagcacagtgttggggctaaggatggcggggagggcacggacctgccggcactgcctccttctccactgtaggacatgtggagactacatgtgtcacccagccaggcagcccaggatccagcagggaaacagggagcctggcctctacagagtggccaaggacaggccaccactgccctccctctggggcgccaccttcccacagccacacgggcgatgcggggctcggccgaccccgcggggcctctacctcagcgatcttctggtcatatgcctccatgaacgtgtccacttccaccctcagggcctcagggtcgggcacagagtctgcgtagtcactgatccactctgaggaaaagggagccagggaaacggggcttcctcaggcctggcatttgggccccaccccagggcctgccaggcaaattgggaccttttcccacagggcccggggcacaggtgctaaggagatcccaggggctgcaagctgcgccctcgctctgcctgcccagtatgcctgtgccgctctgtgccaggggctcaggctaatgactccctggggacccagacacagccccatggtcctcctgcccaggcctccacatgctgctctcagggagcatggacttggcttgtgacattcagacactgtccccatagagtgtcctgccaacccggagcccagaaaggaggcgccagacccctcccgcagtactaactgtgaatgccactcttcacagggtggctctctgtggacaccagcagggggcccttcagggccaaggccgctgacaccccacttggcttctggaacaccacataggctacctggaaaccctgaagagagagagatgtcagaggttgggggctccttcccacgtctggcacaaggtctccaggcctgccctcagcctaggtggtagctacaccaggggagatggtgctaggctattcctgagccatgaagagaaccacaggccatcccataatccaggtcagaggcagccacacttccagtaatcctgcttctgcgggaagtgacggctgttcccaactcctccccaggaagaggggatacagaggcttcttttcttccagtcacgggagggatgcggtgaaacacaggggtcgccctgggccagggcaggtttttggaagccaggcctgggcgcacacaccatgccagatgccactgtgtggggaggaggtgtgggctccagggccactgggaaagctgtgaacaacagtgctcctggagacccggcccccaagcctggggaaggagctccctcagtggggaagcaggaggggagccggggaaggccctgcaggtggccagcagagacggtccgtgagctttaacacgggacagaaaaagccaggcaggaagtgcaaggatgtggcaaatctggcaaagaatcgcaggctttgtcacccagacagtctcttacaccacacacggtgaggatgggctcaggaccagagaatgctctgatgtcccactgccagctcccccaacacactggggacagtgccccacccccctcactctagtggaaccccgggcttggcggctcaccggaactggcttgggatgaaaaaacttcgaccttgactcctttgggctctcagccaggtccggcttctcctgcaactctacagactggacgaggccacaggtggacaggaggcgggacaggctctcctgccgcagggagagggaagccaagtgtgagcatccgcagggccatcccaaagcctccctgcaccatgggtggcgctgccaggggtccagcgccgctgaaggactcagccacagccacatctgcccaagccgggagactgtgggcaccatggcctccgacctgttccccagggacaatatggaggttgatattcctgctcttttttttttttgagttggagtattgctctgtagcccaggctggagtcctgcaacctccaccttcgggttgcaagtgattctcatgcctcagtctcccgagcagctgggattacaagcgcccaccaccaccacacgtggctaatttttgtattttgagaagagacagggttctgccacgttggccaggctggtcttgaactcctgacctcaggtgatccgcccgcctcggcctcccaaaatgctgggattacaggcgtgagccactgtgcccggcatattcctgctctctcactggagacaggtggggacattcttgctgttattctgatttcctatgacaagttttactacctgaatcagcagtagtgaccctatgctatgacagttgggatggtggttgtctgtggtggaggcagcgggggttctgggatgtgctgctgtgtctccacctgggcgctgactacacagctatgttctgtctctgggatgcagcgagctggacacttgccactggggcccttccaggcacacatgctgcacttcaaaaaaggtcagaactcacaccccctcttctacatgcttctttttttctctaagtttagaggaatcttttacaaattagggtttcttttttgaaaacaaatccagcaattcccttggccaggggcggtggctcacgcatgtaatcccagcacgttgggaggctgaagggggcggattacttcaggtcagcagttcgagaccagcctggccaacatggtgaaaccttgtctatactaacaatacaaaaatgagccgggcatggtggtgggcgcctgtaattccagctgcttgggaggctgcggcaggagaatcacttgaacccgggaagcggaggttgcagtgagttgtgaacgctgtgctccagcctgagcaacagagggagactctgtctcaaaataaataaataaattaaataaataaataaataaataaatccagcaattcccttagcttagtttttgtaaaaaaaaaaaaaaaaaaaaaaaattaacagttgtgtttggatagaattagaggcactttttattttcttatactttcctacttttaaattatggacatgtacaatctggaagaaaacacgtaattcagacaactttgggtaatatgtaaaaatgccttgggctacttaggattgtacttttttctcttttttttgagtcagagtctcactctgttgcccaggctggagtgcagtggcgcgatcttggctcactgcaacctacacctcccgggttcaagggattctcatgcctcagcttccctagtagccaggactacccacacatgccatcatgcctggctcattttttattttttagtagagacgggatttcaccatgttggctaggctggtctggaactcctcccttcaggtgatccgcccgcctcagcctcccaaagtgctgggattacaggcatgagccaccgtgcctggcaggattatacttttaaagacatctttaaaaagccagtttcctgactggagatcacggtagccctcctgacactctcctctggggctcccattagctgtgtccgtctcaccaccaaggacttggtggaggccatgggagcccccaccttgagcccacaggtctcctcccagacagacactagctcacctctgtgcagtatgggggcacattgaggacaaaaagagtcctcttctgaggccaggtggacttggtgccttgtcgaacgccgtgtgctctcacatagaggtagtgagaagcctgttgcttttcagagaacttgattggaatagctggaaaggaaatgggaggggagggatggccaggctaccctgagctgaggccagcgagacactcacacaacttcctttctccacatccctgtctagtcctatctgttcatcgatccatccatcccttcaccaaccccccttaccctactctttggcaaagcctgtgcgggctctaagagtctgcccaggagggcctcccaaggcggtgcagggagagagaagataaatgggcaatgattacagatgggggcgcaatgagagggaagctcgaaccctgcggctcttggagtcaacgccaaaatcctaaccatggctggaagccccgtgagaccctgcctgtcactgtgacctcttctcgtaccatcttcccccagcaccttggattctctgttcccccgggtacaccagggcctcacacatgctggcctctctacctggcgtgtcaccctcttccctcccgctcacctcaggtttagctcaaacctcgcttcctcaggagagccttagcatcacctccgcccctcctgccagctcagatcccactgcctgtgccttcacagcttctcttaacagtctggaggctatattgatgagattctttggttaatcgctggcacacccatgactgtaatcctcataaagctaggaactgcttctatttttctcacacctccgtcacagtaccggttggcgtagagctgcggtccctgaactcaggaagctcagttgcaataacggagaagacaattaacaagcatacagcaaacttgtatcaattgtgaaagaaacattacagggtgatggggtggcagaggtcttctttccataggccatcacggatggcctctttgaggaagcaacattaaagctcaggccagaacgccactgtgcaacaaaccggcacagcacgtgcaaaaacccagaggggggaaaaagcatgttccctcagaggaacagaaagagctttaggtcggcaccagccagaccacgtggcccacacaggttaagaagtctggtttttgttttagaagctacctgataaagccactggagggaatgcagtaggtgtggcgcctatcgtgggcgcggcagacatgatcgaatctaaatgtccttaaaagaacattctggcacgtgggtggagaacagaagcaggggcaagaggagaaggagggcaaccgagtaggagggcctataacagcccaggtaagagctgatgggggatggactaggagcagaggcgatgagaaggggatgggctcacctggacgagcgggtgtggacggaaatgggtttgtcctgggtgagagtgtggacagaggcgggctcacccaagggaagcgtggaccaagttgggctcgccccgggagagtgagcaggcagaagggcgccgcctgggtcctcgggaccccggagcctcaagacctgcggagcctggggccacgggccaccggggctcacacccaaccgtgcggccgctcctggggacccccggccgtcgccaacccccaaacacctcccggcgatgcctgaccgcccccggtctcgcgtcccggagcccctcacctgcgtagcccagtgggctggggatacggtcctccgggtcccgcgcggcgcacttcctcctgcgcgccaccatcttgccacccgggagcgcgggggccgccgggagttgcggttcggcgccggcgcgagcgcgttttcgtggcgcctgccccgccccctcactccaagcccgcctccccggccccgcccgccatggcccaaccttcatccgctcagagataaatcagcgcgcgaaagtgggagcgaatgtcagagttgaccccggccagtcacgagtgcgaactcagctttccactcatgcattcacacgttgaataggcagtgtgagagaaatccaggatggctgctaggttttcagtctgagcaactaagaggatggtgttgccattgactgagatgggaagactgcaggagaggggcctgcttgggggtgaaaatggagtagatcagttctctgtgagccgtggtgagatgcccattaggccactcaggggacatgtcaggtgggcacttagatatgagactgaacagactgaacatcagagatgtcaggcctggagcaatacacacgggactggccatggataggttattgacagttacgagaggagccgggtgcggtgattcatgcctgtaatcccagcaatttgggaggccgaggggggcggatcacttgaggtcaggagttccagaccagcctggccaacatggtgaaaccccgtgtctactaggtacaaaaagtagccgggcgtggtagtgcatgcctgtaattccagctactcgggaggctgaggcaggagaatcgcttgaacccaggaggcggagattgcagttagccaagatcgccccactgcaatccagcctgggcaacagagcgagactctgtctcaaaaaaaaaagaaagagaaaaaaaaagaaagttatgagagggtgtgatcgccaagggagcaagtgtagataggggagaaatgaagtccaaggactccacttttctggactccaaagggcctctcagactgtgtacccgccagcccttgatgtatctactatttctcttttcccagtgtacagttgcttcttggaaatgctgtcggcccctttggggaaagattaggagcctactactgcaaatatttgtggtctggaggggacccagcctccctttcagtcagtgacctctggttctgaggcctagcttaggcctggaaactggatgaggggttgggattttccatcagcagctgccattactgtcctgttcgctcgttttttgtttttgatctttctttgcttagcgcagtcaagcagtgttggggcttccgtggcccctgggaataccgtggtctactagcattcaccagagactcctgtgcgcccaggatccctggcagccactctggccttgctcctgttctgacagtcacatcaaccgaacctctgctctctggaatcctatctcctgctgacctttccgagcccggctccagtcctatttgccctcttctaccctggcctcagaggacggccatgccgattgcccattgatgcctagaccccccactagtcaaagcagtctctggtgaaccctccagaaatacggtcatctggcttctcagatgttgcataataaatctgtgcctgcacatccccctccccgaggcctttggctccttctcagtgccctgccaccatcgttctgttatctccctctcatgtattgcttccacgcttcaaggagccatctcgatggatatcaggactggccacacaacatcacttttttttttttttttttgagatggagtctcgctgtgtcgccaggctggagtgcagtggcgcgatctccgctcactgcaacctccgcctcctgggttcaagcaattctcctgcatcagcctcctgagtagctgggattacaggtgtgcaccaccatgaccagctaaatttcttatttttgatagacacagagcttcgccatattggccaggatagtctcgatctcttggccttgtgatccgcccacctcggcttcccaaagtgctgggattacaggcataagccttttttttttttttttttttttttttttgagacggagtctcactctgctgacacccaggctggagtgcagtgctgccatctcagcttactgcaacctccacctcccgggttcaagcaattctcctgcctcagcctcccaagtagctgggattacaggcatgtgccaccacacccagctacttttttgtatttttagtagagacagggtttaccatgttggccaggctggtcttgatctcctgacctcagatgatctgcccacctcggcctcccaaagtgctgagattacaggtgtgagccactgcacccagcctagaattcaagactcttgagcccatctatccagacgttccctgccctaggtgacagtgtccgctccttcacttctgtgctccttgactggagcacagcacttagcacagccgttcatctgccctgattcaaactccacagttctcatcaggttctaggcctttatcagcacaatgtgacctgtctttaaacacgtctctggaagcccctcctgattttcaccttgggctataagttgataaatggctgtcctgaggcctgttgttttcttccttcagcccactgatgccactcgatcaattaactccactttctttataattaccactgcccatgtatttcatgggtcaggaatttgggcaatgctctgctaggagattttgtttctccctgtggcactgactgagggcatttgatggtattcagctggcatatgggctgcactaaaggttccaagtcacttcactcacatcgcagcatctcagcagatgagtccggcatctcagcagggatggctggtgatagagtttgagtatttgtctccgcccaaatcgcatgttaaattgtaatccccagtgctagaggtggggcctggtgggaagtgtttggatcatgggggcctcatggcttggcgccgtctttgcgtctttgcgatcgcgagttctcgcgagatctgtttgtttaaaaatgggtggctgcttcaccccccactttgttggtcaggctttcaccatgtgaagtgacccctcacacttcgccttccaccatgagtcaaagctccctgaggcctccccagaagcagatgcagccatgcttcccgtacagcctgcagaaccaattcaacgtcttggctttataaattccccagtctcaggtatttcttcatagcagtgcaagaatggccgaatatggctgggctcaagtgggacttgtcaactagagcacccacccatggatttcctagcatgtggtctcagtagtcaactttttttttttttcctgcttgctgggaggaggaggagggagaagcgacgggcttcattaggaacggtgagtttgcgactctgccgctaagtggcagctccagctcacccccccagctccctcccacaggccacggctgggcatggagaactggtgacttcagaggcccggagagaaaagacgggggagagcgaggggccgccgtgcctgaggtctgggggtgacagcagaggatggccaaggagtgcagggccaggttgccctgccctgtctaagagagtcttaccgaatatagaggttgaattgtgctccccaagagacatgttgaagtatgttttttttgagatgaagtctcacactgtctcccgggctggtgtgcagtgggcgatcttggcttgctgcagcctccacctcccgggttcaagtgattctcctgcctcagcctcccgagtagctgggactacaggcgtgcgccaccacgcctggctaatttttgtatttttttttttttttttgagatggagtcttgctctgttgcccaggctgaagtgcagtggcgcgatctcggctcactgagagctccgcctcccgggttcacgcaattctcctgcctcagcctcctgagtagctgggactacaggcgcccaccaccacgcctggctaattttttgtatttttagtagagacggggtttcaccatgttagccaggatgatctcgatctcctgacctcgtgatccacctgccttggcctcccaaagtgctggaattacaggcgtgagccaccgcgcccggcctaatttttgtatttttagtagagacgggggtttcacgtgttagccaggatggtctcgatctcctgacctcgtgatctgcccgcctcagcctcccaaagtgctaggattacaggcgtgagccaccgcgcccagccatgttcaagtattaacctctcccttcccccaccactcttccattcctgtgaatgtgacctgaatatggaaacagggtctttgcaaatgtaatcaggtcctttcaactcaagataaaatcatcttggatttagggtgggctctttgtccaatggctggtgtccttataagatgcctaggagacacacacaggaaagagggccataggaagatggaggcagagatggcagtggtgaggctataagccaagggatgcctgtggccactggacgccggaggaagtgagggaggattcttccctagaaccttcagagggagcacagccctgccgacaccttggtgttggacttctcacctccagaaatcaatttctgttgtcttaagccacccagtttatattattttgttacagcagcctgggaaaaggaatacactgaataagaacccaagtgagcttattagaaagaatattgaggcctggcgcagtggctcacacttgtaatctcagcactttgggaggctgaggtgggtggatcgtttcagtccaggagtttgagaccagactgggcaacatgatgaaaccccgtctctaccaaaaatacaaaaattggctgagtgtggtgatgcacacctgtaatcccagctacttgggaggctgaggcaagagaatcccttgaacccgggaggtggaggtggcagtgggccgagattaagccattgcactccagcctgggtgacagaacaagactctgtctcaaaaaaggaaagaatgttaaacctcctcaagaggaggtaagcgattttaaacactctgaagccacgcaggggtaacccttttacaagccaagaggaggagaaggaaaaattgaagtcacttttttttttttttgagatggagtctcactctgtcacccaggctggagtgcaatggtgtgatctcggctcactgcaagctccgcctcccgggttcacaccattctcctgcctcagcctcctgagtagctgggactacaggcacccgccaccacgcccggctactttttgtatttttagtagagacagggtttcaccatgttggccatgatggtctcgatctcttgaccttgtgatccgcccgcctcggcctcccaaagtgctggtattacaggcataagccactgtgcccagcctcaatttttcttttttaatggttaaaaaatactttcaaatgtccacacagtaaaattcacttcttttggtatatagttcaaatgcatagagtcctatcaccatgaccacagtcaagatagggaacatcccgtcactcccagaactcccgtgctgccgctggcaaccactgctctgttctcccgttgcttttccagcgagtcctgaaagtggaatcgtgcgagtccaggttctttcactgagcatcgtgatttgaggttcacccacattgttgtatggttccttttcattgctgagaaatgttccactgtctggatggagtgtggtctatttatctattcaccaagtaaaggatgtgggcgatttccaggtttcgacgattatgaataagctgctgtaacattcacgcacaggtgtttgtatgaatggaagttttcacttctcttgggtgaatacctgggagtggggtttctgggtcccgatcgggtttctagtggtctgtaagtcagacttgctaagagttttcgttggggagacgcacacaggtaaggtcagctctcagggtcctttctgcaatgcggggatgtcgaggtcacctgacagaggggcaaatgccagctggtcgcccaacctgctcttgtccgttccttttccctcagaagctaatagaggaaagtaaacctgttgtttcactctcatttccttttattttcattaatattaggaaatgccaagattagtgaaagaatgaaaagatgagtcaaggccaggcatggtggctcacacccgtaatcccagcattttgggaggccgaggcgggcagatcacgaggtcgagagatcgagaccatcctggccaacatggtgaaaccctgtctctactaaaaatataaaaagtagctaggcgtggtggcgcgcacctataatcctagctactcaagagtctggggcaggagaatctcttgaactcaggaggcggaggttacagtggcctgagatcacgccaccatactccagcctgggcaacagagcgagactctgtctcacacagacacacacacacacacacacacacacacaaaagatgaatcaaaacagcctagaaaaggcttcagtgatcctcagactggatgatcgaatcccgaataatggggaatcaacagtaatggcctagtaacacttttaaaaagtcttctttctttttttaagagatggggtctcactgtgttgcccaggctagtctcaaacttccaggctcaaccaatcctcctaccttggcttcctaaagtgctaatattacaggtttgagccactcagcccagccccaaatccttattatatcctatttgtttgctttgcatggaagtttatacttacttccatcccacccttaacataactgcagagggaatttcttttttttttttttgagacaagattttgttctgtcagccaggctggggtgcagtggtgcgatcttggctcactgcaagatccgcctcccaggttcatgccattctcctgcctcagcctcctgagtagctgggactacaggcccccaccatcacccccggctaatttatttttgtatttttagtagcgacgggttttcaccatgttagccaagatggtctcgatctcctgacctcgtgatccacccgcctcagcctcccaaagtgctgggattacaggcgtgagccaccgcgcccggcccagcagagggaatttctaaaggcaaagactctgctcctgaattaggagaaggcgtggcagcttcacctcttactgcctggggtcaggcagttctctgcagagccattctcaaggaggtgtcttagcttgacttgccccaaaatagatgaggagccccatctgccccatctaattaccctgagccctacttctgcctaaatgcagccctggctgagctcaggctgagaagtcccaggatctacagtcagcaagcaaaagaaaaccaggagagccgacagtgtcattgcagtccaagtccaagttcaaaggcaggagaagaccagtatcccagctcagctcacagtcaggcagatggagtgaattctatcttactttttctttttcttttcttttctttttttttgagaaggagtcttgctctttcacccaggaatatgctttaggcaatgcatagtatttcactggagcttgaatcttcctgagtgctttaactggtatttgtctgtagtgacttaccaaaagcaagctt

SEQ ID NO: 62261 - DNA, 548 bp, Homo Sapiens
ctaatatgtttgtgcagcaagcataaataacaggacccattccaaggagtgtgtgtgggttttccccctcccctgtgtcctctgtcaccttggtgatgaggccagagtgatgtgaagactgggagggaaccctaggtcagaccttggtttcctgttgttcttcccaagacccagggttccctcggtttccatttggtcctgtagtgaaatgctggtggttggttttaggttggggaaaagacgggtgctggtgtttaaaaggagtaaaggcataggcccctcatgacctgcagggaccccagccactgcctctgggcttggcttgagctcctgggagtcgggaagctggtttgacattttgtaggtttctctctactgtggagctggagatcaaatgattgggatggttcttcctctggccttacggaggcaaggaagtgctcttccttagtcccgtggtgttgtaaggctgagactagggagatgggtcttgtaactgaaaagtaactgcttctccaaacaccacctgcagctatctggggcaccat

SEQ ID NO: 62262 - DNA, 601 bp, Homo Sapiens
ttgcatctgcctgttgacaaactttatttctctttcagcacctggcacctcagacagactgcgaggatggaagcagcatcaggtaaagtatacctaacaaggttcacgcccagaactgtgagaagagttggatcccagctctttggaagacaatccttcctccagtggtgaacttgagctgcacacacaatgcaggagggctacagagcacagttctgaagcattatttccacactgataaattcatgatttatgaaaggaaatactgccagcgctcactccctccttctctgctacagcttgttagacacaaattgcaacaacaatcttaaatacttgcattttatttcaggccaaagcccctccactctgaactaaatgccatgacagtcccacagcataggctggtagtaaaagagcccacagacagggtaggatagccagaggagggaggagtgggcgacagggaggggaaggatcacacacacaaacctaagagtagagcaatgcagaatgcctgtggcactcggctcctaccagctctggctctcagtggagatgaagaatggcagcaggaggacagaatgcctcattgtctgaa

SEQ ID NO: 62263 - DNA, 554 bp, Homo Sapiens
tttcttgtgcaagtggtttattgatggagtgctcttaggagaaggggagtgagggaagcagcgtaggacagaggaaaaaaactgagtaagaatgtgctctcagaagaagactgacttcagcttgattccatgaggagctctgggaaaggaagttccttgatgtaagaggtcagtcttttgtacctccatacaagaggtagcaattcttttctagagatggtctcaaaattagaatacatcaaaatcacttggagggtttggtaaatcagaatgctgtgccaacccccagagattctgattcagtaggtctgaggtggggcctgaggatttgtatttccagcaagttcacaggtaatgctgatgatgcactttgaaaacctccactctagagaagaggacagctctgaggtgttagcacccacagcatctcgcaaaggggatcaggaaagcacctactacatgaaggcacatgccagggacagatggattggaccccaagctggggctatgtagactacatctttaggtcagaacatctagattcacagtatctt

SEQ ID NO: 62264 - DNA, 787 bp, Homo Sapiens
  misc_feature (705)..(705): n is a, c, g, or t
  misc_feature (709)..(709): n is a, c, g, or t
tacatttgagagcagaggctttatttacaatgacattcaaacaggatttagcaaaggatgcctcttcctgctcgcatcttagcagcatgggttgtacttcataaacagaaaagagaaatatcctgggagcaggaagtgaactcttttctcagataatgttctctaaatcccaacacgttccatgctcccggctcttagcaggtagttggtggacacttggttatagcagctgggtgccagatgcctgcatctcactgaggaatgtgttcagggaagatgtcaacactggccgggaaaaacatcaggctttcacctcactcatggcctccataaggcgagcgctgtttgtgactgctgtcgtcaggaaaatgaacctgtagcctttctctctgcccaggaaccggagggctgagatctcagagaatgtacaaccacccaagaacaccaccaagatgaggcgcagggactcactggaagccttgtcttccttagtcatatctgtgaatgcaaagtcactgcagttgagcagccgtaccacctcatcaaggccctgccagcttcgccgctctagcacctgctcaatgattcggcagctcaggggcacataagcaccaccggagacgtaagccatgtctcggggcactttcagatcatactcgccgtccccacggtggatcaaattcagctttttgctgatggcacganaatngctcctcttggccagagaaactgagggcatcagtatctttccttgcagccttgtcgtcaccagcttgctcactttact

SEQ ID NO: 62265 - DNA, 1854 bp, Homo Sapiens
gcaagagcgccctcatggatgagtcagaggactccggtgtcatccctggctcccactcagagaatgcgctccacgccagtgaggaggaggaaggcgagggaggcaaggcccagagctccctggggtacatccccctaatgagggtggtgcaatcggtgcgacacacgacgcggaaatccagcaccacgctgcgggagggttgggtggttcattacagcaacaaggacacgctgagaaagcggcactattggcgcctggactgcaagtgtatcacgctcttccagaacaacacgaccaacagatactataaggaaattccgctgtcagaaatcctcacggtggagtccgcccagaacttcagccttgtgccgccgggcaccaacccacactgctttgagatcgtcactgccaatgccacctacttcgtgggcgagatgcctggcgggactccgggtgggccaagtgggcagggggctgaggccgcccggggctgggagacagccatccgccaggccctgatgcccgtcatccttcaggacgcacccagcgccccaggccacgcgccccacagacaagcttctctgagcatctctgtgtccaacagtcagatccaagagaatgtggacattgccactgtctaccagatcttccctgacgaagtgctgggctcagggcagtttggagtggtctatggaggaaaacaccggaagacaggccgggacgtggcagttaaggtcattgacaaactgcgcttccctaccaagcaggagagccagctccggaatgaagtggccattctgcagagcctgcggcatcccgggatcgtgaacctggagtgcatgttcgagacgcctgagaaagtgtttgtggtgatggagaagctgcatggggacatgttggagatgatcctgtccagtgagaagggccggctgcctgagcgcctcaccaagttcctcatcacccagatcctggtggctttgagacaccttcacttcaagaacattgtccactgtgacttgaaaccagaaaacgtgttgctggcatcagcagacccatttcctcaggtgaagctgtgtgactttggctttgctcgcatcatcggcgagaagtcgttccgccgctcagtggtgggcacgccggcctacctggcacccgaggtgctgctcaaccagggctacaaccgctcgctggacatgtggtcagtgggcgtgatcatgtacgtcagcctcagcggcaccttccctttcaacgaggatgaggacatcaatgaccagatccagaacgccgccttcatgtacccggccagcccctggagccacatctcagctggagccattgacctcatcaacaacctgctgcaggtgaagatgcgcaaacgctacagcgtggacaaatctctcagccacccctggttacaggagtaccagacgtggctggacctccgagagctggaggggaagatgggagagcgatacatcacgcatgagagtgacgacgcgcgctgggagcagtttgcagcagagcatccgctgcctgggtctgggctgcccacggacagggatctcggtggggcctgtccaccacaggaccacgacatgcaggggctggcggagcgcatcagtgttctctgaggtcctgtgccctcgtccagctgctgccctccacagcggttcttcacaggatcccagcaatgaactgttctagggaaagtggcttcctgcccaaactggatgggacacgtggggagtggggtggggggagctatttccaaggcccctccctgtttccccagcaattaaaacggactcatctctggccccatggccttgatctcagcaaaaaaaaaaaaaaaaa

SEQ ID NO: 62266 - DNA, 2328 bp, Homo Sapiens
gaggacacactcaggagagaagccttttctgtgcaaggtgtgtggacgaggctataccagtaagtcatacctcactgtgcatgagagaacacacacaggagagaagccttatgaatgccaggagtgtgggcgaaggtttaacgataagtcctcatacaacaagcacttgaaggcgcattcaggggagaagccttttgtgtgcaaggagtgtgggcgaggctatactaataagtcatacttcgttgtgcacaagagaatacactcaggagagaagccttacagatgccaggagtgtggccgaggctttagcaataagtcacaccttatcacacaccagaggacacactcaggggagaagccctttgcgtgcaggcagtgtaagcaaagttttagcgtgaaaggaagtctcctcagacaccagagaacacactcaggggagaagccttttgtgtgcaaggattgtgagcgaagctttagccaaaagtcaactcttgtctaccaccagagaacacactcaggggagaaaccttttgtttgtagagaatgtgggcaaggatttattcagaagtcaacccttgtgaaacatcagatcacacactcagaggagaagccttttgtgtgcaaggactgtggacgaggctttatccaaaagtcaaccttcgctttacaccagaggacacactcagaggagaagccttatggatgtcgggagtgtgggcgtaggtttcgggataagtcctcctataacaagcacctgagggcacacttgggtgagaaacgttttttctgcagggattgtgggcgaggctttaccttgaagccaaatctcaccatacatcagaggacacactcaggagagaagcccttcatgtgcaagcagtgtgagaaaagttttagtttgaaggcaaatcttcttagacatcagtggacacactcgggggaaaggccatttaattgcaaggattgcgggcgaggcttcatcctaaaatcaactctcctcttccaccagaagacacactcaggggagaagcctttcatctgtagtgaatgtgggcaaggatttatctggaagtcaaatcttgtgaaacaccagcttgcacattctggcaagcagccttttgtatgcaaggagtgtgggcgaggcttcaactggaagggaaatctcctcacacaccagaggacacactcaggggtgaagcccttcgtgtgtaatgtgtgtgggcaaggcttcagctggaagagaagtctcaccagacaccactggcggatacactcaaaggagaagccttttgtttgccaggagtgtaagcgaggctataccagtaagtcagacctcactgtgcatgaaagaatacacacaggagagaggccttatgaatgccaagagtgtggacgaaagtttagcaataagtcatactacagtaagcacttaaagagacacttacgtgagaagcgtttttgtacagggagtgtgggtgaggcttcatcttgaagttatatctcaccatccatcagaggacacactcaggagagtaactttgctttgttacaagctttagttgaggctgcataacttgttcgtgaagatataacagaggcagacagaatccagagggctacagagaacctgaattcaacccatgtgtccccaagagattcagagaaaagaggtcaatgtttagggaacagagatgccagttgaggggagggcattacctgggctattggggaaatgtggtctctttcctactgagcacatattcttgttgtatttgtgccaggctgtgctttctaaggactgctcttagccagtgactgcagagcagggataccagggcaggcctgttacactctccccaacctccttggactgcaaacaatctaggacacctccatcaaacctcctcttgcactttccctctggcttccctcccagccttccttggtttggatgttttgtcccctccttaatttatgttgaaactctacataaactgtttactgttgaaacagtgtaagtattaggaggtgggacctttgggaagtggttaagtcaagtcacgaagatagagctttgcgaatgggatcaggtgcccttatgaaaaggcttgatagagggagtttgtcctgtggcccttctattttctgctctgtgaggacacaatgctcctcccttccaaaagatgcagcatgaaggcatcatcttggaaacagacatgagccctcaacagacaactgcacctactgatgttttgatgttgaacttcccagcctccagaactctgggaaaataaagtcctctttatacaaaaaaaaaaaaaaaaaaaa

SEQ ID NO: 62267 - DNA, 1354 bp, Homo Sapiens
ggggggggacgccgagggcggctgcgacgcgccgagaggccgcggctctcccacctgtcaccctggcccttctctgcttggatggtgtcttcctctcctcagccgagaatgacttcgtccaccggatccaggaggaactggaccgctttctgctgcagaagcagctgtcaaaggttcttcttttccccccactctccagtcgcctccggtacctgatccatagaacagcagagaattttgatctcttgagcagcttctccgttggggagggctggaagaggaggacggtcatctgtcaccaggacatcagggtacccagttcggatggcctctctggcccctgccgcgctcctgcctcctgcccccgcaggtaccacggtcctcggcccatctccaaccaaggagcagctgcggttccccgaggtgcccgggctggccggtggtatcgtggacgcaagcctgaccagcctttgtatgtgccccgggtgctgcgcaggcaggaagaatgggggctgacctctacctcggtgctcaagagagaggccccagctggcagggacccagaagagcctggagatgttggtgctggagaccccaactctgatcagggactccctgtgctgatgactcagggaacagaggacctaaagggcccaggacaaaggtgtgagaatgagccactgctggaccctgttggccctgagcctctggggcctgagagtcagtcagggaagggagacatggtggagatggccacacggtttgggtccaccctgcagctagacctggaaaaggggaaggagagtctgttggagaagaggctggtggcagaggaggaagaggacgaagaggaggtggaagaggatggccccagcagctgctcggaggacgattacagcgagctgctgcaggagatcacagacaacctgacgaagaaggagattcagatagagaagatccatttggacacatcctccttcgtggaggagctgcctggagagaaggaccttgcccacgtggtagagatctatgactttgaaccagcgctcaagacggaggacctgctggcaacgttttctgagttccaagagaaggggttcaggattcagtgggtggatgatacacacgcactcggcatctttccctgcctggcctcagctgcggaagccctgacccgggagttctcggcgctcaagatccggcccctcacacagggaaccaagcagtcaaagctcaaagccttgcagaggccaaaactcctgcgtctggtgaaggagaggccacagacaaatgcgactgtggcccggcggctggtggcccgggccctgggactccaacacaaaaaaaaaaaaaa

SEQ ID NO: 62268 - DNA, 494 bp, Homo Sapiens
cagaaaattcaactttattcactaggactgaaaacaaaggcttgtgcaatcaaaaggccaagttgagtgcaaggtggagcgtgctcggaaatcacagacctcacctgtggccaggccgggctggcagttgttgtttctggtgttttctgtgatttcccacattttatcacaaggccacaggcatcctccaaggtcagtgaggaagaccctattgctgtttgagccagagcctcctagagggtgggccgggagcaggcagctcccaggacacacagatgcacgatgtgattagcagtgaagccttctgtcccaggcgtgggcaggcgtcctcccttagctgcctgagcatgtgcggctgaagacatggcttttctagggttaggcactgtgcgtggtgccagccccagccctccctcacctggacgtgcccaggagggggcagcagagcaccgtggcaaagtctgtccacttgccgctccccgtcccgtgcagaa

SEQ ID NO: 62269 - DNA, 42896 bp, Homo Sapiens
ttctcattctagccctttccctttccactcctttcaattctgcctatgacccaacagtaaaatcatgtatttgtacagggccatactggttataaagctttaccttctacattttctcattcaaattttgaacctcatggcagacttacgagggcaggaggtacagttcccctgtcacagatgaggaaactgagacttggacagaaaacaggttccaaactccaggcagaaactctaacaaaaacaatgcattcaaaaacaatgcattcagcccaagggtgcagcctcaacgttgccaaaccgaacctgcctgacatcctgttgggcgggtaagaggcaggtgagggaaagacccagaagctagggggaggtattcgttggggtcatgtgggtagcccattaaaaatacggccacaggtccccttgccctgtgccctccctgtcccacacccacaggcttgccccgacccagtcccatgatcaccctggtcacatgctccctgtcaccagcttccaagtcatctgtgggagcaggaggtggacacaggattaggggtgggagactctggggtggccaggctgaggggaaggagggagcatgtcgggggcaggtctggaggcacgcgagagaggaaaggcaaggaaaaaaagcagggaggaaaggcaggagaagcagggagtgagaaatgagtagaggcaccacgaaaggtggagacggacgtgaagtggggaatcaagtgagcacttagaggagcacaggaaggaaaattaggacggccaatggggcctaaagaggcactgagggtcggggaaagagaagagatggattgactcgggaagttagggatactgagggagacacacggaggagactggggttcaggggagaaactcagggtcgaagctggggtccctggggtccacaagttcgagatgagacacgggcggtctcgggatgggaattggggacgcagggggatgaaaagatggaaggtgggggcactcagggagtcacataagggttaatggaggacatgcctcagaatcggagacacgaggaatatccaaaggagggtccggcggagacttgggagtccggagcgccgaggaagttggggaacggacccccaggccccgcccacccgcgaggtcactcacctcggcttactcagcacttctacttcctcctacttccgcaaacaaacgggcctcgggccacgtgatggcctgaccaccgctctccgccaatcactggtggccctgtcccaggcctcctctaggctccgcccccgcgcccgaggacggcgggaggcggggtccgccattttttttaactgcccaatggaaggggctcccttagccaggaggacgagctttcggcgggagccaatcctcggcggcgaggcgcggccatgtttgtgcggggcagaaggtgcccggcttcttggcagtcctgttgatgagggccaggagtcctaccctagtccgccttccgcctcctaaagcgaccagagcctggagtctgaagttactgttaatgattgctcgtaaagataaaaataaaggcaacagaggcatagggcataacaaggaggaacctgttttgatttttgccaggtagcctcaagccagggttgccagatgtagcatataaaaaatacgggatgttaagttacatttgaatttcagctaaacagccaatacatttttttccgatagaacagaaattgattatagcttttttatttttcacaactaaggccaaattccctaggggaattaccacatgtcctttttttttttttttttgagacaagtctcgctctgtcgaccatgctggagtgcagtggcacgatctcgctcactgcaacctccgcctcccggattcaagcgattctcctgcgtcagcctcccgcgtagctgagattgcaggcgcccgccactacgcccagctaattttttgtatttttagtagagacggggtttcaccatgttggccaggctggtctcgaactcctgacctcaagtgatctgcccgcctcagcctcccgaagtgctgggattacaggcgtgagccaccacgcccggctccgaaatttttaacataagtataatatactaagtttagtattgtgttaaaaatgtgtgcattgttgtctggcaacacaccctgagccagtctcaggaaataccttagcactttcagtaggaacttgggcaaatgatctctgtgaacctcagacccatcatccaggaagtgggcacagtaatacaagattgttgtaatatctagaagtaaattggtccccattcgtgcacatagtgggatttcaataaatggcagttgttagggttaataatgccgataatgaggtattttgcagagaagccaggagactagactttagtcacacatctgcttcggactgagcaggtcatgtcctctcttcagcccactggcttggttggaccttttctttccctaataatcacccaaccctaggtctagatgaatctgccagactgctctccatttacgtgggaagtatagttgcgggtgtcattcttgtgaaaagaagcgtgtaggccgggtgcggtggctcacgcctataatcccagcagtttgggaggctgaggcgggtggatcacttgaggtcaggagtttgagaccagcctgaccaacatggtgaaaccccatctctactaaaaatacaaataattagctgggtgtgctggccatagtctgtagtcccagctgctcaggaggctgaggcaggagaattgcttgaacccaggaggcagaggttgcagtgagccaagatcatgccactgtactccagcctgggtgacagagccagactctgtctcaaaaaaaaaaaaagtgtgtttcctccttagtccgtctaaagatattagtgcctagacagggcagccaatgcaacttgcgcaaggtttagttaagaatcttcacaggttaatgaaattaaccatcttaactaatatctgtacagagctttaccagttacaaagtgacttcacttccatcatatcctcgtgtccccattttacaggtgaggaaattgttccttaaagtaagatttaaaatttgcttaagagtttcagcttgactgcgcacagtggctcacgcctgtaatcccaacactttgggaggccgaggtgggcagatcacttgagctcaggagttcaagaccagcttgtgcaacatggagaaacctcgtctttaaaaaaaatacaaaaattatccaggtgtggtcttgcatgcctttggtcccagctactgtgcaggggaggccggggggtcaaggatgcagtgagccaagatcgcctgcactccagcctgggtgacagagcgagaccatgtctcaaaaaaaaaaaaaaaaaagtttcagcttgaagtggagagaaaaggataaagactcagaattctcaatgaaaatatcttgcctccacaccccaaacaagcaaagttagagcgatggttatcaaggagcttgcaaaaggccatgcattccacgcactgccaagcaatctttccttcctgagaaaacccacaggggcaacatgaggtgtcccattcttcaacaaacacccacccttgcattcaggattttgcaaagcacatttggaaatgcagatacacaggtgaatctaaaatgcagacaagggccaggtgtggtggctcatgcctataatcccaacactttaggaggctgaggcgggtggattacctgaggtcaggagttcgagaccattctgaccaacatggtgaaaccccgtctctacaaaaaaatacaaaaaaattagtcaggcgtggtggcaggcaactgtaatcccagctactggggaggctgaggcagaaaaatctcttgaacccaggaggtggaggttgcagtgagctgagatcacaccagtgccctccagcctaggcgacagagcaagaccccatctcaataaataaataaataataaaatgcagaaaaggccaagagaggctggatcaattgctggaaacagtcaaagatccacagaagacattcacaaaatagaatctcagtacctgatgaagttaagtatcccttccctaggtatttctggtggaaaccatttaatgagtagataaatcaaaagatggaatagaggggattattaggtagcattgaatgagcaagtaaagggatggggcaagtaagcacgagggagtgtgttctgtagtgctagcagatggagctgctagcagttaaagtcaaaagaacttctcctgaggtgttgtgctaggctcctcccatacatcagggagggcgtctgccctctaagagcccagagcacagagggtcagactagactaatcttttccttcaaggagctagatggaaatctaactaacatgctaacagtgcaatatcacaccttttacttttttttggagacagagtctccctctgtcacccaggctggagcgcagtggcgcgatcttggctcacggcaacctccacctcccaggttctaactgattctcctgcctcagcctcccgagtagctggaattacaggcgtgcactaccacgcctggctaatttttgtatttctaatagaaacgaggtttcaccaagttggccaggctggtctcaaactcctgacctcaggggatccacccgcctcagtctcccaaagtgctgggattacaggtgtgagccaccacccccagccgacttcttacttttttatccttgcaacagccctgtgatatagtactgccatccccactttgtagatgaagagaatgaggttccacaagggaaaattatccccagagttgccaatgagaggcagtgccagttgccagtgtcaacgagaggcagaaccagaatcagcacctgtcttgtcttttctctctccaaactctaggagcactcattatgtgccaggcagtgttcttggtgcacgtgtaatcccaggcactgaacaaaatggacaaaaatccctgcctttgtgctgctcacatcctggtggggaaagacggagaataaactagatagagaaggaaacagagagtgtgttttgctaatgtctttgagtgagggtgtcatcatgttagcatcttacattcaaagcaccttaactgtgggatctgggcatgtctatttgaatacctttgcactagtcctccaattatctgtgtgtttgaactttttctttctttctttcttttttttttttttttggagacagggtctggctctctcacccaggctggagtgcagtggggtgatcttggctgactgcaatctctgcctcctgggctcaagcgatcctcccatctcagtgtcctgagtagctgggactacaggttcaggccactatgctttttttttttttcggtagagtctgcttttcgccatgttgcctaggctggtctcgaactcctggcctcaagcaatctgcctgcctcagcctcccaaagtgctgggattataggcatgaaccactgttcttggcctgaacatttttataattaaaaagttggaggaagctgggcacagtggctcatgcctgtaatcccagcactttgggaggccgaggcgggcagatcacttgaggtcaggagttcaagaccagcctggccaacatggtgaaaccccgtctctactaaaaatacaaaaattagctgggcgtgacagctggcacctgtaatcccagctactcgggaggctgaggcaggagaatcgcttgaacccggaaggcagaggttgcaatgagccaagatcttgccactgcacgccagcttgggcaacagaaggagactctgcctcaaaacaaaacaaaacaaaacaaaacaaaaagttgggggaatatatagtgagttagagggtgaggaatgctggggagtaaacacaggaaggagagaccggggagggtcacagttttaactagatgggccaggaaaagcgttagaagggagataattaaataaagacctgatggaggcgaaggagtgagctatgtgcacaaccaggaaaagagtgttccagatggagcaagaacaaaggccctgaggcagaagcccgcctggcttgttttaagaggaaaagcaaagaggctattatagctttgttttggagtagagagccagtgggggtgtagtaggcaataacgttgaggttaaaaggatattgggagtagaacttgtaggacactggaaaccattttaagactttggctttcaatatcagggcaatagggaaccatgagaggtttttaagcagaggagtgaccagaatgaatttacactttaacagcttatgtctgttcagtgagaatagagtgtaagggaaggcagaggctgggagaccagtgaggaggctattgtagaaatccatggtcgggcatggtggctcatgcctataatcccaacactttgggaggctgaagcaggcagatcacgaggtcaggagttcaagaccagcctggccaagatggtgaaacccccgtctctactaaaaatacaaaaattagccaggcatggtggcgggcacgtgtaatcccagctactcgggaggctgaggcagagaattgcctgaacccgggaagcagagactgcagtgagccgaggtagtgccactgtactccagcctgggtgacagagtgagactccatctcaaaaaaaaagaaagaaagaaagaaagaaagaaaaagaaatccaggtgagagatgatggtctgaccaccagcccatttaatcatcacagctataggtacgttacagtccaagtttgtgttacgataaaatacgtaagccattgctagaaggcattgtcaaactccttcctgtgggaagctttgtgagattattcttgagcagcagtgggcaaactatcctgcctgccacctgtttctgtaaacaagtgttattggaacacagccacgccatttgtttacacacgtttctgctttctgcagtgggagaattgagtaatcatgacagatacctcatggcccacaaagcctggaatatttctctctggccctttacagaaaaaaaaatttacccaccactgatcttaaattggatgtcaaaggttaagtaggagtttgccggctggattaggaaagagaacattctaggtggaaagaactgtgtgagcaaaagtcaataccatgagattgtgtggattgtttggggaccggcaaggggttgagcactgctgaaacctggtgtgtgagcaggagaacagtccccagaggccatctagaaagagtctccccctaatcccagcactttgggagcacaaaacggctggctcgcttgagcccaggagttcaaaaccagcctgggcaacatagcgagactctcatctctacaaaaattttaaaaattagccaggcatggtggtgcatgcctgtagtcccagctacttcagaaggctggggcaggaggattgcttgagccccagcctcccaagggaagggaggttgtagtaagctatgattgtgccactgcactccagcctgggcaacttagtgagaccctgtctcaaaataagaaaaaaagggctggtgcggtggctcacgcctgtaatcccaacactttgggaggctaggcaggcagatcacttgaggtcagtagtttgtgaccagctgggcaacatggtgaaactcctgtatctactaaagctacaaaaaattagctgggcgtggtggcgggtgcctgtagtcccagctactctacttgggacgctgaggcacgagaatcgcctgaacccgggaggcggaggttacagtgagctgacatcatgccactgcactccagcctgggcaacagagcgagactccgtctcaaaaaatatatataaaagaaaaaaaaagaaagagttttgagttccaggccaaggatgcagaccttgtcccacaagcagtgggtgccctggaaggttggggccaggaagcaatgtggaaaaatccttctgctgccttgggagaggtgatgggagggtgcggagcccacacggcagctgtgcatgatgatgctaattacatggcttctgacttgctgagtgggacatcagggcttgtgccctccacaggagggaagtgggctcctcaggaggtgaccctgagctgtgaggcagcagccaagtgtgttcccatcccaagggcaaaagccaggcctggtcaggaagggcaggatttccctactctggggggacctcagcccagctcaggggttcacaggacagactgcgggctgaggagaagctggttctcaggaacagggaaccagggagcttcacaaggaagctggcttaaacctgagtcctgaaggatggtgaaggatggagaagggtggagagggatggagaggaatggatagggataatgagggatggagagggatggtgggggatggtgggggatggagagggatggagagggatggtgggggatggtgggggatggtgggggatggagagggatggtgagggatggtgagggatggtgagggatggtgggggatggagagggatggtgagggatggtgagggatggtgagggatggtgggggatggagagggatggagagggatggtgggggatggttagggatggtgagggatggtgaaggatggcgaaggacatgaggatttggagaggctgagcaggggtatttcaggcaaagatgcagggtgtgtgccaagcctctcacgatgggggaatctaatgtggagttcttgagggtcagagtgtgcaagctcttaatccctttgtcccttctcttgtgcttctcgtcctcatttatgttttgtcagccattaattatgaaatacctgctatgtgcatgaccttactctttttcttttcttttcttctttttgactcaaagtctcgctttgttgccaggctggagtgcagtggcgcgatctcagctcattgcaacctctgcctcctgggttcaagagattcccctgcctcagcctcctgagcagctgggactacaggcgcgtgccaccacacccggctaatttttgtatttttagtagagacggggtttcaccatgttggccaggatggtctcaatctcttgacctcatgatccgcccacctcggccttcaaagtgttgggattactggcatgagccaccatgcctggccggccttactcttagtatggtggggacactaaagacatctctattcttgtccttggggctcacaatttaatacaaacttgtctcagatatacagataatagtttattgtgaaaaagcactggaatataaaggcaaatatatttttccatatcatcgcatgttctatggtctgaatgtgtgtatcaccccaaaatactttttatttattttttattgttttgagatagagtcttgctccatcgccgaggccggagtacagtggcatgatctcggctctctgcaacctccacttcccgggttcgagcgattctcctgcctctgcctccccgagtagctggaattacaggcgcccaccaccaagcccagctaatttttgtatttttagtagagatggggtttcatcatgttggccaggctggtcttgaactcctgacctcaagctatctgcttacctcagcctctcaaagtgctgggattacaggggtgagccactgtgcccagcccctaccttttttttttttttttttgagacagagtcttgctttgtcacccaggctggagtgcagtggctcaaacgtggctcactgcaccctccatttcctgggcccaagcaatcctcccacctcagcctcccaagtagctggaaccacaggagagcaccaccacacctggttaatttaaaaaaattttttttgtagagatggggcttgctatgttgccccagctggtcttgaactcctgggctcaagcaatcctcctgccttggcctcccaaagtcctggtattacaggtgtgagccaccacacccagccctgataatcctcttttatgtcccaggggctcctgaaattctactgcaaatcacacattcatgagtaggctgaatcactgtgcccccaggatgcaatggtaatgaaacggaattgcagggatctccagagaatcaatccgtgtttggctgccctgccatagcgttacacagggcatgagggcaatcagtgatataaacacagtccccactgtcagggagccaaaggacattgtaggaccgaggtccccaacctttttggcaccagggactggttttgtggaagacagtttttccacggagccgggggatggtttgggaatgatccaagtccattacattgattgtgcattttacttctattattattacattgtaatacataatgaaataattatacaactcatcacaatgtagaatcagtgggagccctgagctggttttcctgcaactagatggtcccatctgggggtgatgggagacagtgacagatcatcaggcagacagatcatcatattctcataaggaatgcaaaacctagatccttcgcatgcgaagtcacaatagggtttgagctcctatgagaatccaatgccgccgctgatctgagagaaagtggagctcaggtggcaatgtgagtgagcaatgggcagcggctgtaaatatgctgtaaatatcgatgaagcttcactcgctcacccgcccgccgctcacctcctgccgtgcagccgagttcctaacaggccatcgacccagaccaggggttagggacccctgttcttagaaactaatgatactctcttccttcctccctgtctcgccacagcctgaccctcttgcttgagcctaggacaaggcccagtggaacaaggacaactcctccattcatcccattaacattcatcatgctcccagcgtaggcacggtggcctaggcagggcatggtggctcacgcctgtaatcccagtactttgggaagctgaggcaggcaaatcattgaggccaggagttcgaggccagcctagccaacagagtgaaaccccatctctactaaaataaaaaatacaaaaaaaaaaattaaccaggcgtggcgatgcacgcctgtcatcccagctacttgggcggctgaggcgtgagaatcgcgtgaactcaggaggcagaggttgcagtgagccgagatcacgacactgcactccagcctgggtgacagtgcaggactgtgtctcagaaaaaaagaaaagaagaaagaaaaacattgatcatgcttctgctatgtgccatggcccgggcaaagctctggagacacaaaaatgaaaggatgtaatcctggtcctcaaaaagcatgtgggttaagagaagacagccatgaagacacagaacaccgagtcagagaggaaagtgctatcatgagggatacactggtaggtttcctaccttgtacacaggaacctgagtcagcctggggatgatctgggaagcctgctgaacaaagtggcatctgagctggggactgaagcacaagccggggagggagttccaggaagaaggactgggaagattgaaagcacgaggcagtagaagagaatgatgggtatgaggacagagttcacggtggctgcagctgagaggaggtggtggaagcaggcagaggccagatcgaggaggcttatggaaagagtttacactttgtcctgacagcactggggagccatggaagggttgtgagcagagcagtagcctggccaagtttaggttttagaaagctctctctatcctctgcatggaggctagaggcagggggaccaggcagaaggctgctgcaattgtcctggagccaggtgctgtggcttgaacagaggccatggctgagggaagagagaggctggagagaagttaaggagatgagatcactgaagcctggtgacttgtttgctgtgggagggagggagagggtgaggtgagcatgatggcctggtttctctccagggtgactggggaggaggtggcatcatcaacctgttggagaaattaggtggggagggtggcgctaagctccactgagacaacgtggagttagacgtgccagggaagggcaggggaaaatacatgtcatccatgcagttgcttaagcagatctggtccatgagagacagctgggagcccaaaatagagatctgggagtcctcaacatcaggtggcacctgaaatcttgaggtagggataaggttccccagcaataagaaaagagggcaaaggctaaagctctgagcctcgctaagaattaagaggccaagatggagggccagggatgaaagctgaaaagataggagggaaatctgagctttagaaggcaaggggaggtaggcatgtggctgcatgcctgtaaccccagctattcgggaggctgagacgggaggatggctggagcccaggagttcaaggttacagtgagctatgatggcactactgcactccagcctgggcaagggagggagaccctgtctcaaaacaaagacaaaaacaccaaggagaaaacagtgtttccaaaaagaggggaagaataggccgggcacagtagctcatgcctgtaatcccagcactttgggaggccgaggtgggtggatcacctgaggtcaggagttcgagaccagcctggccaacatggtgaaaccctgtctctactagaaatacaaaaatgccgggtgcagtggctcacgcctgtaatcccaacactttgggaggctgaggcgggtggatcgtgaggtcaggagatcgagaccatcctggctaacacggtgaaaccccgtctctactaaaaatacaaaaaattagccgggcgtggtggcgggggcctgtagtcccagctacttgggaggctgaggcaagagaatggcgtgaacccaggaagcagaacttgctgagatcacgccactgcactccagcctgggtgacagagcgagactctgtctcaaaaaaaaaaaaaaaaattagctggtcgtggtggcaggcacctataattccagctactcaggaggctgaggcaggagaatcgcttgaacccaggacgcagagattgcagtgagccgagatggtgacactgcactccacccttgatgacaaagcaagactccatttcaaaaaaaaagaggaaaaaaattaaaaggaagggagattgcaacaccattgcatgctgtcaaaggtcaagacagattagggctaaaattggacctggatttagtaacaaagaggccactgggaccccggccagagtcccttcagaggtttcttgagggcagccctcagcccgtgagggattgggaatgagaggcagtgagaacccagaggcaatgagtggggatgacttgaggtttgcccacaaagggaagaaaaaacaagggtgggtgttagggtgagggtggagtgaaaggtggggttcaggggtggctgctagagatgacagccacttggagacatttcagtcccatctccagtgtggtggcaggtgcctgtagccccaactacttagaaggctgaggcaggagaatcacttgaacccaggaggcagaggttacagtgagctgagatcttgccactgcactccagcctgggcaacggggcgagactgtctcagtaaaaaaaaaaaaaaaaaatccagacgaccccagtacctactgttattattgtttatgaatctcgttgatgtgcctaagagctgtcatctcccaaaattctatgaagtatctgtatcacccccactttatagatgaggaaaccgaggctaggagggctgaagccatttgcttcagagggaggggatggggactggggtgtgggcatggggattctggaaggaggagaggtaggtttagggcaagacaaaggacagcctctgaagggactgggagggagagggaagggcaggtgcagagggtcgaggcagtgcctatcacatggcctctgcttcctctggaagtggcaggagagcaggttcgatggagatgaggatgaaggcctgcggatgaaggagaaaggcgagtactccagggattcctggcagctctgaggatctggctgtgactggagaagatgaccttgtcgtgaccgcagctgttgttgcagtggtggttgtggtcgcgatggtggcttctctccagaagccagagcagctggcatgcaggagtgaagtgcacggagcagcagtgccccagcgatggttttacaggcttggcacaaaaggactcagaccagggctggcacatctccaggtatattgaagctgctgggggtggggaggggggggaggttttagagggaaaatgatggagggctggggaaaaatggagcatgtgcagtactgtttcaggttcctaaaatatcagtttgcaaacataaaaatgtattctctaaaataggcaaagcacacgaacaaaagaagaaaaaacccaactggttaacaagcaaatgggaatgtgttcaagctcattcctattcagagaaatgcaaatttaaatacaataacgtcatttgcctaggaaattagcagagcttagacaatgaaaactcccagtgttggtgaagtggagacgaaaggttcatattcacatgtgggtgggaagggcccttagcaaatggcttcagccctcctagcctcggtttcctcatctataaagtggggatgatacagatacttcatagaattttgtgagatgacagctcttaggcacataaatgtgattcataagcaataatacgcctgtagtcccagctacttgggaggctgaggcaggagaatggcgggaacccgggaggtggagcttgcagtgagccgagatcgggccactgccctccagcctgggtgacagagcaagactccgtctcaaaacaaaaacagtaacagtaggtactggggttgcttggatttatttttatttttattttttgagacagtcttgctctgtcgcccaggctggagtgcagtggtgagatctcagctcactgcaacctccgcctcctgggttcaagcgattctcctgccttaacctccggagtagctggggctacaggcgcatgccaccacactgggctaattgttgtattttttagtagagacgagagtttcaccatgttggccaggctggtctcgaactcctggcctcaagtgatccaccttggcctcccaacatgctgggattacaggcatgagccactgcgcccggcccaattgtttgggtttgctcaaaccttttttctctctgctgaacaatcacatctccagcccagactcaggacccttgtatttgcagaaagtggccctggtcaagagtcaccctctgccaggccctgcccggtttgccttaggattgacaaagtagagggaagggaagaggaggaagaaggggaggagggcacaaggttcctccaggatcccacccgggggtgcccacgcggagaaatggcgtgtgctctaattatcgtcagactctgaagtggcccacgtgaaatatcgaatctctccagaacaaaacccagcaaatcattccggcgggggcagcaggagagagcgcagccctcgagtcggaccagcctgagtttaagtccttctctgccagggactagctgtgcaatactgggcaagattcctcacctgccacggtctcgatttcctcatctgcaacatggccatgataatagctaagtgctaagacatggagaggattgagtgtgacctgatacacgggagcaccacacctggcatccagggtgtggtcccttggcctctgggcgaactgatcactctgtccatttcctctgcttttgacaccagggaccatttcgtagaagacaacttttccacagatgagggtggggtgggggtggagagtggggagtgtgggtgggggatggtttcgggatgaaactgttccagtggccaggcgcggtggctcacgcctgtaatcccagcactttgggaggctgagcggggcagatcacctgaggtcaggagtttgagaccagcctggccaacatggtgaaaccccgtctctactaaaaatacaaaaattagatgggcgtggtggcgcgtgcctgtagtcccagctacttgggggaggctgaggtgggagaatcagttgaacccaaaaggcggaggttgcagtgagccaagatggctacactgcactccagcctgggggatagagcgagactctctccaaaaaaaaaaaaaaaaaaagaaactgttccacctcaggtcatcaggcatatctggccgtagttagattctcacaaggagcacacaacctggatccctcaaaagcgcagttcacaatagggttcacgctcctaatgagactccaatgccagtgctgatcctacaggaggcggagctcaggcggtgacgctcactcagcccgctggttcctaacaggccacggacaaacagtactggtcctcagcctgcgatttggggacccctgctgtagaggactcctctctctaacctgatattattgatcttttattatatactaagcgctgtgccagaggcttataagtgcaaacacattatgttgtttcacagcctgcaaaggaggcactattagcccggtttatagagggtggagatgacgtcagctgatgaggcgtggggccaggatctgaacccgacaggctgacttgagagtccctactttcaaaaaacaattttttttttgagacagtctcgctctgtcgcccaggctggagtgcaatggcgtgatctcggctcactgcaacctctgcctcccaggttcaagcaattctcctgcctcagcctcctgagtagctaggattataggcatgtgccacaactcccgactaatttttttttttttaattaagtagagacagggttttgcatgttggccaggctggtctcaaactcctgacctcaagtgatctgcctgccttggcgtcccaacgtgctgggattacactgcgcctggccaaattttcttttcttataaggacactggtcagattggattagggcctaccgtatatattttaatttacttatgccttttaaaactttatctccaaatacagtcacattctgagatttttaggcattaggacttcaacatacacattttaacattatgaaattccacccataacactatctatctatatgtattattttcagaaccatgtcagagtaaattgcaaacatgatgccttttacctctaaatactctagtgggccaggcacggtggctcacacctgtaatcccagctcttcaggaggccgaggcagacagatgacctgaggtcaggagttcaagactagcctggccaacatggtgaaacccccgtctctacaaaaatacaaaatttagccgggcatgatggtgggtgcctgtaatcccagctactcaggaggctgaggcaggagaatcacttgaacccaggaggcagaggttgcagtgagccaaggtcgcaccattgcactccagcctgggtgacagagcaagactccatctcaaaaaaataaataaataaataaataaataaatactccagtgtatatttcctaaaatcaaggacacattctcttctatgaccacaggacaagcattgaagccaggaagttgggcatccatgcagtaattacctcatctacaaactccgtggcaatttgccccttactggtgatattaactttgatcacttagcgaaggttgtgtctgccaaatttctccactgcagagttattatttttccttccataattaattatcatcttgtgggtaaataacttgaaactatgtaaatactttctcatcaagctttcatatccattggtgattcttgctgcaacccatgattactatggtggctgcctgatggtcatttcttttttttttttcttcctcttctttttttaatagagacaagatttcgccatattgcccaggctggtctcaaactccgggctcaagtgatcctcctgcctcggtctcccaaagtgctgagaatacaggtgcgagccaccatgcccagcctgagctcccacttttaaataggacattgcaccatggcccttgatcttgaccagaaagggagctatgtctatgggaagcagtccctgcagggtggataatgaggcactgacccccttgttctggcaggctggggatgggagtaaaggatctaggcagcatggtgtccaggagtgttgttcaggtccactgagaattcactcactagctgagcacctacagtgttccaggtgtggccccagctcttgagaagctcataaaaaagggagtagattgggaggctgaggcagaaggaaggcttgaggccaagggttcaagatcaacctatgcaatatggtgagacctccatctctgcaaaaaatagaaaaattatccaggcacagtgatgcacacttgtagtcccaactactcgggaggctgaggtgagaggatcgcttgagcccagaagttcaaggctgcagtgagctatgatcatgccactgcactccagcctgggcaacagggcaagaccctgttttgttttgttttggttttggttttaaagggggtggggggtagagaaaatagacaactcaccattgtgcagtttctaaaactgagaactttcctaccccaaaggttaacctaggtggctctttctgctatgcacatggagaggactgagcaattggtttttagagatccttttgagtgctagacaaagctgcctcaacatttggtcacttgggaaactagtgggccaatttgcataccaaacccacagcctgtgggagggaacggaaagaagccatagtgtctggtggaccaaggcacagaggcaggaaagcaagacaagggcgctgaaatcgaatttgctacatcaaggaaagtggggggctgggcgcggtggctcacgcgtgtaatcccagcactttgggaggccgaggcgggtggatcacgaggtcaggagatcgacaccacggtgaaaccccgtctctactaaaaatacaaaaaaaaaaaattaggagggcgcggtggcgggcgcctgtagtcccagctactcgggaggctgaggctggagaatggcgtgaacccgggaggtggagcttgcagtgagctgagatcgcgccactgcactccagcctggggcaacacagcgagactccggctcaaaaaaaaaaaaaaaaaaaggaaagtggggatccttactggtgatcagggtgccacatagaggcctacccatttggagaggccctatgccctccacagtggagtaagtgccatgatgtcggcttcacaggagggactgtgggagcgatggaatttcaggcagtgggaacatcatgagcaaaggaaagcaggggatgaacagcaacatccaccccgcacgtggcctccaaagccatctcttttgggtggggcttcccaccacggcgcacacccctcatgtttatgtggccctcctcccctggttgcgatgtacccccaaacatctgggccaggaatcattcagacctggataccaattccagtgcttgtacttcctagctgagtgaatttagaaagtcaccttcacctctctgagcctccagtcatgtattccttcaacatgtatttactgtgggcctactatgtgccaagcactactccaggcactgggcaggcagtggtgaacaagataagcctggccaggcgcagtggctcatgtctgcaatcccaacactttgggaggccgaggtgggtggcctgaggtcaggggttcaaaaccagcctggctgggcatggtgactcacctgtagtccagctactggggggctgaattccttgaacctgggaggcggaggttgcagtgagccaagattatgccactgcactccagcctgggcaacagagtgagactctgtctcaaaaaaaaaaaaagaaaaagaaaaagaagcaaggcctgccttcataaaacatacattctggttggggaagacagacaataaccagcactcacatacataaatgatgaaacaccctacagaagtattaagataatataagaacaaatttcaaggctgggtgcggtggcttgcgcctgtaatcccattactttgggaggccagcgtgggtggattgcctgagtccaggagtttgagaccagtttgggcaacatggcaaaaccctgtctctacaaaaaaaaaaaaaaaaaaaaaaaaaaaaaaatacaaaaaatgaacctagcatggtggtgtgtgcttatggtcccagctacttgggaggctaaggtgggagaatggctggagtccaggagaaggaggttgcagtgagccgagattgtgccactgcactccagcctgggtgacagagtgagaccctgtctcgaaaaaaaaaaaaaaattcagaggtgaagactgctttaaccagggtggtcaggaaatgtctctctgaggcagtgacatccgggctgacgtgaaagatgagaaagagtcaggcaagtgaacagaagaccagacagccagtgccaagggcctgtcgcaggaatgagcttggtatgtttgggggacagaaagaagggcactgtggccgaagagcagtggatgaggagagagtggccaaagaaggtgtgtaaacaacctgagctttgttttgagaagaacattggctggtatagaaagaaagactttggaggcaaagtagggagcctcggaggctgctgccattgtccgggtaagctgatggtgccgagaccaggtgccatgactggaggtggtgagaaatggtcctatgcaggagacctggagacaccgctagcttgagtcctgaggtggggaggaagggagagggagggatggagccaggctccaaggttttggcttgagcagctgagatggggtggcaagggagcagaggtagggctgacgatcaggagcgggtttttgggccgagtcctctgcagtgcccatctgacacccactggatgcgcagagtgggcagctggctatgagtctggaactcagagaagctgttcgctccggaaatacaaacctggggctcatagccatataaatgtcatttaaagccacgggactggatgagatcattaaggcagaaggtctaggtcgaaagaagagggccaggaccactacctgtaaaatgagccaatgacacctacacccacggggctctcgcgaggtgtcacgtgaacgcacccagcgagccctggaaccaggcagagaatcgcggcagccccgggggcggggcttccagggggcggggtcatacgggggcggggccgagggaccaagcggccgctcctggccggagggcggccgggtcggtgacgtcaccgcatgactgggtttttatgaatgaaaggaatcctgtgagtgagtaattccgggaagctcgccttacaactccgcgcggcctcggccccctgcgccgcccgccccacaacaaaactcagcgcagcgctcccgggcgcccggttcagagcgacctgcggctcagagcggaggggagactgaccggagcgcggatcgggacagcggccgggacagcggcgagacgcgcgtgtgtgagcgcgccggaccaagcgggcccagaagcgggtgaggaacgcgggaccaggaggacggtgcgcgggaccccaaggcggcagggtttctgcgtcccgggatgcgcctggggtgggcgcccgggcccgatccgtcggggctcccggagctccatcgcccggacggctcggggcggggagaagggagcggccgtcccggggacgccgaggacggggccgaggccagctcgggggagtgggggtggagacggggccccttcccggggcgcgggcgggtaggcggcggcgccgggaggaaggggcagcgcaggccggcgatctccgcgtccgcccggcgggggcgggggcgctgtgctcctacgtgactcggtgggaacaggccctggcccggcgcccgcgggcggtgcgtgcgcggtttgtttacgtccgagggcgggcgtgtgttccctggcgggcggcctgggtatcctgcccggtgcgtgcgtgcgctgtgtacctcgggggcgtgtgtgcgtgtgttgtgcttgtgtgtgcgtgtccgcgcgcgcgctccctggggcctgtacaccagcagtgtgtacctcggagagggcgtgccctgggccggccaccggagtaaacgcggaacaaggacccgagcgaaggaagcggacccgtgcgtcttcgcacggggtctgggaattctggcccgggccgccccagtcctactacccggggctgtccgtccccggctctccccggagtttcccagggcctccgccacgtgaccccagtgtttgtctcccgcccagagcccgcgcccgcagccacagggtggggcaaggtatcaaagaccccacccagctgagctaggagtgagggatgtgagccacccccgcttggcaccccggtggatctggtaacaaagtgagttggagcccaggttcttgtccccagattttggggcttcctggggagggaagaaccaagggactctcgttcgtccccagggttgcccatcccctcagtcccatgagaacaggaagggccagaaaaccttgactgcaagggtgcggcgcagggagaggaccacaggcttttagctagtccgggttctggaggctgtacctgctaggtcgtggaggatggggcggagccggtttccgctctcctggtagtttcagttcacaagtgggactggtgagactagactgacctacagctggacgccggaagctagctgaggctctgagccagccgacagaccccgagtgccctcaccctgggccaggcagggtcagtaggcattggggatagaactctgactgcacggagggttaatgagtgaggggtggggcctgacctagccgccacccacccactcacccaatagccctgcagaaagcacctgtttgtcgtagccgcctgcaggatgggctgggggctagagattccttggtcttaatccaccttccccctccacccacccacccacggtctatggaattgtgggaggggagcaattgaacttgctagggtgaggaaccaatgatcttttgactttggatctttgaaccctgggtgagctctgctacagcagcccggaccctcagtattcccatctaccactgggaactaggtaacagccaggatggcaggatggtgggtagaagggggaagctctggaagtctgtgcagacagcgtattttccaggtgaattgtggaagagaaagcagggctgacagccccatgccaggagctgggggtacccaagagtaggtggggtttgagtcaggagggttggggccaggagcacaggaaccagacaggcccaccctcaaagctgggcaggaaacattacaaagtagggcctggggtcaggggatgaggggaagtggctggttgactcagtcccagatggaaagttagcactgagaagtttaacttcccattgaatcacccctgggccctgcattgccattgggcccttgtcctggaccagatgccagggatgagatgaacagaccagatccagagactgccctctgggagcttatagctcagcagcggacacaaacttgaaaaaagatccacagaagtaaatgcaaaacacagcttagatgggtgatgtgagggagaagtcactgtggtttgaaagtacataacagcgctctgacttagccagggcaatcaaggaaggcttccctggggaggtgactagtgtgctgagtctgatagagtggtggttgtctgtgaagcccttgaaggcaggagctgtgattcacttcagggtctccagggcccagcacagagcctggaacatagtaggtgcttcttggatgtttgctgattgaatgaatgagccctggatccctgccctctaagagctccacaacacatggagaaaaaggcctgggaaccccagagaaacaggaagccagggcaggggctgggggaatcttgaagcagtctcccaaaagcgagcaaatccttcaggactcaggcaacttcctccctcacacacacaggcatgcactgcccgcttgtccctttgggaaacattcagggatagtagaatttgctgtctgttcattcatctgttagcatacgatcctgggagagagtggacaggaatacggttgaggcctgaggaccctactgtgttggcttgcggggaggctggcattgcagggttttgaaatgggccaagcacggacaggctcgtgggtttgtgtcagtagtgattcctctgacagctcttgggggaggatcaatgatggggattggagacggagggcaaggcaagaggctggtgagcaggcggttgtggtcatggtccagatgaaggaggaagtggtctgtggctgtgcaggtggagaagagggctagtctgatagtctgatagtttgtgtctcatgcccccacctccaggaagccttcaccgctttcctttccctacctccattctgctggtggtcttggagctctgggccagaatctgaaactctaaactcagagacagtcattgttggaaggtaccttaggctcggaggacgtttggcatagtgggaaaactgaggcccagagagagggagtgccgtacctgaggccacacagcgagtgtgagagggtacctgaactggggctggaaccccaggccgttgcttctctgtggtgcttggttcttccagccttgctccccttccagcagggaggaggctccagcagtgctgactgccaagagctaggaaaacacattttttccctgtcctcacagagcgagcagaatggctcagcagccagaaaggagcccatgccagcgggtgggccttctacaggatgtctctggagtggactggtggggccagggagggggacgttggagggttgtggctgctgactggacaaggcagttgtcagtccctcaagagtcacctctctccttatgcctccagaagacgtcatgaacctgcagaccctggaggtcagctctgctggcttccaagggaagaagccagggagaggtggtggtggccgacatagaagacagaggacccctgggttccagtccgccacggctaccaaacagtggcttggttgcctcaggtgctgaacaggggatcggatcagctactatttctcaggcccagggtcagccagcctggcaaaggcagaggacccaggccccttggcagcccctggcctggggttggcagcggaaagcctgaggttaccagaaagttcccccttcttgtgactttccccctgtgattgcctgactgctgagctaggacattcctgggcaaacgtgggtgcctcagctgacatccaggatgcggttgagggggctgaggctcggacaggagggcatggaggagtgggggaagagcaggttcaaaaccttcctagcacctgagggtatttacaatcacagccagcttccgctattatcaaggatagggaatggctgatggttccatctctcaggcctggtctggaggcagtgttgaggattctaggctgtgtccaagctcaggagaaaacagttctgtgctgagaaagactcaggggctgtggcctgcctcactgggaattggtgctgtgtgtggttagtgatgtctctgttgcttgtggatagtgggatgatggtgagatgaggtgatctttcttgcctatgcctcctttttttttttttttttttttgatggagtctcgctctgttgcccaggctggagtccagtggcttgttctcagctcactgaaacctccacctcccgggttcatgcaattcttctgcctcagcctcccaagtagctgggactataggtgtgcgccaccacacctggctaatttttgcatttttttttttctttagtagagacaggatttcaccatgttggccaggccgttcttgaactcctggcctcagatgatctgcccaccttggcctcccaaagtgctgggattacaggcgtgagccaccacgcctggccttgcctaagcctttatattttacacaccaagattattgtgattattcccacttagcaaggaatccaggactcaggaaaaatgacttgtgcatgaggccagactgtgcctctgaggttctgtatcagccgcaacacccaaagggcagttgattaacttgcgtggggagaggcttcccttctcccattgggtctttctgtgtagctcaggtggccaagcatcactgcacgtgccagctccccaaacggctggtaagggggcctggatacttaactgtaacttgcaaatcgtatccctagcgggcccaacacaaatcctggagaatcagagctggggtggccttggaaactggcaagtccagcttcatcttcacagggctagggaaacagggcccagggaggtcgccctgccagggccacacagggaggaggtgtgtggctccatgtggcctcaggcctgaattctattattattattattattatttttgagatggagtcttgctctgtcacccaggctggagtgcagtcgcgtaatctcggctcactgcaacctctgcctcccaggttctaagcgattctcctgcctcagcctcctgagtagttgggactacaggtgtgtgccaccaggcccagctaattttttgtatttttagtacagacagggtttcactgtgttagccatgatggtctcagtctcctgacctcatgatccgcccacctcggcctcccaaagtgctgggattacaggcatgagccaccttgcttggccatctttttttttttttttttttttttttttttttttttgagacagagtctcgctctgtcacccaggctggagtgcagtggcgcgatctcagctcactgcaagctccatctccgggttcacgccattctcctgcctcagcctccccagtagctgggactacaggcgcccaccaccacacccggctaattttttttttaagaggcggggtcttgctttgtcacccagggagtgcagtggcgggatcacagctcactgccgccttgaattcctgggctcaatggttcctcctgcctcagcctcctgagtagctggggctataggtgtgcaccactgcacccggctaatctttttattttttggagatggagtctagccatcttgcccaggttggtcttgaactctcaggcctgaattctaccccatgctggctgtatgagcctggactactctattgtcctctctgggcattacctcagggttgggcgaaccagggaggtgacggtgtgaagggaccaggtttcagtcctgggcctttgcagctattcattcacacctattgtgtgacttcaggcaagtgctgcccctctctgggtctctacctccccttgggtaaagggaggaggcaggacctgatggcctctaagggcctttcctgcagttccctgtgtgaccccagccagctgggagatgctaaatcagagcgagaccccagtgctggctacaggcctgacccctcctggacagacagcaattctaacctcccagctgctcactgacctctacagtgtataccacttgattccaccaaaaccctgcgaggcaggtattgttccgatcctttagatgggaaagtggagacccagagagatggagtggctcaccccaggtcacacagcctgagaaaacagagatgcgacttaaacccaagcttgactcccaatccagtgctcctttccctgtttcccacaccccacctttgggcccaaagtcacgtggatgggatcccctctgctctcttcccattcgcctagcatctgtactgtctctgccaacaggcccaaggaagcagctggagaggaggaagaattagagacagggccaggaggtactgaactacgtttcggcttggaacccggcttggtgacaagctgggtgatggcgtcagagactctgaccatccacccttccccagtgcctgctccctgccaggtcttgagatgggtggcctcaagcacccagagctgactcagcctctccctgtctggtggagagacagcaaggaaatacaacccattacacacaggggtgggggtccctaacaagtcctagggatcagggagggcttcctggaggaggagatgtctgcacccagggccgaaggatgagtaggagtctgccaaacaaagtagaggggagtgaggggagagaaatatcatggggtgggaggtggctcagaggcaagaaagcgcgggtgggaggaagtgaaagaaattctgtgtggctggagcacagagtggaggtggcagtggtgggaaatgggcgtggggctggacacacagggcctggggtgctgggagggtgggtctggactccatccttaggatagtagggaaccatggaaggttttttttttgtttgcttgtttgtttttgtgtttgtttttgagatggagtatcactctgtcgcccaggctggagtgcagtgtcgcgatctcggctcactgcatgcttcacctcccgggttcacgccattctcctgcctcagcctcctgatagctgggactacaggtgcctgccaccacacccggctaattttttgtattttttagtagagacggggtttcaccatgttagccaggatggtctcaatctccttaccttgtgatccgcccgcctcagcctcctaaagtgctgggattataggcatgagccaccttgcccagccgaaccatggaaggctttaatctggctggtggcatggtcagattcgcgtggtgcaaagattgtccagctgctgtgtgggaatgagctgagaccagcagggaggtgtgctgggacctccccaggtgtgtgtagggtggtgagggtgaccacttaagaggcctgcattgggttgggcgtggtggctcacacctgtaatcccggcacttcaggaggccgaggcaggtggatcacctgaggttaggagttcgagaccagcctgaccaatatggtgaaactctgtctctactaaaaatacaaaaattagctgggcgtggtggtaggcgcctgtagtcccagctattcaggaggctgaggcagagctaatcgcttgaacccaggaggcggaggttgcagtgagctgagatcctgtcactgcactccagcctgggcgacagagcgagactccatctcaaaaaaaaaaaaaaaaaaaaaagggaaaaaaaaaaggcctgcattgaaaggtaggatcggtgaggttgacatgtaaacgtctccagatagtatctgaaaggtcagggtagccagcagatctcatatgacttttccaggtaggatgggagtgcacagaggcccccaaggagagctaggtgggcagccagggcctgagccccctaggatttggagtgctaggcagggaaactgaggccagagcccaggctaagccggcatgttcagcagtggggggtcgcagctcaggggtcaccccatgaagccactggtcttcaccgtggatccgcacaggggtctaaagctgcctgggtcctgacctggcactctgggtccacccagctacccccagcgaaacctgggtgacccctaagactctcctgcttaagggccacagtggctgcccctgtcaggggatctctgcaagcgccaacttccttctgtcccactccttccttccctgtgagctgccagaccccctgactgtgtgggctgggaggagctggggagtttcctgagaagccctggactgtccccaccttggcctgagtcacactgagaactcagcaaggattccttgagtatctgcgaggtgccaggcgcggttctaggcatgggggaggccgcggtgaatcaggtataagttctgccctcatggagctggcattctaatcggggggttgggagggacagacactgaacaaataaccaccatatatgtgagtgatgacaattacacatggggaaacctgaggtggggaagggacacagggagtgtgtgtgtgtgtgtgtgtgtgtgtgtgtgtgtgtgtccgtgtgtgtatcaggggttgcaaattctaaactgagtgaacatgagatttgaagagacctcaggaggtgatggagcaaactttgtggatatctagggaacaaggatgccaacagaggccatgcgtcgtggctcatgcctataatcccaacactttgggaggcggaggcaggcggatcgcttgagccaaggagttcaagaccagcctgggcaacatgatgaaactctgtctgtacaaaaagtacaaaaattggccaggtgtggtggcatgcacctatagttccagctactagggaggctgaggtaggaggaccacttgagcctgggagtttgaggctgcaatgagctgtgatcgtgtcactgcactccagcctgtaacggagtgagtgagaccctgtataaaaaacaaaaacaaaaacaaaaacgccagcagagggaccagccagtgcaaaggccctggagaggagcgtgcatcctgtgttgaggaagggcgggtgtggctgaggcaggggaaacaaaaggaagccaagtagggctgaggttggagaagggatgctggggagcactttcttttttttttttttttcagacggagtctcactctcgcccaggctggagtgcagtggcacaatcttggctcactgcaacctccgcctcccgggttcaagcgattcttttgtctcagcctcccaagtagctgggactacaggcacgtgccaccacgcccggctaattttcgtatttttagtagagacggggtttcaccatgttggccaggctggtctcgatctcctgacctcatgatccacccgccttggcctcccaaagtgctgggattacaggcgtgagccaccgcgcccggccactggggatcactttctgcagcactttgtgggccatggtgacaactctggctttactccagtgagccgtgggaaggtcctgagagaggtgtgacatgagctgacttaacacagctacctgtgtcacccagggggaaagtgaggcacagaaagagtggctgacctatcagaaccacacaactagagagcgagaccacccccaaaaggccccaggtgtgtctggcaccaaggtccatgtgctttccatttctgcaccttgtccctgggagacaccccggtcctgccagaatgtgtcagaggctgagccaacccgtgaggtcaaccctgtagacagctcaaggaaccaggacttggatctggcttttgccctctgctgtccacaaaactgggtgatgctctttccgatacggtacgtgtttataggatgctacagctcagatcacaaagcatcttcctttgttttctttttatttatttattttttttgagatggagtctcactctgtcacccaggctcccaggctggagtgcagtggcgcaatctcggctcactgtaacctccacctcccaggtttaagcaattctcctgcctcagcctctcaaatagctgggactacaggcatgcaccaccacgcctgggctaatttttgtgtttttggtagagacagggttttgccatgttggccaggctggtcttgaactcctgaactgaggtgatctgcccgtctcagcctcctaaagtgctgggattacaggcgtgagccaccgcgcccagcctatcttcctttattttccttggcttcttatcactgccccctccccttggagacagatgagaaaactcaggttctcatggcggagaacctgagaggattggcaaagtagatcctatcagctagagacagagaggactgctgctttaaaggggactttgggagatggtccccttctccagcccagagcaatgaccactgaccctccacgagttttattcacctttttctccccattaccaagtacatgtttggcaaagagctcaataaatagttgttgaaggagcatgtggctgtcaggcctgtgggagggaggattaggagatgagaggccctcattggtctagggatggctgccccatctgcctagggcatgctgagttagtatggggcagcccccaggaggttgggaaaactttcccaaaacagaggtctagatgaaggaggcctggggagagaggggactggctgatgttgtatcttacggggtgctggatgggctttgtgtaaaggcatttactggtgcacatatgctgtgtgtacttttctgtatgtaggttatactttaagaaaagttctgaaaaattggctgggcacagtggctcacacctgtccagcactttgggaggctgaggcgggtggatcacctgaggtcagtagttcaaaaccagcctggccaacatggcgaaaccctgtctctaaaaataaaaataaactaaaaatacaaaaaattagctgggcgtggtgacaggcacctgtaatcccagctacttgggaggctgaggcaggagaatcccttgaacacgggaggcggaggttgcagtgagccaagatcgcgcccctgcactccagcctgggtgacagagtgagactctgtctcaaaaaaaaaaaaaaaaaaaaaaaaagaaagaaagaaaaagagaaagaaaagttctgaaaaatcaaatcaaaggcacatgtccaagccccatgtggaagaatggtcaggagaggcacatctattcatttggtgcacacttactgagccatctactatataccaggcactgatttaggcatattgatgccgtggtgagacagggaaggcctctgccttcattggcttccgttttggtggaggaggagtgggaaggagaaacaaatcatagatgaggaaccaagcatgagaaatgcagaagaggtgactgttacaagggttaataggcggggttatgtgatgtgacacagaggcgtttagccagaatggtcaaagaggacctcctgaggaggtgacattgggcaaagacctaaatgatgaggagtcaccatggggctagaacagtaaagagcacagcctgtgcacagctcccgcggctggaaggagccattcaaggaggcctgtggaccaatgtggagagaggaaggtggcaggtatgaatcagttctaagatagcagaggccttgaatggcaaggtagtgagtttggattttattctaaatgggaaaccaaaaacaaaacagtgactttgacctcctttctaccctaggtctgcagcccagagggcaccttctgcaaacatgtctgtggatcccctatccagcaaagctctaaaggtgaggaggcagcctctgtcaacccagtgaagccctccctccctgcccatgcagagcctcctcatcccaacttccccttctttcctggaatcccctgggtggctcagcaggcaccaggccttcatgatgccaaagggaagggccacagccatgggctgggaccaggaggcctgggctctggtcacaggctgcatgtccctggggtaggtcacttccctctccaggcctccttccccatcgggtcaatgtcccctggggcattcaaaggtgctttccgacctgggtttctctggctgagtccagggcttggcgctaggttagaattcaggctgagccccggggtggcctccttttgtgtcccgatcctagtctggcccggtttccccttcccggattcctgctccccttcggggttttggatcaagtccacccaccacctcggcggctaaggcggtgaaagaggaacaccgcgggtggagcgggggggcccgtccccagtcccctggacctcagtttcctcatgcccgcagatcaagcgagagctgagcgagaacacgccgcacctgtcggacgaggcgctgatggggctgtcggtgcgcgagctgaaccggcatctgcgcgggctctccgccgaggaggtgacacggctcaagcagcggcgccgcacactcaaaaaccgtggctacgccgccagctgccgcgtgaagcgcgtgtgccagaaggaggagctgcagaagcagaagtcggagctggagcgcgaggtggacaagctggcgcgcgagaacgccgccatgcgcctggagctcgacgcgctgcgcggcaagtgcgaggcgctgcagggcttcgcgcgctccgtggccgccgcccgcgggcccgccacgctcgtggcgccggccagcgtcatcaccatcgtcaagtccaccccgggctcggggtctggccccgcccacggcccggaccccgcccacggcccggcctcctgctcctagtgcccgcccccgccatgcctcagccacgcccctccggcctcagctccctccccaaagtgcctgagcgccgcctctgtgcccaggtcccatttctctgcagcactggccccttggtgcacacacattcccttcgtgggccctgtcttcctcttgcagccccccaaactgggaccgaatgaccctgggaaggggaacttgggtaggttggggatggggcagaggtctggatctgggatcgcccttggctgaaagtttagcctttttagattgagagatacagagccggcttagagaacagctgttgggggagaagagggcacccctcatcttggaaactgctcttattgtgccaatatgccctccaaaccctcccaggattcaaagctaggtttggctgtctgtgacttacgggaccgtcctgctgagaaattgcactgaagagatgcccccacctctggttgggcctgggggtgcctggccttccgaaactaaaagagtgggtgggaagactagtgaaacccagttcacggatggggaaacaggcctgaggtcacatttcacttagtggttgtgttgggaccaaaacctgggtgtcctcactgctgccctgagtccagccatggttttcagggggacagtggacagggactcagaaatgtggtgggagggcctccctggcttgggagaccgctctctgcaagggagggggagagaagcagagggagagagaaggtgacacggatggaagagtgggaaggagctggcctggctcagccctaggctgtccctgcagccagggtgtccgggggctggccagtcagagaaagggggccatggactgctgtggcaaatagggagacaaggagacagaccctgcagtcctactacagtctggagtggggtcctaagaagaagggtcccacctcaacccctgtcagtgtccactgtggggtgggggctgacccctgcctttgattgtcattctcctgggaagcccagtctcagtccctcccccaacactgtccacactgcccctccccactgtttatttattgcacggatctaagttattctccccagccagagcccgagctcctgctccctgggaaaagtggcgtatggccctgagctgggctttatattttatatctgcaaataaatcacattttatcttatatttagggaaagccggagagcaacaacaaaaaatgtttaagccgggcgcggtggctcacatctgtaatcccagcactttgggagtccaaggagggggatcgcttgagtccaggagtttgagaccagcctggacaacatggtgaaaccccatctctacaaaaaatacaaaaattagccatgcatggtggctcatgcctgtagtcccagctacttgggaggctgaggcaggaggatcacttaagcccagaaggcagaggttgtagtgagctgagatcgcaccactgcactccagcctgggcaacatagcaaaatcctgtctcaaaaaaaaagttaaaaaatattgcccggctcctagaatttatttatttcctgacttacagcaagcgagttatcgtcttctgtattttgtagactttctaaataaagtcaaattctttctttttccacagagaataaatgtgtatcctggactatgttttttggcgaggggtgtctaaaatggggttctgctttcaaccccttagggcttctggtggcggggagggctagtgcacatcaccagctattgcacagggtatgaggtggaggggagatggcgacagagaccagtgatgctgaaacttcgatgcttcctcttggttgcttagagcacaggagctcctgggaagacaaagccatgggcacaatgaaatttaggactggattctggcggagcatggtggctcacacctgtaatcccagcactttgggaggctgaagcaagaggatcatctgagactaggagtccaagagcaacccgggcaacatagtgacaccccatctctacaaaaaataaaaaataattagccacatgtggtggtacacatgcctattgttccagctactgaagaggctgaggtgggaggatcacttgaggccaggagtttgagaccaggctgggcaacatagcaagacccccatctctacaagaaatttaaaagtaagaaaacaggccgggcgcagtggctcacacctgtaatcccagcactttgggaggctgaggcgggtggatcatttgaggtcaggagttcaagaccagcctgaccaacatggtgaaaccccgtctctactaaaaatacaaaaaacaacaacaacaaaaaaaaaacatggcccgggtgcggtggctcacgcctgtaatcccagcactttgggaggctgaggcaggcggatcacgaggtcaggagatcgagaccatcctggctaacacggtgaaaccccgtctctactaaaaatacaaaaaacaacaacaacaaaaaaaaaacatggcccgggtgcggtggctcatgcctgtaatcccagcactttgggaggctgaggcaggcagatcacgaggtcaggagatcgagaccatcctggctaacacggtgaaaccccgtctctactaaaaatacaaaaaaaattagccgggcatggtggcgggcgcctgtagtcccagctactcgggaggctgaggcaggagaatggtgtgaagccgggaggcggagcttgcagtgagctgagatcgcgccactggactccagcctgggcgacagagtgagactccgtctcaaaaaaaaaaagaaaaacaaaacaaaaaacagaaaaacatagctgagtgtggtggcgcatgtctgtagtcctggctactcaggaggttgagacaagagagaatcgcttaaacccgggaagcagaggttgcagtaagctgagatcgcgccactgcactccagcctgggtgacagagcaagactccatctcaaaaaaaaaaaaaaaaagaaaagaaaagaaaagaaaacaattagccagtcatggtggtgtggttgagcccaggagtttgaggctgcagtgagctatgattgcaccactgcacaatctaggtgacacagaccctgtctcaaaagaagaagaaatttagggttaaattccctgggcatccctttagtgaacagacagtcccacccagagaggaaaaaacccagatttcagagtaatttttccagcactttcacattgagatctgattttctacagccaagtggaaactatcttccccatgtttcggaatgcccagggaggcagggagagtggctttcccagcccccacctgcaggcctaaaccataaccctgtgtcttgtcctaggcctcaaactcactaatttcaacccaatctgccagcccttctggggcaccctgaagaaggagtggagtatactgtggtctgtgggtcacggcaattggggtttgaatctaggtgtctgttcttagctgtgggatctttggtacttatttggtttcttacagtctcagtttaccatctgtaaaatgaagatgctatggggcattacgtgcgaaaaaccctggagacctgtggggctgcaggttttaacactccgaacacacatttacagtggcacagaccgaggtgaggccaactctatggctgggtatggggctggctgggtatggggcccgcggggtaagggaccagttgggcgaaggtgcaggatttgagtccgggaaagggccagatcacgtaggtaggccgtgtccacggggctttctccccttctcaggttggggctcggtgctttccctgccaagcccatgaccctgaaatgctgagctcaggcctgcgggaagggcagcaggaagctgcgggaggacgcaggctatttacccgcctcgggaggctggtgggaattcccccacccacaccgcattcctgagtgctcccgtcagcagcaagccaggccccaagaaggcatgcggtaccagagaggccaggcactgtgcccacagccagcggccccctgccccagggtccctggccctgagggtcccagggtggaggacagtcccagagacgcaggaagctcgtctgaaagggggatcccaggaaatcctgggagatgcctgcaggagcggggctgccagcatgtgggccccatggacctggttgaccaaacagggaaggagcatcgaccgcctgcggcccggccgtcctgggttgggaactggctggaggttggggagaccctttgtccaaggggggcctgggccttgaccttggtccctatcaatccgaacccccatcactgaaaggttacacacaggaaggagagggtttcctaagccgcctgtacccacagccactccacccaccccaaagccagagcagggggcagggaggaggaaggaaaaacctcacccacaggcagagatttcaatacaatctatattatctcatatatagatttcttcctcactttatttgctcacttctgtcacgcatttaaaatgtcacagagaccaaaatagagtggctttctggtggaactcatggcagtcatacaacaagatacaaaactaggagactctgtcttctcatacatcatacaattaatttttcaagtattctttatgtacaaagagctactctacctggaaagaaaattaaaaaaaaaaaagacaaggtaggttatgcatcctaaggaggaggaggggatggagcggtcgggcacatgttcccgtccccacgaccccacggaccgctgattccctgccactgagctccccccaccctccacgcaaacagcaacgctgggcaggcgaaaaccaagggagtgggaatcagcagcactttggcctggagggagaagggaagccacggtggagagacagcttggtgaaagcagatggcggggcagggccagggctggtcctcagcctgtgtctgcacccaccctcccgggcagcttgggcccaactgctccgcccccccaagatggagggggagagctggcctctggcacccacatgcaggcctctgccacgaggaaaggaaggaggccaggaagacggctgggccccaactctcctcacaggtggcagggagggaacctgttcattccaggaaggaccaaaagaaagaatccccagtgaacaccggcagggtccctctcccttaccctaccagcttctccaggtgactgcagcccaaacccagggataatctgggttttaaatgccaggacactttgcctgtagggacacgtgttgtgacacgaggctcttcctaagtcaggagctagtataagcccagcctgctgggggttccggaggccccaggtctagaggtgtggagggggagaggaggggcttggtggtcctgaccactcctgaggcctgtccaagggctctgggcccagcactgcaggatcctgcgagtgccagcagctgaactaagagccccagggagcgtgtgggacagatggggagccagggaggggcgctttcatatgtgactaaggcacagaagagatgggccaggggccagatggggtagaacaccaggccctgtgtggataggggccccgagaggagtctgggaccattccccccacctcccagctccccactgtgtggccacccctcccggtctccctgccggactgccttcccccagaagctggtctgaaacgtggagactcagacctttcccctgaaacgggagggagaagccccaaagagagagaggacccagcatcagcctgggaaggagggctgggagcccctgagccctgaagcagccaggaagcaagggctctgcccaaagctatcgaggaaggacccaagtgagccggcagtgcgggctgtgggctgtccttggtaggccagggggaaggggcatgaggcaggcagaggtgtggccacgacaggtggggatacccaggggcccagaagcccctgcttcaacagaagcggtgcccaggggccctgaatgcccttcctgggtggggcctgtgactcctggtgtctggctctgatccttgcagcatgccacagaggcctgggtcaggaggggaggaccacagagcgcccacatccccactcctgcccggggtgaggtgaatctagcactggacaaaggtggacaggggagggatgcaggcgggaagagcccaggtcagacagggtattgcacggtgtgtgggggagccacggcttgccgacctcagcctgagagtctcgcggggaggaggggctagaaggctgcagccgctggtccacacacaagcattggggcctgggtgcggctggtcccagcatgcccccagcacaggacgggcagcaggggcataagccttgctcccagtgtcctctgccctcgcccgggcagtgcaggctgggccatgtataaatattcctgaaggcccatgggcgagcctggctgtcccccgttcctctggaagtgacatgtgagtgtttctggtccaataaataaaggcggcgtgagcactgtgccagctgcctcctggcctggtggtgaggctggaggtggggcacagcctgaccgtggctatggcgccagcacttccgccactgcagcccgcacctagaattcatcatcagagctgagcaggagagtcttctcgttgtcgcgggcgccactgaggctgtgggagcgggagaggccgtgggcgccaccacgccaggtgggcccaggctccagggtggactgctgcgtgtactgctggtaggcaggtgagaagttgtggatggcgtcctgcacgatgtcgtgcgggttcatggtctccttgaggctgctggagatgctcttcatgggggcacagcggcctgccgggcagggagcgggaggggcaggtgaggaggctgggacggtgagagggaggtggctcagcccctgcccgtgatcctgggacagacaccccccaacccaaagctatgcccttcaaccatcccttctgggacagagaatggggtccaggatatgagaaggggcaggaaaaaatggacttctttggctggggagccccaaggggaggctggactgtgaagaggagcagacataaacccccactgggagctgggctggctgcagggaagggacccagggtggagactggcaagctatgggcagtgagcctagaatgccccagagaggccagagcaggctcagcactgactgaagttggggcatgtggggccagagggcctggaagccaggggtgcccggttccacaggtgccaggcgcgtcccccaccaccgggggaagtgctgtgctccctctactctggagatcaggaccaggctggcctgcacccccaggggagcagatgcgactcactggctccctctaagagggcttcctcctcatctctctaatcaactgtccccatcctcaggggctcagagcagaaaggtggcccaggacacctggatgtaagggacgagcccacccctggaacccaggattcctgactcagcttgtgaactcttggaaacatcgtgaaatgccccgatatcccatgaacagcactgtgcccccagaagaaggcggggcatattccagaacgagaaacgaggacggaagcaggcaagctctacagagggtggcccttgacaggtgctctgggcgctcccacccagggggtgccggtggggaggagatgaggacacggagaagagctacagagagacgcatgccagtgacagtgaccagaactgacatgcaggacagacatgcagaccaagagcgggacctaccgtaagggccgtatgttggcactgcccgcggccaaaccccgggcaaaagcagggcaaggggggcggggagagaagccaaagaaatagagaagacaagagacagctgagtgaacaatgtgtgcccaccaccgaggcccaccagcacgacacaccacacaccctgtccccacccccccaggccccacagggcacccaggaagctccaggtgcctcctggggcctggcaggggggatatccacctagggatgactcctcccctggtgttcacgccaacaggaaacatccgtctggcgactgagttccgcctccacgtctaggtcaggacgtcccatccccacttcttccccggctagcctggggccacatccacacctcacattttacaaacctcacaacacttcccagaccaggacatggaggctcagagggaggggttacaatcgcacagctgagccagctctgcacctaagcctatcctgagggctgagggtctgggcctgggttagagggtagcagggggctcaggaccagtggggaggcagaagagggcaagcagcttccccggccgggcgtgggtatgtctagagggacagctcaggccaggcagcagagcccctctgctgagccccagtggtgcaggaatggttctctgccatgggcccccttgctccttggggtggccccaggccccaggcccaaggatgatgttcccacgggcacagggtataccacaccaggtccaagggacactgccctcaatgctgggtgtgtgtttgctagatccttccaactgggccaccaggtggcaacccctggcctttgtgcacctgctctttgggcacagagtaggtcttcccccaccagggaaggcacagagga

SEQ ID NO: 62270 - DNA, 1944 bp, Homo Sapiens
  misc_feature (1938)..(1938): n is a, c, g, or t
gcggccgcgtcgacgctagaggggctgcttgcgccaggcgccggccgccccactgcgggtccctggcggccggtgtctgaggagtcggagagccgaggcggccagaccgtgcgccccgcgcttctcccgaggccgttccgggtctgaactgtaacagggaggggcctcgcaggagcagcagcgggcgagttaaagtatgctgggagcggtgaagatggaagggcacgagccgtccgactggagcagctactatgcagagcccgagggctactcctccgtgagcaacatgaacgccggcctggggatgaacggcatgaacacgtacatgagcatgtcggcggccgccatgggcagcggctcgggcaacatgagcgcgggctccatgaacatgtcgtcgtacgtgggcgctggcatgagcccgtccctggcggggatgtcccccggcgcgggcgccatggcgggcatgggcggctcggccggggcggccggcgtggcgggcatggggccgcacttgagtcccagcctgagcccgctcggggggcaggcggccggggccatgggcggcctggccccctacgccaacatgaactccatgagccccatgtacgggcaggcgggcctgagccgcgcccgcgaccccaagacctacaggcgcagctacacgcacgcaaagccgccctactcgtacatctcgctcatcaccatggccatccagcagagccccaacaagatgctgacgctgagcgagatctaccagtggatcatggacctcttccccttctaccggcagaaccagcagcgctggcagaactccatccgccactcgctctccttcaacgactgtttcctgaaggtgccccgctcgcccgacaagcccggcaagggctccttctggaccctgcaccctgactcgggcaacatgttcgagaacggctgctacctgcgccgccagaagcgcttcaagtgcgagaagcagctggcgctgaaggaggccgcaggcgccgccggcagcggcaagaaggcggccgccggagcccaggcctcacaggctcaactcggggaggccgccgggccggcctccgagactccggcgggcaccgagtcgcctcactcgagcgcctccccgtgccaggagcacaagcgagggggcctgggagagctgaaggggacgccggctgcggcgctgagccccccagagccggcgccctctcccgggcagcagcagcaggccgcggcccacctgctgggcccgccccaccacccgggcctgccgcctgaggcccacctgaagccggaacaccactacgccttcaaccacccgttctccatcaacaacctcatgtcctcggagcagcagcaccaccacagccaccaccaccaccaaccccacaaaatggacctcaaggcctacgaacaggtgatgcactaccccggctacggttcccccatgcctggcagcttggccatgggcccggtcacgaacaaaacgggcctggacgcctcgcccctggccgcagatacctcctactaccagggggtgtactcccggcccattatgaactcctcttaagaagacgacggcttcaggcccggctaactctggcaccccggatcgaggacaagtgagagagcaagtgggggtcgagactttggggagacggtgttgcagagacgcaagggagaagaaatccataacacccccaccccaacacccccaagacagcagtcttcttcacccgctgcagccgttccgtcccaaacagagggccacacagataccccacgttctatataaggaggaaaacgggaaagaatataaagttaaaaaaaagcctccggtttccactactgtgtagactcctgcttcttcaagcacctgcagattctgatttttttgttgttgttgttctcctccattgctgttgttgcagggaagtnttactt

SEQ ID NO: 62271 - DNA, 494 bp, Homo Sapiens
aggcttggaattgatttattaagcacatcccttgccaccctcccaccttaaaagttttcagtatcaaaagaagctagcgcaggccacccgagtccctgaggttggagtcctagcatagctcccctccctcaaagagggacaaggggtcaggggcagagcaaaaatccagtctgcttcaaccacggagactgcctttgggatggaaagtttctggagctccctccattctattcctgtggggcaggaacatgccagggctgctggtaaatggcaggggtcacctttaccagggcgcaggcatagtgtggcccctgcctgccctggggccaccctggaacagtaagaccctctgggaagggaagaaaccagacccagccataagctttctccccttctccctcaaatcgccccttcctcctccccaaaatcaggctatggcaaaggggctggcagcaggggaatggaggttttggaggggaaggccagccatgcga

SEQ ID NO: 62272 - DNA, 567 bp, Homo Sapiens
aaagtgaaaaagaatttatttaatttttgccatatcaggacaacaaagcagcccttttatgtcaccactcattaaaaggacattacaaaacattaacataatgtagtagcccatgttttctttcaggcattttcaaagggcatctcagacccacaatattttctattgagtgtgcagaaaaacagagctgcaaaatcattagtaaggcaaaataataaaatgtctccctttttattgaaacataaattttccatgttttagagatattctgaatttaacattcatagatatgcaatatttaagttttaggatattagcatactatcagcaatattgggtttaatagctactatcaagcaactgatttctaatgcacacaacataatttgatagtatatgtataagaagatggcctgaattttgccctcaaatgcacaaaaagaattttccatacacattctcaaaagtctttggccttgctgaataataatagagctgttattttactgtgaagcaaaataagccttcaagtgtcccttacttgatcttagaaggtcaaattctctg

SEQ ID NO: 62273 - DNA, 489 bp, Homo Sapiens
gaggatacatatcttttaataacaaaatgcggggaagagaaaatatctaaatatttgggtgtaattattccaaacatagaaaacacacaatagaatcaagtgaagggaaagctactgtaacagcttagatactttttaaggagaactgatagtaaatctgggaatgggaaaaaaacacagagctagaatttgtttagcactccgtgcaaaaggcaaaagctgataaaactggagtggacggaggctccgaatgtggccctccgctgctctctctcctgcagtctcatccccggccttagccctgacctctcctccgaagcccctgaagggagaagtgtggctaagatggaaattgctaggcagcagagctgttggcttgtttgcatttattgctttaggaacccagagtccactcttgcaccgggcctgcctgcctgtgaaggcagagctgggttgctcagagcacaaggcctaccccatcctgcgtct

SEQ ID NO: 62274 - DNA, 532 bp, Homo Sapiens
atcttttcatgcttaaattttatcaactcattgtggtcacactgattatctcatgctgatcagaagctctgattggttgttgatgacatcatacgaatcattgggacactgattttattgtacactccatcatagacgtcttccttaatttaggaagggaaaagtcaatggttactccatcagtacagtttggcagataaaaatgcagggggcaacaggacatatgtacaacaaaaagtgccttgattacaaaaaggttgagaaccactgaccaaggtacgaaaaaaatgaagctgccttgattctctgggcaggaagaattcctgatgccttgggggctgagcacacaggtttcaagactgaatgaagtccccctttctctcaccctctggggtctgcaacgttagcatgagaggcttttcttctccagccggatggacccccacagggtcccacagaggcaaggaaaggcctgcaggaagactcagcacaggcgaatgggctggtcagcagtggagtggacgggagccca

SEQ ID NO: 62275 - DNA, 583 bp, Homo Sapiens
ttttttttttttttttttttttttggggctggaacttgctttatgtgtccagcatctccgtgagcatctggtgtctcagctcaagtcaaccctggccagactccaataacagacacaagaactgaaaagggggccctggttaccaaaaaccagaggaccctcattaacatccccaaatttcaagccagactgaaatctgtcagaagaaatgacggtcccagcctacccccgacacgggtggaacagagtaggctgggcccagctagagcctcggcctgggctgctgcacctgcggggcccacagactgaggaggcggtcggcctccctccatcccgacagcagagccccgtgcgtcgtggagtaaaacgtgcgatgtgtggcttcccccgcaaacaggatctggagctgggcgccggcgccgtctgcagggaggggctgagccagcaggtccaggtcgcccccagtactgcccacggccacgtagctgtaggaccccctagtgtacggggcgctgtgccagcgagaccgcaggacgctcttgggcgcggggagccgtgggtttcctgtcactctccggagcac

SEQ ID NO: 62276 - DNA, 608 bp, Homo Sapiens
  misc_feature (603)..(603): n is a, c, g, or t
tttttttttttgtccttttaaggttttatttcctaggccaattttgaaggaactgttatatcattcttcataactcagttttggaatcaacttcttgaagatgaaaaccaacaacactacccttcagaatagtaataaaatctccaaacatggctcaatcgaaactcaacattttacaggcagacaactgttttttctttcatataaagtagatgtacatgtgaaccaacatagacccaaactggtcatattaatgagaaaacaaactcatgtcattgcctctgctactgcaaggtgtatctttttaggattttaggaataccgggtgggtactaccatatcaaaggcagaatatcaagtaagtcaattggtcctagtttgaaggtttcacagatcatcatgagttacatttttcattctttaaacggagagctgacacctgggcgtctgtgtttctttttatttttttttgttttcacccttctagatactctagtattttgtaaatttccttgtcatgggctgacttttacagggaacattttaaaatctaaatttattatcctgcttagcatctcaaacaactaacctttcaaaaaaatntatat

SEQ ID NO: 62277 - DNA, 524 bp, Homo Sapiens
tttttttttttttttttacagaggaggagctctttattgtgggaggtgtctggaactgcaggaaggtcagcagcgcagtggggcgcgaccccagccagctggcagttagggctgggctgggcgccatccgccccgtttcccatctccctcggcgcatccctggggagccgccatcactcggcagattccgcatcaaacctaaggtcctggagaacctcgctgatcgcctccatggttttaattaccttcattttcagctgctgcatccgtacagcgtcctcctgccccgccagctctggcgtctccatcaactgcagcagggccaccgtgcccagccgcgtctgctccagctcctgcaggctgcgcacgtggccggcgagcagcggctgcctgcgaggcccgcccagctctgcttccaccgccagcacctcccgcgaggcggcggcgaaggcctgggtcaccccgtgcactgtgctccggtagcgcgcgaagtcgtagtcagggccgctgcgcaggtactggcg

SEQ ID NO: 62278 - DNA, 564 bp, Homo Sapiens
tgccattacttttaatgactgctgcaccaacctattagaatcatttatatttatccatccatcatctgccttcccctctagaaaggaagctccatgagaatagaggccaaatctactcaaatcactccaccttcccagcacattgtttgtcaataatcatttaccaactgactgatagagaaatgccttccctgttgctgggatgaggcacatgacacgcccctttgaaagtcaattccatggacagttagcatttgctcttcactcctgcacccatggcgtggctgggcttaggctgatctagtctggccttgactccaggctaaggatgggaaccatgactgctccacacgcctctcatcccacagccagagccgccgttccctggggcacgtgcatctcatggggaaaatcaagagccttagacggcaggcctggcagtgcccacacattccaggcttctgcttgtgccgtgtctgtgaaaatctcgttggcagaagcaagtcacccagccacaagcaacacctatgggacggataagtccatccaccctccctcgggccc

SEQ ID NO: 62279 - DNA, 1272 bp, Homo Sapiens
cctggagaaggtgattaaagatacggagtccctgttcaaaacccgggagaaggagtatcaggagaccattgaccagatagagctggagttggccacggccaagaacgacatgaaccggcacctgcacgagtacatggagatgtgcagcatgaagcgcggcctggacgtgcagatggagacctgccgccggctcatcacccagtctggagaccgaaagtctcctgctttcactgcggtcccgcttagcgacccgccgccgccgccaagcgaggctgaggactccgatcgcgatgtctcatctgacagctccatgagatagagacctgcctcccccttgcacccgaggccctcgcagcagggagctcagcgaggcagagggtggggctgcacagaggggaacatcagctgcagctctgcaccaggccggtccctggggactggggcgctcctccctcaggctttctccctcagtcttggcttctccagggctctggggtgtctggagctaggcttggccctaccattctggggccatttccaccacagttggggctctcctgccttcacgcgtgggtgtctgctacttccccatctttaaaatgctgccagagcgattgcggcccctcaccttgtccacgtatcaggaatgtgaatgtgggacctttcctccatccctgttgtccggagccagctcactgtcttccacactggtgctaactggcccaggcactggagtggaatagaatgcagctggaggctacgcatggcctctgcagcacacgcagctggagagggcttctgtccctgtcagcggcagagggcgttggggctggccggggcaccttgtccctgctatggtccacatgctcacgctgtccacctgccaggtggagtgtatgtggctgtggccctccctcgtggaggtgccgtgctttaaagaggccttagtgcccgggatgggcacagtgttttgaagggaggtgggagctcttgctctcctggtcactgcagaatgacagagaaggtgaagctccatgcatgtgtgcgcgggtgtatgtgcgctcagggtctctgtttaagtatcagctaaagatgtgcttcctccgtgtctgtcatacactgagaccaacaggctacagtgtccctgattcttggaaaagcctggagaagctggggagatgcggttcacaatgcctcggtataggaggctgtgttgagctgacattcaaatggattctttaataataatgaaactggcgagtattaaaaaaa

SEQ ID NO: 62280 - DNA, 1746 bp, Homo Sapiens
gaacgatgcacaatgccagatgagccattggtaagagctccagataaaggcacagattccccatcaccccctcctctcgaagagacttcaaatggaggaagaatgctccatgagtccctgaggcatgcagtacccattacaaggatgcagagcagtgaagacactgaggcaggcccagcctacagtgatgaggactatgaagaagacatcattgagcccaggaccttaaatgagatcaccacggtgacagacaaaactagcccttggtctagtgtcatatcagacacaagtgaggtcatcagccctcagcctgacgaggtgcagagggaaggcccctcttgtccttctccagggcctttctgcagagaggagcttatggtcaaaagtagctttctctccagcccagaaagggctgtcaacccccacctgcctaggcagggttctcctagccaaagtcttgttgcttgtgagtgtgaggcctctaaggccagggttggtggcgagtctgcctcagccaaccctcagcccatcccatgcccaacactctcaggagctcaacagagcagcacgtttgttggatggagctcaccacagacagatcagaacaaggagcccaagtcagaggccccagctgagaatgaagctgccaccagtgagctcggtgactctgctgatagcttcaagaagttgccgctaaatctagcctcccagagcagaagggaaaaccataagggaccacccatcgactcctctgacatcaggcagaggcaggtgacaactggatcagagacgtccacaaagcagagcctcctgctcccagggcccattgtggtgcccaacttctttttgcctccccagcagttggaggcttccctgcggatgctttcactctcagcaactttgccaccagcagccacaacagatcaggacaagagcgaagccaccaggggagctctctcccaaaggccttgtcgccccagacctaactcgctccccctcaacctgcctgaggaagaaactctcaggattgcacggatattttcttctcagtactcccagaaagactgacgcagcctgaggggctggggggaaggagacacctgcccaccctccgtcagctttgtccagcttgcaggaggcaccaggtctggctccttcagggctgtcacagtcctgaaaccaccacttgcctaggccacggatgcctcaagagacccggtcagcccagactggaggagtgccccaaaccagtccagtgtccacttgccagaatttcagctccttttttctgtggtgaggcaaaggctagaaataaaatggaatccgcgcccaagtgggacccaagcaggcatctttcggtggagaaacgccccccagtgtccttgacacagctgactgctggcatgagcccaccctctgcctgaagatgcaggaccatttttgccttaaaagttggggaggagggacatgtagattgtgtgcattgtgcatagtcaaggaaatcctagggccacctccagttcatttgtgtgggaacaaggatattttatagatacaaattatttttatgctgtgttgaattaatcaattaggagaggaaggggaaatcacttccttcaaactttttatctgattgtctaaaattctaaccatgcttttaacttattatttttacccagctctgaaggtcattgttcttgcctgtgtttgaataaaatcatattggtgttgtaaaaaaaaaaaaaa

SEQ ID NO: 62281 - DNA, 14483 bp, Homo Sapiens
cgccctttcaactctgccaagaatggctcccacctggctctcagacattcccctggtccaacccccaggccatcaagatgtctcagagaggcggctagacacccagagacctcaagtgaccatgtgggaacgggatgtttccagtgacaggcaggagccagggcggagaggcaggtagggatccatccacgccgttttctcaggcttgcttgctagtgacccttcctcactggaataaactccttaccctatttcggccctagtttccagaacgtactcatttttatgtaagcaattagttcctacagtgcataaataataaagcagtgtgctaagtgctagggatgaggataacaatagtgaataagacaaatcctgacttaaatttgtaattaataaggaatctaaaatcctaagaggggagatagattgaccaccagctgatggtaaagcatggtatgaggcaagatgaagaagtgcaaactagaggtagagacccagcactgtggcagtgtgggttcattctgatggaagaaagcctttacagaggacatgctgtgggagctggccatgctgtcgtattatctgtaaacattcttattcttgtttcatgtgtcttttcccagatgtactgggatatcattctgccattttgctccagaataggattacattagaagaagcagcatgatgaagaaggaatactagactgggtgtcaggagacagagactctatttctagtttggctaccagctagaggacatttggcaagtcacttaatttccctagcctacagatcgctgctactaaagaaaagaaagaaagagcgagccagatatggcggctcacacctataatcctagcactttgggagctgaggcaggaggatcacttgagcccaggagttcatgaccagcgtgggcaacaaagcgagactccgtctccacagaaaataattagctggctgtggtggcatgcatttgtagtcctagctactcaggaggctaaggtggtaggaccccttgagctcagaagttgaagactgcagtgacctatgatccagccactgcattgaggcctgggtgacacagtgataccctgtctctaaaaacgacaacaacaacaatctcttatagtcctgggtctcagagagctgcctcaggagccatgttccaagctggattaaacttcacgtgacattggtagacgatttctctaaaggctggcactgtgttatttatgtactgttctctcagactcctcataaagtatacctaacactcaataaatgccttttttttttttttttttttttgagatggagtctcactctgtcgcccaggctggagtgcactggggagatcttggctcactgcaagctccgcctcccaggttgacgccattctcctgcctcagcctcccaagcagctgggactacaggcacctgccaccacgcccagctagttttttatatttttagtagagatggggtttcaccgtgttaaccaggatgatctcgatctcctgacctcgtgatccgcccgcctcggcctcccaaagtgctgggattacaggcatgagccaccgcgcccagccaataaatgccttttaactagcacctggcctcaccatattgatactggaagcttacgacctctctatgcccattcctccctcaaacttcttgcccttaaattagaattgagaagtccctgtgtgttcttccaacctttccacttaaaatgtgtggcctaaaaataaaaaaataaataagacaaaaaaaccaccaaaaaacaaaaagaatgtgtggcctaatgatatacacatttgatgttgaatcctcctgtatgtagctctctctagggagatcatgttccacgatctcagccagactttaggtcctgtgagtccaggcactggactcaacatgctcaatagggctttgatgaatgatgatgatgtcaatgcagacatccccataccccagcttcagcacccccttcacctccccacacggaagcagaggggtcctcttttccttctcctggctatgtttatgccctcaactatccttccagcactggagacaagtctcacctgcactaacctgtctttgaaggtcctgggggctggaggggtcacaggccctgagccagcaggctgaggtgatcgttcggcagctgcaagagctgcggcggctggaggaggaggtccggctcctgcgggagacctcgctgcagcagaagatgaggctagaggcccaggccatggagctagaggctctggcacgggcggagaaggccggccgagctgaggctgagggcctgcgtgctgctttggctggggctgaggttgtccggaagaacttggaagaggggaggcagcgggagctggaagaggttcagaggctgcaccaagagcaggtgaatgcaggggtagaaaggattcaaattcataacggagagctgggcagtagcttccaagcaaagaacaggtattgcagaaaagaccctccatgagtagtgagtagtagagtgatgagacctttggtgaaaataaacacacatgggctagaaagatggagaatttgggtacttttatcttaattcaggttgcacttttcccccaagactcaggtggcctcccaccacttgaagccctgcttccctttctagtaggaaatagtttgcctccctactttactccaggtaccaattcatcaggggtattgtggagggcagtgaggaaggtgggtataagggggctatggtggactgggagagagagattattcagtcctcaaactcagtacttactctgccatctctaagactcagtgaccaaattagcctgagtcctgccttcgtggatggaactgacagcctcgtgggggatatacacatccacatttaatttaatcataattaattgcaatcaggaggaatgccttgaaggagaaggactagaaagcactaacttagtctggggttcagggaaggccactgtaaccagttgacatgtcaaggaaagaaaccatagccctgggcgcagtggctcacgcctgtaatcccagcattttgggaggccgaagcaggcagatcacaaggtcaggagttcaagaccagcctggccaacatggcgaaaccctgtctctactaaaaataaaaaaattcaccaggcatggtggtgcgcacctgtaatcccagctacttgggaggccgaggcaggagaatcacttgaacctgggcagtggaggttgcagtgagccgagactgtgccattgcactccagcctgggcgacagagcaagactctgtctcaaaaaataaaataaaaaaggaactgggagaaaacaagggagaattcctttataaccttgtagtgggcaaggcctttctacctgtgagtcaaaatccaaaatctagaagccataaaggaaaaaattgatccattgactttataacatgaacattaggaatagccaaaaagaaaaaaaaaagctatatttatagctcagatcacaagaaaagggtaatatccctaatataaaatgtgtgcctagaaattggtaagggaaagaccagcaatccaatcagaaaatggacaaaggagatttatgaaagaaacttagaaacaagaagctaggccaggcacagtggctcatgcctgtaatcccagcactttgggaggccgaggtgggcggatcacttgaggccaggagttaaagaccaacctggccaacatgaagaactctacaaaaaaatacaaaaattagccgggtatagtcgtgggcgcctgtaatcccccagcttcttgggaggctgaggcaggagaattgcttgaacctgggagacagaggttacagtgagctgacatcacactccagcctgggcagcagagcgagactaaaaaaacaacaagctaccgtttgtgctgaataggagttggccagtgaagaggcgtgtgaagtccagtggtagctggaagacacttggtgggacaacaggtgaaggcggggacaggaggccagaaggctggggcacagagatgaggggcactgagtgtgctgcagagcccaggacccagggcacaaggctttggccacttcagaacttgctactttcccataagagcaatgagcaggctgggcacagtggctcatacctgtaatcctagcactttgggaggccaaggtggaaggatcatttgagcccaggagtttgagaccagcctgggcaacaaagcgagacccccatctctattttatggaagaaattagggctgggcatggttgctcacatgtgtaatcctagcactttgggaagctgaggcgggtggatcacttgaggtcaggagttcgagaccagcctggccaacatggtaaaacctcatctctactaaaaatacaaaaattagctgggcgtggtggctcatgcctgtaatctcagctactcgggagggtgaggcgggagggtgaggcaggagaatcgcttgaacctgggaggcagcgtttgcagtgagctgagatcgtgccattgcactccagtctaggcaacaaagtgaaactccatctccaaaaaaacaaacaaaaaaaaattgttttttcaagtaataagcaaccgttgaaaggttgtttttttttttttttgagatggagtctcgctctgtcgcccaggctggagtgcagtggcgcgatcttggctcactgcaagctccgcctcccgggttcatgtcattcttccgagtagctgggactacaggcgcccgccaccacgcccagctaattttttgtattttaatagagacggggtttcaccgtgttagccaggatgatctcaatctcctgaccttgtgatccacccacctcggcctcccaaagtgctggaattacaggaatgagccactgcgcccggcctgttgaaaggttttaagcagggaaataacatgattagatttgtattttatgtctaaaaaattttgtcatttatgtcccccaaattaattttattgttgtatggagacagggctagaggaggcagaccaggaagcagggtgggcactttgccctcctttccagtccatcccatgactcttggtggctctgacacccctgcaacactttgaggtgccatgagcaaaagacacaaaattcctcctttcctggagctttccttccagtgtggtccgacagatagtaacacatacacataagcaagatatggtcagtgctaagtgctcaggaggacgtgaacagctgatggggcagagtagggtggggagggacagtattagagggcccagtgaagccaccctgaggaggggctatcgcctggggtctgtggagcaaggaggggccgctgtctggttctcagcagactccccgtggccggagcggggagcagtgggagagcctccagggtgagctcaggaggtaggcagaggccgggtcccctggcctgcaggtgtggagagacacctgggttttgttgtgaatgctgtgagaagccactgagggtttgtaaagactagttaggagatggtcgctgttgcccaggcaaaagatgagggttggtggcagtggagacggagacagagaggtgaagatatgttttgggggagatcggacaagaactcctgatgggttgtggggcagctgcggagagtgagttgccagctctccatttgctgtgcacagttggctgattggttgggtcattctctaaggtcacagaaagtgggagtgaagggaacaaggaaggcctccatgtggggtcgagcctctgctgagccccctcttctttccgcagctgtcctctttgacacaggctcacgaggaggctctttccagtttgaccagcaaggctgagggcttggagaagtctctgagtagtctggaaaccagaagagcaggggaagccaaggagctggccgaggctcagagggaggccgagctgcttcggaagcagctgaggtaggtgggcggacgccgacgggagcccagcaattagtgatgtggtggatctgcagggcgccccactgatggctgtcccattcccaccccaaccctagcaagacccaggaagacttggaggctcaggtgaccctggttgagaatctaagaaaatatgttggggaacaagtcccttctgaggtccacagccagacatgggaactggagcgacagaagcttctggacaccatgcaggtgagggtgcaggaatgtatctgtgtgcagacttagggatcaggttgggaggcaagcgtggcccttggaggagcgtgtagagcacagcctccgggagagaaggtggtacctaaggcggcatggaggccctacagaggggctgctttcctctgcccgcagcacttgcaggaggaccgggacagcctgcatgccaccgcggagctgctgcaggtgcgggtgcagagcctcacacacatcctcgccctgcaggaggaggagctgaccaggaaggtacagcccaacccccagacccctcaccctcagccgcatcctgcatctactgtcccctgcctccctccctgtgggcaggaggggtcaatgtgccccagaacctgcttagatctccttcctgtgaactcctcttgctgtagctcatgttgcccaggcaggacagaggagaaacaaagatgccacctccttcctctcctcccccaggagcccacacttttctcccactccttctccctcaggttcaaccttcagattccctggagcctgagtttaccaggaagtgccagtccctgctgaaccgctggcgggagaaggtgtttgccctcatggtgcagctaaaggcccaggagctggaacacagtgactctgttaagcagctgaagggacaggtcactgcactctcttttctcccggtattccctcccagcaccttgctccttccatgaaggtggcatccattcaaccagtgtttattgagtggttgccacatgctgggcacacagccctgaacaaaactaaaatgtggagcttgcattctagaacagagacacagaacacgcaagtaaacagataatgttgggtaattatatgtgcgatagaaagattgaagccgggtgcagtggctcacacctataatgcgatcactttggtctccaactcctgacctcaggtgattcacctgcctcagcctcccaaagtgatgggattacaggtgtgagccaccgtgcccagtcaagtaatgccaacagtttgggagaccgaggcaggtggatcactggaggtcaggagttcgagaccagcctgggcaacatgtgaaatcccgtctctactaaaaatacaaaaaattagccgggcatagtggctcattcctgtagtcccagctactctggaggatgaggtgggaggatcacctgaggctgggaggtcgaggcgaggccacagtgaactgtgatcccatcactgcactctagcctgggtgacaaagcgagatcttttctcaaaaaaaaagaaagtagtaagaaaaattcaaaagataatgtgacggagagactgtggggtgagtcagcctcaggtaggatgctcagagacagcctctctgaggaggtgacagcatctgaggagagtggcatggtcagttggtgggtcttgtggggtgtgtcaagggctattcccatcttcgagtgggcacatggaatgtggaacatggaacactgggctcagattccatcctcagaacctaagcttctgtctccctgcgtggcattcattctttttcttttcttttctttttttttttttttttgagaaggagtcttgttcttgtcacccaggctggagtgcagtggcctgatctcagctcactgcaacctccgcctcccaggttcaagtgattctcctgcctcagcctcccgagtagctgggattacaggcacatgccatcacgctcagctaatttttgtatttttagtagagacaggctttcaccatgttggccaggctgatcttgaacccctgacctcaagtgatccatctgcctcggcctcccaaagtgctgggattacaggtgtgagccaccgtgctgcgacccacccccgtcgcccgccctccctccccccagcccctgcatggcattcttacagagatctctgcacctgccactttgcttccagtgcccccctcatcttttagctctagagggccctgcccagctctctctcctcccccaggtggcctcactccaggaaaaagtgacatcccagagccaggagcaggccatcctgcagcgatccctgcaggacaaagccgcagaggtggaggtggagcgtatgggtgccaaggttggtgtcagcctactagagactcggggagggcaagggagcccctgttccggggctgcagccaggacttagggagggaccctgtcctttgctgcatcctccccagggcctgcagttggagctgagccgtgctcaggaggccaggcgtcggtggcagcagcagacagcctcagccgaggagcagctgaggcttgtggtcaatgctgtcagcaggtatcagggatggaggggtgggtggagtagtgtttctgccacctcaggttcctgggcaccttgttgctgaggatcctcaggcaagaggggctggaaagtggccactggaggctacagggctgggcagatttagctctatcaatgttcctgtgttcgtttcttttcctggggaagccccttctgcattcatacctgattgcttgttatgaatttcccgttgcatgtttggctggaggtgaggccttgcttcctcctgcagttcagtctagtaatggcttgagctaaatagagcacccgggaggatcttcacttgcagtattgttcaaggatggagagtgtagacacttcatcttcctttttttttctaaaattttacgggcaatccgtttcactggagaaaaatttagtctatttatttatttattttgagacaaagtctcgctctgtcacccaggctggagtgcaatggcacaatcttggctcactgcaacctcacctccctggttcaagtgattctcctgcctcagcctcccgagtagctggattacaggcatcctccaccagtgtcctccactacgcccggctaatttttgcatttttagtagggacggggtttcaccatgttggccaggctggtcttgaactcctgacctcaggtgatccacccacctcagcctcccaaagtgctggaattataggtgtgagccactgcacctggcctagtctatttatttaaagctgtatacttacttgcttattatatacttaacttgcttactattccatctaaaatgtaagccagttagtttccttctaaatcaattgccagcctttgtctctcctaccaacttcctagttgtttcattacctacaattgttgtatgaccttcagaaaaacctctaagaaaacagcaaagcttctttgtgctggtgatgacttcccctcagccttagacactgaggtacccaaggcaagtagttctttttttttttttttgagacagagtctcgcactgtcacccaggctggagtgcaatggcacgatctcagctcactgcaacctctgcctcccgggttcacacgattttcctgcctcagcctcctgagtagctgggattacaggtgcacaccaccacacccggctacttttttgtatttttagtagagacagggtttcactgtgttggccaggctggtctcaaacttctgacctcgtgatccgcccgcctcggcctcccaaagtgctgggattacaggcttgagccaccgtgcccggccggcaggtagttcttagcacagtctctggcttgtaaatgtttattgttatcgtgaggctcttcttgatgggttaatttagataaagataatttttggtttagcgaaattaagatgcaggatgagtccttgcccaccacttccttctcttgggtttgtaccttagggactaatttagctttaaaaattatgaaaaatttcaaacttgcacggaattaaactagttataatgacctaccacccaggttcaatccatcgcgggtgccccctacctccaggagaacagaaagatgcactgtggacagggtttgactttggtaccaggtgatcacagaaatggtctgtgtaatgatgcatttgccgaaagtcctccaggcttaaagcagtccaaactctgattgttgctgggtttattagattgtctctaggtaattggagactttaataagagctgtggtaggtgttggaagcatctactggaacaatttccagatcaaagtgaactttgctgtgctgctggggatgcagctgcaagccttcatcatcatgtgtttttctgtgggtgcagacctggactctcctgaggaaaccccagcccggccccagacactccttggcctcctcctggggcctgtttaagctgctcagttttcatgagccaggttggtcctacttctggcacagccagctggtaaagcatgtggacctgcccgtcattggtgctagatcgacactcctgggcttggagaggataactttgttttcttttgtttttttgagatggagtctcgctctgtcacccagtcttgagggcaggggtgcgatcttggctcactggaacctccacctcctaggttcaagtgattctcgtgcctcagcctctggagtagctgggattacaggcatgagccaccatgcccggctaatttttgtgtttttaagtagagagagtttcaccatgttggccaggctagtctccaattcctgacttcaggtgatccgcccgcctcggcctcccaaagtgctgggattacaggcaggagccactgcccctgaccagagaggataactttactctttgatacacgatagtgagcaaaacacagttgtgagaaataagcttaacaggttgcttaaaaagatagtcatttaatgcattcttggggcaagggtcctttagataattgacggaagctgtgcgttctgtacttgtataatgggacaggattagagggagttgtctatacaaggcacagcaagtcctttgggaatgaggggaggcatggaggatcagtgacttgtgccctctccagctctcagatctggctcgagaccaccatggctaaggtggaaggggctgccgcccagcttcccagcctcaacaaccgactcagctatgctgtccgcaaggtccacaccattcggggtgcgtaggacaactgcgagccacgtcctgcccccaccccaccagctcggactttcttcttcctgacccagctctctctgatcccacatccattcaccttcctcctttcaccagtccttgcatctctttttcccttactccctgtccccactttctcccatgcaaacttcatctctttttctccctgctttttcccctccaggcctgattgctcgaaagcttgcccttgctcagctgcgccaggagaggtgaagtttgtgcactttgaggtggatggggctttagggcattggctgctgggacccccaaaaccatgaggactgaggtgggatgggggctttgggatcaggcagctgggttatttctcctgactctttctcttccccgtcccagctgtcccctaccaccaccggtcacagatgtgagccttgagttgcagcagctgcgggaagaacggaaccgcctggatgcagaactgcagctgagtgcccgcctcatccagcaggaggtgggccgggctcgggagcaaggtacacctggttgccagagggtggagaggatgaggaaaaacccagtgtctagggtgctgggagaggcctgacccagcaccccctccttttaggggaggcagagcggcagcagctgagcaaggtggcccagcagctggagcaggagctgcagcagacccaggagtccctggctagcttggggctgcagctggaggtagcacgccagggccagcaggagagcacagaggaggctgccagtctgcggcaggagctgacccagcagcaggaactctacgggcaaggtgtcgagagggaaatgggtgcttcccttggagggtggggtgggaactgcgaatcaaagctcctgctgatatgccccgtctgcactttcaccccagccctgcaagaaaaggtggctgaagtggaaactcggctgcgggagcaactctcagacacagagaggaggctgaacgaggctcggagggagcatgccaaggccggtgagccttgccagggtggatagggccttccaggaagaaggaagtgttaagacataaggttattattttcccctcaaagtgtgttcaaagcttcattacaggaagtaatgaaggtatccaggagtagcacagatgaattatcacatcgtgaacacacccatgtagccagcaccagattaagaaacagcatatggccggtcgcggtggcttatgcctgtaatccaagcactttgggaggccgaggtgggtgtatcacctgaggtcaggagtttgaggccagcctggacaacatggcgaaaccctgtctcgactaaaaatacaaaaattagctaggcctggtggtgggcacctgtaccccaagcttacttgtgaggctgatgtgggaagactacatgaacccgggaggtcgaggctgcagtgagccaagattgtgccactgcactcaagcctgggtgatagagaaagaccatgtgtcaaaaaaagaattgtgtaatgaatgtatcttctctaactaaatatagcagttaacatttgccacatttggtctcttatctatatacacacatatttgtacatcttttgaatcactttaagttgtaatcatttaatgttttgttgttgttgttgtttgagacagagtcttcctctgtcaccagctggagtgcagtggcatgatcttggctcactgtgacctctgcctcccgggttcaagccattctcctggctcagcctcccaagtagctgggattacaggcgcccaccaccatgcccagctagtttttgtatttgcagtagagacgggattacaccatgttggccaggatggtctcgagctcctgacctcgtgatccgcccgctttggcatcccaaagtgctgggattataggcgtgagccaccacgcctaagtaagttgtaaacataagttgttcagccgcatctcccaaagccagtaaattctcctatatagctgcaatcatcacactttaagacagtgaacactaattgcacaaaatctaacccagttcatgttcagatttcccctgaggaactccaggatggttcagggatgaggaagatacttaggttcagattcccaggctcctagagcatcagcccacccctccaactgtacagaagagacagatccacagagcagaacagcctccccaagccacagagttggtgacccagcgtttgttcctgtcttcatggtgcctggctgcctctggcctgactcacacctgcctcctctgtgccttggcctctctgtagtggtctccttgcgccagattcagcgcagagccgcccaggaaaaggagcggagccaggaactcaggcgtctgcaggaggaggcccggaaggaggaggggcagcgactggcccggcgcttgcaggagctagagagggataagaacctcatgctggtaggagacaggagggcagacaggcagacactagggcccatcctgggctggttcctgggctagaggtgtggaaagaggatggtgagggaggctctatccgggctaggtttaaccctctccttcccaggccaccttgcagcaggaaggtctcctctcccgttacaagcagcagcgactgttgacagttcttccttccctactggataagaagaaatctgtggtgtccagccccaggcctccagagtgttcagcatctgcacctgtagcagcagcagtgcccaccagggagtccataaaaggtcttgggccaagcacaaagggacaagggacaaatgcgcgcacttcaggaatctcctcttcagactctggcatgatgagtgttgttctctgcggtccttcgaggcccttagcctcttttagcgatgcccagcttggaccaaagagcctcctctctcccattcctcatttcctgtgccagccctgtttcctctgtaaccacgagcaccttcccttgtctggtgctcatctgctgtcttccttcccagggtccctctctgtcctgctcgatgacctgcaggacctgagtgaagccatttccaaagaggaagctgtttgtcaaggagacaaccttgacagatgctccagctccaatccccagatgagcagctaagcagctgacagttggagggaaagccagcctgggggctgggaggatcctggagaagtgggtggggacagaccagcccttccccatcctggggttgccctgggggataccagctgagtctgaattctgctctaaataaagacgactacagaagg

SEQ ID NO: 62282 - DNA, 532 bp, Homo Sapiens
gatgaaaactccagcctttcctgactcacctccatcttcggttcttcagttttctgagaagagttgggatatgtgggaaggggcatgggagctcggcagcctccgcctgccaggaaggcagtttcgcctctgcaggaaagagcagagcccgtgggaagccctgggtgagggtggcgcagccggcccagcacgcatggtattgccagccacggggggcctgcgtgtagtctctgctccctgcatttcaccttctttgttgactttccttctctgttttcccccatctgtttgccagaggggtgggactggcaacagaacagccgtggctgctttatctctcctctccacggtgtactcaggcctgagtggtgactcacgggagcctggccacctcgcagctgttcgccccctcaacctttgaactggaactgctggctcacacagggttttcgacaactgcagctgaatctcatggaaaagctggattcctctgccttacgcagaaacacccgggctccatctgccaggtgct

SEQ ID NO: 62283 - DNA, 557 bp, Homo Sapiens
  misc_feature (38)..(38): n is a, c, g, or t
  misc_feature (480)..(480): n is a, c, g, or t
  misc_feature (544)..(544): n is a, c, g, or t
tgaaatattttatttaaagcctttattctatacaactntgaagtacatttttttacccttttggcattgcagactgtcgaattttctggaaactgtattacggtttgactggaggggaaagaaatacaatcatgctgggggtcagatctatgacaggaggggaatgcagccacccaaggcttagcacacagggcaaaatgacccagcaaaacccatttctttgctcaaaggcccctcgggcaaacacaactgagggctggtaaataatttttttttttctttgccattaattcacaactattgctaaaaaatgtgcaccaaaagcacactgttgtatccaacagatagaaaggacttttaaaaaaaaagaagctggttgctctctgaggaagggagaaagaccatttcaacttattagaaatgtggccacgtctttgctcacttcttcaaagtgcaggtggcaatggcctgtccagtttncaaaagaagctgactagcagtgagggaaccctgtctctgcagttgtgcgatcagagtatcttanatagtaaggtatg

SEQ ID NO: 62284 - DNA, 841 bp, Homo Sapiens
  misc_feature (5)..(5): n is a, c, g, or t
  misc_feature (51)..(51): n is a, c, g, or t
  misc_feature (253)..(253): n is a, c, g, or t
  misc_feature (258)..(258): n is a, c, g, or t
  misc_feature (380)..(380): n is a, c, g, or t
  misc_feature (383)..(383): n is a, c, g, or t
  misc_feature (512)..(513): n is a, c, g, or t
  misc_feature (521)..(521): n is a, c, g, or t
  misc_feature (526)..(526): n is a, c, g, or t
  misc_feature (532)..(532): n is a, c, g, or t
  misc_feature (600)..(600): n is a, c, g, or t
  misc_feature (614)..(614): n is a, c, g, or t
  misc_feature (648)..(648): n is a, c, g, or t
  misc_feature (651)..(651): n is a, c, g, or t
  misc_feature (656)..(656): n is a, c, g, or t
  misc_feature (658)..(658): n is a, c, g, or t
  misc_feature (718)..(718): n is a, c, g, or t
  misc_feature (745)..(745): n is a, c, g, or t
  misc_feature (754)..(754): n is a, c, g, or t
  misc_feature (761)..(761): n is a, c, g, or t
  misc_feature (786)..(786): n is a, c, g, or t
  misc_feature (804)..(804): n is a, c, g, or t
  misc_feature (814)..(814): n is a, c, g, or t
  misc_feature (818)..(818): n is a, c, g, or t
  misc_feature (823)..(823): n is a, c, g, or t
  misc_feature (831)..(831): n is a, c, g, or t
  misc_feature (841)..(841): n is a, c, g, or t
agagnggtcgccccttttttttttttttttttttttttttttttacctttnagatttttattagtagttctctctgaagaatcaaaatagttagcaaattattttagattcaagactgtatatcctttgtatttagatctttaatgatgtacaacataatacaaaacaaaccagagagactgatttctatgactaggtgttattcattgtgtcatcctaaagcagtgggctggaggggaagctgttcaagganaacanaggtggagttagtgctggccaactaaatcatggcctgtctgcttacccattcaatgtgctgggaaggggccaatgatttcttaaactgtttcctaaagcaggggctctaaaaccctgggtancanaggactgtggtccaaaccaagccaaaagaaacaggctggggtagggaagcgtggtgactgcctggcaaaaaaggcaaactctgggccccatagggaaaagtgcattctttgcacctcagagatattgcnnaaccagtnttaanactatnagactttgttaggaggggaaaaaataaaaccctggaagaatctttcacttgaactcaacttgactggngttcagtcaaccantctcaggggaaggggggaagcactatctccacancancactnantctgggcctcccgccccatctcccccagcccctctcagcaactaggccaggcttcagctnaggacataaacaccccagaaaagactnggttgtccnctccggnagggctttaaatgggaaaggacacntctcaaaatgcaaatgcnttttattacngganggagnccaagganagttctgggn

SEQ ID NO: 62285 - DNA, 888 bp, Homo Sapiens
  misc_feature (3)..(3): n is a, c, g, or t
  misc_feature (5)..(5): n is a, c, g, or t
  misc_feature (44)..(44): n is a, c, g, or t
  misc_feature (46)..(46): n is a, c, g, or t
  misc_feature (54)..(54): n is a, c, g, or t
  misc_feature (94)..(94): n is a, c, g, or t
  misc_feature (102)..(102): n is a, c, g, or t
  misc_feature (144)..(144): n is a, c, g, or t
  misc_feature (179)..(179): n is a, c, g, or t
  misc_feature (182)..(182): n is a, c, g, or t
  misc_feature (276)..(276): n is a, c, g, or t
  misc_feature (287)..(287): n is a, c, g, or t
  misc_feature (290)..(290): n is a, c, g, or t
  misc_feature (303)..(303): n is a, c, g, or t
  misc_feature (345)..(345): n is a, c, g, or t
  misc_feature (347)..(347): n is a, c, g, or t
  misc_feature (390)..(390): n is a, c, g, or t
  misc_feature (461)..(461): n is a, c, g, or t
  misc_feature (464)..(464): n is a, c, g, or t
  misc_feature (487)..(487): n is a, c, g, or t
  misc_feature (490)..(490): n is a, c, g, or t
  misc_feature (543)..(543): n is a, c, g, or t
  misc_feature (580)..(580): n is a, c, g, or t
  misc_feature (597)..(597): n is a, c, g, or t
  misc_feature (609)..(609): n is a, c, g, or t
  misc_feature (615)..(615): n is a, c, g, or t
  misc_feature (625)..(625): n is a, c, g, or t
  misc_feature (651)..(651): n is a, c, g, or t
  misc_feature (656)..(656): n is a, c, g, or t
  misc_feature (661)..(661): n is a, c, g, or t
  misc_feature (663)..(663): n is a, c, g, or t
  misc_feature (672)..(672): n is a, c, g, or t
  misc_feature (678)..(678): n is a, c, g, or t
  misc_feature (681)..(681): n is a, c, g, or t
  misc_feature (690)..(690): n is a, c, g, or t
  misc_feature (701)..(701): n is a, c, g, or t
  misc_feature (704)..(704): n is a, c, g, or t
  misc_feature (707)..(707): n is a, c, g, or t
  misc_feature (709)..(709): n is a, c, g, or t
  misc_feature (726)..(726): n is a, c, g, or t
  misc_feature (730)..(730): n is a, c, g, or t
  misc_feature (735)..(735): n is a, c, g, or t
  misc_feature (744)..(744): n is a, c, g, or t
  misc_feature (756)..(756): n is a, c, g, or t
  misc_feature (761)..(761): n is a, c, g, or t
  misc_feature (764)..(764): n is a, c, g, or t
  misc_feature (768)..(768): n is a, c, g, or t
  misc_feature (771)..(771): n is a, c, g, or t
  misc_feature (789)..(789): n is a, c, g, or t
  misc_feature (795)..(795): n is a, c, g, or t
  misc_feature (797)..(798): n is a, c, g, or t
  misc_feature (803)..(804): n is a, c, g, or t
  misc_feature (809)..(811): n is a, c, g, or t
  misc_feature (813)..(813): n is a, c, g, or t
  misc_feature (838)..(839): n is a, c, g, or t
  misc_feature (844)..(844): n is a, c, g, or t
  misc_feature (855)..(856): n is a, c, g, or t
  misc_feature (888)..(888): n is a, c, g, or t
acncngccgccctttttttttttttttttttttttttttttttngngtgggcanaggagggttttattctggacatgggtggctgggtggtcantcccccancaagatagaggcctcacgcacatgctgccggaccactcgatntaagagggtgtgcacatctcgggcagcctgggcancancctccaacacccgctccaggtggtcctcgtgcagccgggcatccatctcaagcagcgcaatctgtcctgaggctggcagcagggccagggccanctgggggccancanctgcttcctccanatggctgaggtccgccagggctgtgccgtccactaatccatntnagcacgcacacacaaagtctctcaggggtatcccggcatccancactgccagcgtggctgcattcacacaagctgcataggtcccaccatctgcctgttagcacctgcacatanatntcaatctgggagcgtgggtgcanctntttttaggatggcctgcttcgaaagtctggcggatctgcaggcccaatctcanaaggacttacggttccccatgttggaccgttctcttncgctcaccttgttgccngaaaggtccctnaaactnatattgacantttcactaaggggccctgttccggcnagggnctcgnancccggggangccccnggntttcgttgnggggccgtatnaancanangccagttccctttggtntttnccctngcttcaatnttaggcccgaanccttnaancctncgntaaaaaagccccatccgncccctngnnttttnnggaannntnccccggggggcgcccccccgttcanncgggnatccttgttcnnaaaaaagtccacgtcccccccatgttgccctn

SEQ ID NO: 62286 - DNA, 870 bp, Homo Sapiens
gggagatatttattttctttaaacaaggtcataaataacaaaaaacaaagtaggtcccagactccggaccatgcagcaggacaggggtgggaggttgttgagtggaaaggtggagggggctacacatcacctaagacagtcacagaaaagatgggcttcaggacactgccccttcctgcccttggaaatggcgtgcctgggcaatagggacaggccacagtgctgtgtcgaggcagctggaagaaggcaaagactggggatgccaggctgtaatgtttctgtgtggagtgatgtgaaatccacaaatggcaaagagaagctgtaggtttgaagaggcaagggggcactgcacacctccaggaaccagttatgaaaatggttaaatttgatgattaaaaacaattccataggctttggcctgtggctttgtgcatgggctgtatttaacctgggttgctctgtggcaggtgagggcgcaggaggcccctggagcagcctggcctcagcccagggcaggtgcccagacatgtgggagtgggacagtgggctctcccagatgggaggccatgtgcttggaccggctggacctgattttcaggctcgtttcttgtgatgctatccaccaccaccgctcgctatggctaaggatgggatcttggcctctctgggtcttccaaacctggaagagtacgactgggataaaacggtacctgactagtgttttatttgaaagggaaaaataaagaccaccccatgcattgtccatcccatgaggcagggctgggccatgccaagacaatctcaaggaatggaggtccctgagcctgggaagacatttgaactcagatgtatcgcctgatgctaggaaga

SEQ ID NO: 62287 - DNA, 719 bp, Homo Sapiens
tttttttttttttttttttcaagatggcagctttaatcacattggccaagggccctaggttccctctgttcaggcccacttagccacacacccaccctggccatatccagaacacttctaccaggtgggccctgccctgtggccactgatgtgggaacctgaggtcacatcagtctgtggactcctgggttaggtgacccttctgccttgaggtctgctggacacctgggcatgggatccagtagtcctgagctcactcttttggccatctccagctgctcctaggggacgtggctcaggcccgctcctggggcagggggttggcggtggcatgaggtgggttggggaggaggacgtgtctccacattgcagctggcttcctcctgggctgaacctccttgtgctttgagactgacaggaagagcagagttgcttcaggtagaggctcggcccaggcccttggggcaggataacagcagagaactcaggtgcctcctggcacagacaggaggacagatggcacaggtgagcatccacacactccattgccacagggggtatggcatggcccatgacccatcaaagcttccaggtcgggatacaggagagggcctcagaagagggggaccaagccctaggccccatacttcccagagggagccccaggcctgcaggggcatctgaaaggatggagtcctggcccagctgggcctcagggg

SEQ ID NO: 62288 - DNA, 657 bp, Homo Sapiens
gcattttttggctattttatttctagcccttggaagcttgtttcaagaaaaagacaccatatcataaacatcagatatcagttcactgacatgaaattattaacaatacaactctcaaatggaatctcaagtacttccagtaaacattcagttaagattttgacaaatattttcatcctgcagtctgtctcatactgtcaaaaaaatgtctgactataacgtaatagaactgaggttctaagtaccacacaagcccaggaacacacagctgagtgtcgctccctttcacgcagccaccactgaaaagcacagtgcttttacccccagacatcttgtaaactcctatttagggacactcgctcgagaggaaccagctgcacggcccacttgtagtcaaaggcagcgcaggttggtcctgttgtcactgaattctcagggctcagcccccagagcttttataaagggatctctaaagcccaaactcccttccatattattaaggcttgcccccattgtgggtccaaagaagacgcccctagatttgagtagagttccaacagaattcaaccagtggtctccgtgtgctgccgcttccctgcaggaacgatccggaccttccagcaagagcgcactggagaaaccttacctgcggcgtgg

SEQ ID NO: 62289 - DNA, 716 bp, Homo Sapiens
  misc_feature (5)..(5): n is a, c, g, or t
  misc_feature (148)..(148): n is a, c, g, or t
  misc_feature (430)..(430): n is a, c, g, or t
  misc_feature (469)..(469): n is a, c, g, or t
  misc_feature (574)..(574): n is a, c, g, or t
  misc_feature (693)..(693): n is a, c, g, or t
aactncgatcctctagagcggccgccctttttttttttttttttttttttttttttttcacgcgagccacggccacgctttattgcttaagacgcacacagaacacagaggaacaaacaaggaggaaagggcgccacacacagcccangaccaggcaggagcggcccagccgccggaagagacgttccttgcaaggcagggcccctgctggacagcacgccccctgggcgacagggtcagggaccccaggactgcacagctgcagacttgctgggaacctgggacaggtgacacgcccactctcgcctgtggcccagggccttccacctctgcatccagccatgcacccaccatttccccacagggtacaggggcagccttccttgatccacagccaacccttctcctgctgtctctggctgtcagtgangacccctctggaaagggcagaagcaggcaagccaggcangaagggggcccggggtcccactacctgggtaggaatgagcagagggcgggcagagcccttgctccttgtgggaggtagacaggtctcactgcatacatgggacanatgtgtgcacccacacacatatacatacacacacacacacacacacacacacagccctttgaacccagcactggcctgagggaaggtggccccggaaggaaccctgaaggcacattgtncaccaggctataatgcccctgcc

SEQ ID NO: 62290 - DNA, 754 bp, Homo Sapiens
  misc_feature (26)..(26): n is a, c, g, or t
  misc_feature (35)..(35): n is a, c, g, or t
  misc_feature (66)..(66): n is a, c, g, or t
  misc_feature (71)..(76): n is a, c, g, or t
  misc_feature (78)..(79): n is a, c, g, or t
  misc_feature (84)..(84): n is a, c, g, or t
  misc_feature (94)..(94): n is a, c, g, or t
  misc_feature (135)..(135): n is a, c, g, or t
tttttttttttttttttttttttacnctccttatnaaacctgggacttttttaaacctactgaatnccacnnnnnncnnagcancatcggcacntgaaacacatgattattcttacattctactcttattattangaatattattggttttggttttccggttatcgctctcagggagaccccatgcctgctcacatgaagtcagagtttacgggagagaaaatatttccatccccctacccctgcgctgcatgcccttgtccagctggccctggggacgacacatcagccttttgtgggaggtctcctgccttgttaaggtgactgagcccctcacccttgcagcccccacctcgttactgcacattgtcgagacactgaccacttggttatttgactgtgaggtatgccactagctttaaaacgggaaatgggaaaaataggaagaaactgcgtatgagaaactgacatgcaattccaagaagaggctctctcttgggccaccagcttggttccagctgtggccagggtggccatatcatctatagttttagatcctgtgctcagggttggcgctgaccaatgtgggatcctgcacattttggaggctggtttagggtcattcaacagggtacctcattgtacaaacctaagggtcacccgttctcagtgcagtctatgtaaacagtatccctgggagcccattaccatttatgggacagtgtcgtgaatggtgcctcctgaggtgaaccct

SEQ ID NO: 62291 - DNA, 544 bp, Homo Sapiens
ggagtcaatactctttattgtcctgcccagggagcccttcccaaaggaatccacagagcaggggggcgaggcgggcggcacagggccttggtgacaacgtgaagggggagctggagttaggtgggggacagccccttcagctccctgatggcactggctgtgctggcaggccacccaggggagccatcaccagcatgaggtccacacctggggctggggctgagtgctgtctacactgctctgtctacacggttactctggcacttgtcaggtccactcacctctctggcctcaaactgcagggggagatgggtccaatgctgggaggcactgggaggccgtggaacagtgaagagcggactgcacgggctggaggatgccagatgggcacacatgtcccccagggcagctgccggcaggagtctgacaaagggacccagccagcccctctggaccattctagaggccagtggtgaaggtcctgaagcaacttggcttatagagacacgttaagtgtacccggtgcaccccatgctgtgaccag

SEQ ID NO: 62292 - DNA, 545 bp, Homo Sapiens
caaagccctgtgtctttgactggcttctcttcagagtccccgttgtcatcgtaagacccttgctgtttggagggtggtcttgtgactgtggcagctgctggccgctggaatgaggagcctatctccatcctccagtgtgactcaggcagagcattgagaattcccagggcagaaatccttcctgctcaggctttcattctaaaactacagtcttcattaaagctgaactttctgggtagctgagcttatatgcccggcatctgaatgagagctctctttgtaactgtgtgacttgagatctagtttgccagctcctggaaaacaatacatgtgttcttgtttgtgtttgctcagcaagcagatgtctgagatgtaagaagcttttcttttcctgtggcattgattctgacttagagctgaagtaaagatcactgaaacatcacgtcaagttgaagtcactcataggtctttgtcctttaggcaggacaggagagtcattaagaagcatttcactgtagcattctatcacaatatcatctggaatt

SEQ ID NO: 62293 - DNA, 574 bp, Homo Sapiens
  misc_feature (490)..(490): n is a, c, g, or t
  misc_feature (551)..(551): n is a, c, g, or t
tttttataaggataagcaagcttttattccgtcaagagaacaaaggtcaggacttttatcctggtggggggatggggagtccaaattccttctctgatgaggcaaaaaaagaatcaagactcctgttcaagtaaagggcagagggtgagagctagtactcttattctagaaaggaagtagatacttttctttgataaaggaatgaacggtagactcctagtttgcagaaaaggtgggaaagatgtgacttgtactttggtaaggagatagggaaggaattaaggctattactctgaagaaagttggggggccagggctcctatttttttgctgaggagatggaagatcagggcttgtattcaataagaatgggaggggccaggggatgcctggcaaaagccttgcactgtgaggtgcaggtagaggcttttattctggtgagaggacatggactctctctctcccctcaggtaactgtgccctgtaccancggggaggctggtggtaccatgcctgtgcccactccaacctcaacggtgtgtggcaccacngcggccactaccgaagccgctac

SEQ ID NO: 62294 - DNA, 541 bp, Homo Sapiens
ttcaagttggcaaattttatttagaaaaaaaaaagtgggagagaaaaaagtgacagcgctctttagaccaaggacttagaagagaaacctccacccttccggagcacgttagtcccttccctctctcactgctcaacctccctgggcttccagagcaagaaaaggctacgtcccctgtcgaaggagagtggacggtgaaggtgcctggaaacggccagagaaaagacctaggcggtcgatgttgcggtggaggacactgtgcagcacagccagatggggtccaccctcacctccaccctccctggagaagtcccgaatgaagcgaccccgctctgattggaagatgaacttctgaggcaagggctcatgctcccggagaaaaccccagacactgagcagcagcagacgcacctcgaaaggtgccagttggctaaatacttcatgcatattacccagggccggaggcaggaggcttccctcagccatgacagccactaaggtgcaggatgcctccaggtgccagggggagtgggtcgtgtca

SEQ ID NO: 62295 - DNA, 521 bp, Homo Sapiens
  misc_feature (496)..(496): n is a, c, g, or t
ttttttggaatggaataggtctttctatattgcccaggctgcttttgaactcctgggctcaagcaatccacccgcgttggcctcccaaagtgctaggattataggtgggagccactgtgctcggcctctgacactaaataatgtcagttaagggaatgagaaaaagggcaggtcacgcacctggaacctgggctgtgccaaaaggtcaaatgtgcacgtatatacagtgactaggtgacaaatgcaatggagcatcccaggctgggatgaaggccaaggccacctacctatgaggaacaaccactgcctggctggaacgttccagaacccagtggtttccatagctgccctacgacttccgagatgactaaacccaccaaggactctatcacactgcttgtcttggccactcacccaccgtggatgtgcacagaccagtggctcccacgcagcacaggccagacaaaagctggaaggtgaaggcttcttaccttanaaagacaaagtggggcaaccgtgga

SEQ ID NO: 62296 - DNA, 586 bp, Homo Sapiens
tttttttttttttgttgtttcccttcatttactcacagatgaaaagattaacacgtcagcaaatcaaaatcagagaattcctaaggcactctgtgcaacaggagcgggtggacgtgggggtgggtgcacgactggcgcggctgcctccacacgggccctcctgaagttaccttggcccggctgctggctacgggaacgctgggtcctcgatgccatggtcggggttgcagctgaaggcgatggtgatggcgtaacgggtgccccagtggaccttctccacgcggtgtaggttctcggaccccgaggtgaagaaggagacgcgaccagctctcggctccaccgtcttgttggcaccctcctccatgaacatgaaccgccctccgccgaagtcctccaggtagttggagaggtacagcagcgaggtgtagtcgaaggagccgtaggtcaccttgtccacgtgcgcatgccagtactcgtcgtgcgccgtccgcgcttccgtgctgtttatgcgggagaagaaggtgggcttggtcagatgcagcgaggatgcgctgatgccaaaagcctcagcaatggtgagctggac

SEQ ID NO: 62297 - DNA, 552 bp, Homo Sapiens
  misc_feature (501)..(501): n is a, c, g, or t
gcaaatcataaggaagtttttattgggtcctgtacagaagagaaatgctccgttgtcaaaaaactacaaagggatccctggctctgggtgtgctatgaagacaactccctccccagtgagcccagggaacaggctggatgctggacaaagtttgggagggagctccaggcccagggtcctccacttggggtctccccctttatgtttgtaaaaaccgcaggattggagtatttagaggactctgtccccctgcaagttttgccgttggatatgaaacacacagagcaaaaccccaaggtgacaaatgagtgaaaacctaaggtgacaagtggacagacgccccccagatggaggagacactggctagctggcgacctctgcccctacgtaacttgtcagtccttgaaggcacagcagcattggccagagatggcccctcccgcggccagggctggattgcagttccctgccttgctcacctgtggccacagctcatacccncagttaccccacagccagggactggaggggcctctgaagcacagacaggct

SEQ ID NO: 62298 - DNA, 516 bp, Homo Sapiens
  misc_feature (251)..(251): n is a, c, g, or t
  misc_feature (261)..(261): n is a, c, g, or t
  misc_feature (496)..(496): n is a, c, g, or t
ttggcaatcacaccgtttattcgcacttggcagcaagacaatggatgatgtgggaggtgccaggcccctgggttggcactaatttggagtatggttgagacagggctggagagaggcatcttagaggtggcccccaaatccgcaatcgggagaaaaaggcaagaatcgactagagattgtcaggataaagggaggcactgcccacccctgctatgtctgtctgcccccacaggggcttctttaatacctgnggttccctgngtgatgaatgtcctcctaccctggcaaggggccatacctgtcgccgtggccccataggcaaccctgatgaaagagtatcatttccaagggggctttggtttctgggtggccccacctcgtcgtggggtagatggcactgaaatgctaactgagcgagccctggaagtcaccagggggctccggaaggtcacccctgacgtggaaggcctgagatcctgaggcccatttgtgtggngggcactggtggctggatga

SEQ ID NO: 62299 - DNA, 5091 bp, Homo Sapiens
gggggcagccgactctaaggtgcatgtgcacgacctgacagtaaaggagaccatccacatgtttggagaccacacaaaccgggtgaagcgcatcgccacagcgcccatgtggcccaacacattctggagtgctgctgaggatgggcttatccgccagtatgaccttcgagagaacagcaaacactcggaggtgctgattgacctgacagagtactgtggccagctggtggaggccaagtgcctcactgtcaacccccaggacaacaactgcctggcagttggggccagcgggcccttcgtgaggctctatgacatccgcatgatccataaccacagaaagagcatgaagcagagcccttcagcgggtgtgcacaccttctgtgaccggcagaaaccccttccggacggtgcagcccagtattacgtagcaggtcacctgccagtgaagcttcctgactacaacaaccgtttgagagtgctggttgccacctatgtgaccttcagccccaatggcacagagctactagtcaacatggggggggaacaggtctatttgtttgacttgacttacaagcagcggccgtacaccttcctcttgcctagaaaatgccactcctcgggggaagtccagaatggcaagatgtccaccaacggtgtgtccaacggtgtgtccaatggcctgcaccttcatagcaatggcttccggctgccggagagtaggggacatgtcagcccccaagtagagctaccaccatacctggagcgtgtgaaacagcaagccaatgaggcttttgcctgccagcagtggacccaagccattcagctttacagcaaggctgtgcagagggcccctcacaatgccatgctttatggaaaccgagcagcagcctacatgaagcgcaagtgggatggtgaccactatgatgccctgagggactgcctcaaggccatctccctaaacccatgccacctgaaggcacactttcgcctggcccgctgcctctttgagctcaagtatgtggctgaagccctggagtgcctggacgacttcaaagggaaatttccggagcaggcccacagcagcgcttgtgatgcattgggccgcgacatcacagctgccctcttctctaaaaatgatggtgaggagaagaagggacctggtggcggcgccccagtccgcctccgcagcacgagccgcaaggactccatctcagaggatgaaatggtgctgcgggagcgaagctacgactatcagttccgctactgcggccactgcaacaccaccacggatatcaaagaggccaatttctttggcaggtccgaggccctgaagaggagggtgcagcccagttggcagcgggaggttgagtggggagtgttggggcataatggtttcagagaagaatctcaaatccctgctctgcctctgtacccttgggcaaatggcttcacctttgtcagcctctaaagttttttaatctatgaaatgaccaacctgccatgcccatttatgaggccataacaaggactaataagataacccaagtagagcctccagcgcagtgcctgaactactccttcatcccccacctccttctccctctgtctgcatgtgccagagcttggtttctttatctgcattcaaggaacctccctctgcttgagagtatgaggcagcagccctccaaggctgggaatcttggcacatctgttttgtgctcaaaactgtgccctgtgtactaagggacaaactctgtgtttcagacaccatcatccccacccctcatttgtagatgtactttctttgggtaggtgagacacatgaacatgaatcaagaatctctccataggccaggcacagtggctcatgcccgtaatcccagcacttggggaggctgaagcaggaggatcgcttgagcccaggagtttgagaccagcctggacagcatagacccccatctctacaaaaaatgttttaaattatctgggtgtggtgacgtgcacctgtagtcccagctattcaggaggttgacattggaggaccagttaaggccacagtgagccatgatcatgccactgtactccagcttgggtgacagaatgagaccctgtctctaagaaaaaaaaagaatccatcaagatgccctctaaatgtcagtggtgtgtgaggggcagggggagtctggatgccagaagcctggaactgctcaggggaggcttaaaacagggtattttggagacccgagagatgatgtaagatgatcctggcccaaggaggtaataatgaactataggggagactgtcttggagaaatccaggtagtcgctggccctaggtttaagagaacagtgaccagggctatatacctggaggaattctgggtcaagtgcacaccccagcgtgtgggggactgagtggctgcagacttccttgctccccctttacctaggccatgcagcctctacttgaggctgtagggcagtaccccacctgacctccctgccctttgcccccccgccagcaacgctcagtatatcgtcagtggctctgacgatggctccttcttcatctgggaaaaggagaccaccaacctggtccgtgtgctccaaggggatgagtccattgtcaactgcctgcagccacaccccagctactgcttcctggccaccagtggcatcgatcctgttgtgcggctctggaacccccgaccagagagtgaagacctcacaggccgagtcgtggaagatatggagggtgcttcacaggccaaccagcggcgcatgaatgcagacccgttggaggtgatgctgctcaacatgggctaccggatcacgggcctgagcagtgggggtgccggggcctctgatgatgaggacagctctgagggccaggtgcagtgccggcccagctagaccctccagccctggtccccagcccctgctactggctggaccctctgccctgggcaggaggtcaggggattctgttttggtttgtcttccccaccacccttttttttcatttcccctgttttgtttgttagtttggcgttaggggtggaggttgctacaacttgctggctttcggactctgggctgattgtcccctgactatccccagccctgaaaaaaagagcaggaggggacacccctccatatgccccccccatctcctgctttcatgtccctggagggctctggcctgcctcaaaaccccttctgcctcaggtggggaggaacaagctgaactgtcttcagggactgtcctgccctttagctggcagcagcaggaggagtgggattcccaattggtaagggctcgccttggcctgttgccactcttgctccctagcctgcaaggctagctcccctgtggtcttcaggaaaggttttgaaaaaggatgggtcccaccctccctccagagccaccagtgttagagcggagcccaaaggaaggatgggagccctggagtgggcaagaccaggccacctgctgaggtcgctgtggagcaccctcgctcctctcctggctactagctctggccctgcacctactctcactggccacctctggaggctctgcctttcccaagggccctggcagagggtggggcactgcaccttaccccacccatccatgccagcacttctgcactacggccattctcctcttgggcgctcctcagcctcactgtgacctttctgccagagctcccagccaggcctactctgctgaggtggcgcttcctgctaagggcccttctctgccctttctgccctccttcccatcccacatgctgagccgccacaaagaccaaagaagtgatggcttttctctgtcccctgctgctctgaggggagaggggtgggtctcctgagccactcagatgggaaagtcccttactcggcccctccctccccagcagccccaagctttacactggatgcagcgatcaacccaccactcaccaggcctctcctcccctctgcccccggctcttagctccagctgctccaggtagttggttcatccttccccctctctccctccctgcttccccttcagtgcttacttggctccagccctccagctgcagcccctggggaaaagcagcctcccttctcctctccctccactccctcgctccctccctcagcccctgtctctgccaggtgcctcctctcagtcaggcttcagagcagccctggagacaggagggccatgttaaaagctttttcacagttttaagaagacaagtggagggtgaggatagtggtggggggtctggcaccatctcattgctttaatcccagcaacacaggtggcagcttctcccccttccttcccaccccagtccctcttcccacccctctcttctagcttggtaatgaagtatatttattggtgaaggaaacagctgctgctgcttctcctgctgctgggacctgctcccctgtctcttctccgtgacctttctctagccagggagaagggagagcaggagtattggggctgggccctggggcccaaggaccagctgggtcccctttgctttcttgtgttccagccacctgccatttcctccctgcctcccaccctccctccctgccccctgtcctgcttcccaccccctgcctgcccagcctgggccctgcagtgtggagagacacataagccttactgtcctctgggggcaggagccgagcctttttgttgctccgctcccaggagagtgagggtgacgcaattgattaaaaccattttgttctaggtgtggctggtggcatttgtggggtgcagatgggtcttggaaccaaagtgagggcacctggtccctcacctctgtagctctatgacttagtaaccacacctctactggacagaatgaggcctgccttgaagggtcaccgtgagcagcggccacccagcccagcagggctgagtgcagagcccagctctcatggctgtgatttgtaatcatcagctttcactctctggctgttttctcatcagtaaaataagggacttggaatcttagtggtttttcaaaccattttacattgtgacccaatatacacatgattacttgt

SEQ ID NO: 62300 - DNA, 4329 bp, Homo Sapiens
ggaggctgtgcatcgacttgacctcatcctttgcaacaaaactgcttatcaagaagtattcaaaccagaaaacattagcctgaggaacaagctgcgtgagctctgcgtcaagcttatgttcctgcacccagtggactatgggagaaaggctgaggagctgctgtggagaaaggtatactatgaagttatccagcttatcaagactaacaaaaagcacatccacagccggagcactttggaatgtgcctacaggacgcacctggttgctggtattggcttctaccagcatctccttctctatatccagtcccactaccagctggaactgcagtgctgcatcgactggacccatgtcactgaccccctcataggatgcaagaagccagtgtctgcctcagggaaggagatggattgggcacagatggcatgtcaccgatgtctggtgtatctgggggatttgtcccgatatcagaatgaattagctggcgtagataccgagctgctagccgagagattttactaccaagccctgtcagtagctcctcagattggaatgcccttcaatcagctgggcaccctggcaggcagcaagtactataatgtggaagccatgtattgctacctgcgctgcatccagtcagaagtgtcctttgagggagcctatgggaacctcaagcggctgtatgacaaggcagccaaaatgtaccaccaactgaagaagtgtgagactcggaaactgtctcctggcaaaaagcgatgtaaagacattaaaaggttgctagtgaactttatgtatctgcaaagcctcctacagcccaaaagcagctccgtggactcagagctgacctcactttgccagtcagtcctggaggacttcaacctctgcctcttctacctgccctcctcacccaacctcagcctggccagtgaggatgaggaggagtatgagagtggatatgctttcctcccggaccttctcatctttcaaatggtcatcatctgccttatgtgtgtgcacagcttggagagagcaggatccaagcagtacagtgcagccattgccttcaccctggccctcttttcccacctcgtcaatcatgtcaacatacggctgcaggctgagctggaagagggcgagaatcccgtcccggcattccagagtgatggcacagatgaaccagagtccaaggaacctgtggagaaagaggaggagccagatcctgagcctcctcctgtaacaccccaagtgggtgagggcagaaagagccgtaagttctctcgcctctcctgtctccgccgtcgccgccacccacccaaagttggtgatgacagtgacctgagtgaaggctttgaatcggactcaagccatgactcagcccgggccagtgagggctcagacagtggctctgacaagagtcttgaaggtgggggaacggcctttgatgctgaaacagactcggaaatgaatagccaggagtcccgatcagacttggaagatatggaggaagaggaggggacacggtcaccaaccctggagccccctcggggcagatcagaggctcccgattccctcaatggcccactgggccccagtgaggctagcattgccagcaatctacaagccatgtccacccagatgttccagactaagcgctgcttccgactggcccccacctttagcaacctgctcctccagcccaccaccaaccctcatacctcggccagccacaggccttgcgtcaatggggatgtagacaagccttcagagccagcctctgaggagggctctgagtcggaggggagtgagtccagtggacgctcctgtcggaatgagcgcagcatccaggagaagcttcaggtcctgatggccgaaggtctgcttcctgctgtgaaagtcttcctggactggcttcggaccaaccccgacctcatcatcgtgtgtgcacagagctctcaaagtctgtggaaccgcctgtctgtgttgctgaatctgttgcctgctgctggtgaactccaggagtctggcctggccttgtgtcctgaggtccaagatcttcttgaaggttgtgaactgcctgacctcccctctagccttctgctcccagaggacatggctcttcgtaacctgcccccgctccgagctgcccacagacgctttaactttgacacggatcggcccctgctcagcaccttagaggagtcagtggtgcgcatctgctgcatccgcagctttggtcatttcatcgcccgcctgcaaggcagcatcctgcagttcaacccagaggttggcatcttcgtcagcattgcccagtctgagcaggagagcctgctgcagcaggcccaggcacagttccgaatggcacaggaggaagctcgtcggaacaggctcatgagagacatggctcagctacgacttcagctcgaagtgtctcagctggagggcagcctgcagcagcccaaggcccagtcagccatgtctccctacctcgtccctgacacccaggccctctgccaccatctccctgtcatccgccaactggccaccagtggccgcttcattgtcatcatcccaaggacagtgatcgatggcctggatttgctgaagaaggaacacccaggggcccgggatgggattcggtacctggaggcagagtttaaaaaaggaaacaggtacattcgctgccagaaagaggtgggaaagagctttgagcggcataagctgaagaggcaggatgcagatgcctggactctctataagatcctagacagctgcaaacagctgactctggcccagggggcaggtgaggaggatccgagtggcatggtgaccatcatcacaggccttccactggacaaccccagcgtgctttcaggccccatgcaggcagccctgcaggccgctgcccacgccagtgtggacatcaagaatgttctggacttctacaagcagtggaaggaaattggttgatactgacccccaggccctgcagtggggctgactccagatctctcctgccctccctggcagccaggaccagcacctgtagtcaccccaccacacgcagactcatgcacgcacacaggagggaggcctagctgctcagaggctgcagggagggcccaggagccggctgggagggtggggtccctttgttgccaagacgttaggaaagcgaggaaagtgcttggattaggagagtcttgtgggcccctggccagccttcctgcctcagctcccctgctgtctccaggggcaggtggtaggcatgggtacctgcatttcactggagtgggttcttggatctctgaggggaaggaacagcaaaagaggcccttcttcctcacccaagatgcagggtggttggggccaggagtttggaccctctaggtcttgggggaagagctgggtaatacctggtgtctgagtgattctctgcagacccttcccctcctcaaggatcacccatcctcctttcagccccctttatggggaccaggcagctctggagccagccacaggggctgttagagaagcaaggcctggagtggcctgcaccgagtagcagggtcagggttcgtgtgctcctcctcctgctgcaggggctgcacatcccattgccccacttctgctttgtgtctccctctgtctagcttccagggcagggagcaggccccacctagggctgcaggcagtctggcctgtgccagcacggtctcctgtgcccaccagccccacaggtgctgtgctttgtgctcttggctgctgtgctgggacagaatgggatgccaggaagagaagaaagggggtgcagtctgaggccaccaccccccttcctatctaagggagggctgaagacaaggggccggcattcagtgggcagcagaaaggagaggccccttgaagctgctcagtcagaggcccccgtccctccttttgccttccgcaggactgaagacctgaaggggctggcttttggagtgttgaggtgaatatctgggagcagagatcatgaatagctcagggcagtgaatggcgcaccaagagcagggctgtgtgtgggaggctgcagccaggattgcctcagctcctccccctcaggctgggaggatagcacaggctaggggctcggggtggagggtctcagctctgctgcccccaccccagtactagcctagcttcccaagctgtggcttagaggatagttggcttcctgcctctctcctctaaaatagcaagtctgggaaatcctggggtgagtggagtcaccccactcccagttgctggcagagactgagactaaagcatcacttaataaaccccccaagccc

SEQ ID NO: 62301 - DNA, 4440 bp, Homo Sapiens
caattccaatggttgtgtctgattttgatcttccagaccaacagatagaaatacttcagagttctgactcgggatgttcacagtcctctgctggggacaacttgagttacgaagttgatcctgaaaccgtgaatgcccaagaggattctcaaatgcccaaggaaagctccccagatgatgatgttcaacaggtagtatttgacctgatatgtaaagttgtaagtggcctcgaagtggaatctgcatcagttacatctcaattagaaattgaagctatgcccccaaagtgcagtgatatagatccagatgaagagacgattaaaattgaagatgactccattcaacagagtcagaatgctttgctgagtaatgaaagttctcagtttctgtctgtgtctgcagagggaggccatgagtgtgtggcaaatggaatctccaggaatagctcctcaccttgtatttcaggaaccacacacactcttcatgactcttctgttgcttccatagaaaccaaatctagacaaaggagtcacagtagtattcaattcagcttcaaagaaaaattatcagaaaaagtttcggagaaggaaacaatagttaaggagtcaggtaaacaaccaggagcaaaacctaaagtaaaacttgccagaaaaaaggatgatgacaagaaaaaatcttcaaatgaaaaactcaaacaaaccagtgtattcttcagtgatggtctggatttagagaactggtatagctgtggagagggagacatttctgaaattgagagtgacatgggttctccaggatctcgaaaatctcccaatttcaacattcatcctctctatcaacatgtgctcctgtatctccagttgtatgattcatccaggactttgtatgctttctctgccatcaaagccatcttgaaaactaaccctatagcttttgtaaatgccatttcaactactagtgtaaataatgcatatactcctcagttgtctctccttcagaatctattggccagacaccggatttctgttatgggcaaagatttttatagtcacattccagtggactcaaatcataacttccggagttctatgtacatagaaattcttatttctctctgcttatattacatgcgtagccattacccaactcatgtcaaggttactgcacaagatttaataggcaatcgaaacatgcaaatgatgagcatagaaattctgacactactcttcactgagctggcaaaagtaatagaaagctcagcgaagggtttccctagttttatttctgatatgttatctaagtgcaaagttcagaaagtgattcttcattgtttgctgtcatctatctttagtgctcagaaatggcatagtgaaaaaatggcaggtaagaacctggttgctgtggaagaaggtttctcagaggacagccttattaatttctcagaggatgaatttgacaatggcagcacgttgcagtcacaacttcttaaggtgcttcagaggctgattgttctagaacacagagtaatgactattcctgaagagaatgaaacaggttttgattttgttgtatctgacttagaacacatcagtccccatcaacccatgacttctcttcagtatttgcatgctcagccaatcacatgtcaaggcatgttcctctgtgcagtgatacgagctttgcatcagcactgtgcatgtaagatgcacccacaatggattggtttaatcacatctactctgccttacatgggaaaagttctgcagagagtggttgtttctgtgacactacaactgtgcagaaatttagataatctaattcagcagtacaaatacgaaacaggattatctgatagtaggcctctgtggatggcatcaattattccaccagatatgattcttactcttttggaagggattacagccattatccattactgtttgttggatccaactacacagtatcaccaacttttggtcagtgtagaccagaaacacttgtttgaagcacgcagtggaatcctctcaatccttcatatgatcatgtcctctgtgacactgctttggagcatactgcatcaagctgattcttcagaaaagatgactattgccgcatccgcatctcttaccactattaatcttggagctacaaagaacttgagacaacagattcttgaattgttgggccccatttcaatgaatcatggtgttcactttatggctgccattgcatttgtgtggaatgaaagaagacagaataaaacaaccaccaggaccaaggtcattcctgcagccagtgaagaacagcttttattagtggaattggttcgttcaatcagtgtcatgagagcagaaactgttatccagactgtaaaagaagttttaaagcagccaccagccatagccaaggacaagaaacatctttctttggaagtctgcatgcttcagtttttctatgcttatattcaaagaattccagtgcccaatttagtggatagctgggcgtcactgttgatacttctgaaagactctatacaactgagtcttccagctccagggcagtttcttatacttggggttctgaatgagtttattatgaaaaaccctagtttggaaaataaaaaagaccaaagagaccttcaggatgtaactcacaaaatagtggatgcaattggtgcaattgctggttcttctctggaacagacaacatggctgcgacgaaatcttgaagttaagccttctcccaaaataatggtagatggaaccaatttggaatctgatgttgaagatatgttatcacctgcaatggaaaccgcaaacataactccttctgtatatagtgtccatgcattgacattactctctgaggttttggctcatcttttggatatggttttctatagtgatgaaaaggagcgggttattcctttacttgtaaatattatgcattatgttgtgccctacctcagaaatcacagtgcacataatgcccctagttatcgagcttgtgtccagctgctcagcagtcttagtgggtatcagtacacacggagagcttggaaaaaagaagcttttgacctctttatggatcccagtttctttcagatggatgcctcttgtgttaatcattggagagcaattatggacaatctgatgacacatgataaaacaacatttagagatttgatgactcgtgtagcagtggctcaaagcagttcacttaatctctttgcaaaccgtgatgtggagctagaacagagagctatgcttcttaaaagattagcatttgctatttttagcagtgaaattgaccagtaccagaaatatcttccagatatacaagagagattggttgagagtctccgtttgccacaggtgccaactctccattctcaagtgttcctgtttttcagagtgttacttttaagaatgtctccccaacatcttacctcactctggcctaccatgattacagaacttgtacaagtatttttactgatggagcaggaactcactgctgatgaagatatttcacggacttcagggccctctgtggctggtctggagacaacgtacacaggaggtaatggcttctctacttcatataacagccagcggtggttaaacctctatctctctgcttgcaaatttttggatttggctctcgcattgccctctgaaaaccttcctcagtttcagatgtaccgatgggcctttattccagaagcctcagatgattcaggtttggaagtcagaaggcagggtatacatcaacgagaatttaaaccttacgtggtacgactagcaaaacttcttcggaaaagagcaaagaaaaatccagaggaagacaactcagggagaacattgggttgggagccagggcacttgctgctcaccatctgcaccgtgcgcagtatggagcagctcctgccgttcttcaatgtgctcagtcaagtcttcaacagcaaagtcacaagccgatgtggaggacactcagggagtcctatcctctactcaaatgccttccctaataaggacatgaaactggagaaccacaaaccatgttccagcaaagccaggcaaaaaatagaagagatggtagaaaaagattttctggaagggatgataaaaacttgagcaccattgctggttccatttagcttacatgtaaatgtaattatttaaaacacacacactgctctgcgttgtatagtttttccttttttgtatgtaacagaacacatttcagattgtatttaatttaaatatttgtatataagagcaaatgtctgaatgtggcctgaatcaagtttaaatattgttggctcatactgattatggtgcctaagagagctatatatatacacatgtaaagtccattgtttttattgtcctgagttgtcttaaacctgcaaaatatacactacccattttttttttc

SEQ ID NO: 62302 - DNA, 596 bp, Homo Sapiens
tttttcattttttttttttatttgtcaatataaaaatactcaaatatttacaacaaataaatacgcggggacacaataagttacactgttaggagccctcctcctagggctggaagagagtatgccattgtccacagcaggcccaccctctcccttctttcccctcacacagcctttcccagccctgtacaggaagaaggcaagtataaaataccactgaaccccggggccaagtgggagggccccaccaacccttccccccaaacacacaggaggctccatttccctccccccaccctgaaaacattcacagccctaggagcaggactaggcccaccccaagccctgcactccctctgaaggggcacagcaccctgtccaccccacctccatatgtacatcgctgcccgacactcggggcagtgggggtaggagagacaaagtgatacgaccccttccccttcatagctccaatgactcaccaggaggacccaggccaagggaagacttgacagaaacaggaaggctatgccacaagcgcgcacgcgcgtgcacacacacatacacacacacacaaacacatgtgcaaatacaga

SEQ ID NO: 62303 - DNA, 750 bp, Homo Sapiens
  misc_feature (212)..(212): n is a, c, g, or t
  misc_feature (539)..(539): n is a, c, g, or t
  misc_feature (719)..(719): n is a, c, g, or t
tttttttgtctctgggtagtcacgctagggctggcaggggaggaggcagaggaaaggcaggaagaagagaaaacatcactgaaaaagaaggtgtcggggaggtacaccctgattctgaccagcccagcccacacagagggtctgaaaggttctcagccttctccatcacccaccctgcggcctctgaaaagaggggcccatctcagacacanaagcagatactcccaaccttatggggaaagctaacggaggaatactcacagcaccgtggcacgggacggcccttggcttcagagccgggctggcaccgtttgtaaacattagacctggtgatgtctggggatggaggaggagagggatgcccagcctggaccatcaggtttgatgaaagagacagggtggggcccctcaaggcctgggaaatgtctattagctatgggaaagaggctgacaggttcatggtgggggttgcccaggaaggtgtggacaaggtctgaatctacctgactatgcatttgcatgacttcagtgctaccggntgaagtggccaggctcctgaagaagctaccactggccctgggtaatgagcacaacccctactcaggacagggtgctctgtggaagatggtgggcttctgtccataggcattctccaaaaagaagcagaactggatcttcttatgagaactacgactctttttccccgggattccagcctntgggagttgaaactggggaaagaaagaaggc

SEQ ID NO: 62304 - DNA, 382 bp, Homo Sapiens
ccttcaaaaaatattttattctgcacatttcctagtaggctctctgcccaccgttccagggtagcagctactcataacttgtctttctctccaaaaccaagagggccttcccaacagaaaaaccttcagttcccaaagcagcatcgattcttcccctcaccccagcaaacctcggggtggaataatgaatcattcaccttctcccacccctcactgccccgccccaccttcatttgccaggactgtcactggctgatggtcagattttggcttttttcaacttggataccctcaagcatcccagcttttggaggcttccctgggcaacctcatgggcttccacattgaccaggcattacattcagcatccttggacaaacca

SEQ ID NO: 62305 - DNA, 490 bp, Homo Sapiens
  misc_feature (296)..(296): n is a, c, g, or t
  misc_feature (440)..(440): n is a, c, g, or t
  misc_feature (446)..(446): n is a, c, g, or t
ttttttttttttttccaggaaaaacgacgttttattttcataaatactcctgctctcactcacacactgaccccacttttgaccacggacaaatggatggacagacgtaagacacccataggaggccccagcagaggccaatgaatgaaggaaacacaccgaaaactctaggtgccccacagcccctcgctggggccatgggcctttggcattacccttgagcccccacagtccctcagggggcccaatggcaaagggaaacccccaagagtacgggccaggtgaggtttccccancctggccccctgaggctgtgaccacagggccaatccggaagaaaagcagagtcaaaccacacaccaaagtgcaaatagctgggggtgtaggcgtcaccccccaatcactgggttcctatggaggaggcctaagctggtccccanctccancatggcccccgagttatggctgggccttcccataaggcataaaa

SEQ ID NO: 62306 - DNA, 613 bp, Homo Sapiens
ttttttttttaggatttctattcatttttattcattcctccaaagagcaccacaggccaaccacacccttgatgtgtccttcatggttccccactgcagtggacacaaatccctccatcattatccaggcatggatggaactctgctgtggtgaggaggttgtctcgcccactcacccaagttttccatgcctgttctgcttttgatggcaatgccaaaattcatcatacatttccttgaattcctgccttcaagggtctttccagcctgtggtgccatgcagacacacttcagtggcggccagtgatctgtctacaagggagtcttagtcttttctgcttggatgctcccagggacagatgcctgccaacaaccttatgtcttcacaaagactaaaatggaatcccattaaaagttatgatttaaaaggcgaccacccccaaaagaagtcataacactcaagggtgtcaatatatacaactgtgtaaacacaaccaatctacaactatatcaacacaaccagcactcctctatgggcacagacacacacacaaaattgtcttgctttctcagatatgatctctggcatgactcctgctggcatgagggcaga

SEQ ID NO: 62307 - DNA, 570 bp, Homo Sapiens
tggtaattcattttcatttattttcaccaatgcaatagataaatctgtcatgaggttaatttctcctaatctgtataaaataattccattaacctgtgaaaagtaatgatcatactgatttgtctagggctcaaacccttagacaaacatctctttgattacctgtttgtgtaaagaaaactgaatgcattttatattaatatttaaactactgataactgtaaacaaagtagcatttattaaaatagaatatacacttaatttatactaaattccagggagatttatacaagtttttcagccttaatttttaaaggaatgcatgattttttttaaacattaccagtcaagtatatacaaaattgaagtatgccattcaagccagattgtgattttaaaataacaaacctctaaatagctaagtaatgtacaatgtgtaaaattccaattaaacacaggtataaatcttatataaatattggccctataataccgagcgatatttacaagcaaacatgatccaaacagcacatgcagattcagggtaagtaaatactcggacacgaactg

SEQ ID NO: 62308 - DNA, 839 bp, Homo Sapiens
  misc_feature (575)..(575): n is a, c, g, or t
  misc_feature (638)..(638): n is a, c, g, or t
  misc_feature (726)..(726): n is a, c, g, or t
  misc_feature (741)..(741): n is a, c, g, or t
  misc_feature (764)..(764): n is a, c, g, or t
  misc_feature (835)..(835): n is a, c, g, or t
aagtgatgtcgttttttttgttacagttaccagtatgacaggtgggaaggggccgggtggggttctggccagagggacctaagaacattaggtcctggcaggtgcagccctgggagcagccacgagggggcatcaggctgcacaggcggctccaggatgtcggtccgggaccgggcataggggttagcgagtgattctcgggcaccgcaggacgagccctacacagagcaggtgggcccaggaaccccctttctcagtccaggactcccaggcctcagggcctggctttggtggcgcccgtctgttgcagtggagttcggcggtcacagcctagggaccgggtccagcccagccagctcagcagcaggtcagcgccctgccccttcccgcgtcgctgggacgccccgagccgctcaggtcaccacgcaaaagccctgggtaatccgccgccagaagttgcgaccgcggctgctgagggccacctcggcggcctcctggaagacggcgtggacgttgtcatggagccgagccgagcactcgaggtaggccaccgcgcccacggaccttcgcatctnctggcccctgtggtaggtcacaggctccaatccgtttctttcgagcttgtttaccagtgattngtccttgcgcaggtcagtcctgcagcccacgacgatgatgggtaccttcttgcagaaaatgatcactttctggtaccaccgctctaangatgttgcaagctgntctggcttgtgacatcgaagcanagcagcaggacgcctgctgtcagggtagaacaggggcccgcagcgggcatagtcactcttgcctgctggtnccca

SEQ ID NO: 62309 - DNA, 454 bp, Homo Sapiens
  misc_feature (384)..(384): n is a, c, g, or t
  misc_feature (387)..(387): n is a, c, g, or t
  misc_feature (389)..(389): n is a, c, g, or t
  misc_feature (392)..(392): n is a, c, g, or t
  misc_feature (394)..(394): n is a, c, g, or t
gttttgctgattttttatagcttttgtttttgtttttttttagaaagtttctctgtcatcaggcaaagaccagggtgggaacaggaaaactagaaaactggtcaagggagaacaagtcccttttcctctcaccagtgaacagcaggtgaggaaacagactctgggaggaacgctgttcaggatggcttgctgcctgcatggcatgaggctgctgtcttgtgggtgctggcagccacaatctccatttttctgaagaccaccatttatggctagatccagtagaggtccagaactttcccaacactgctggagaggaagtgtttcacagtcagaggagagagccatggggaatggaagcaggggaagaaggggtggggaggggangananatnantggctctatgctaatcttagggttccttctctgcccttttgggtaccagagacagaccct

SEQ ID NO: 62310 - DNA, 661 bp, Homo Sapiens
tttttttttttttaaaatcaatacaaatcttttattaaagatctactcataccatggctgaaatcatctattattgttgctagttagcctctcttctatagttgggtaatgttgtcttgccactgtgtttgccatctctcccaagtgaaaagaacactttttaaaaaaaattaattgctccaagttttcaggcccaggggaggctctcccattctcctccttcaataagtcccgtccaggaaagggtgatcttgtggataaattcatcatacttcactttgccattgggttcgatatctgcttccctgaagagatcatccacttccttgtgggtgagcttctcccccagactcgtgagttttgaccgcaggtcggacgccatgacgtaacctttcttctccttgtccaccatcaacatggctagaagaatttctttctttgggtcttcttgttttatttgcatgtgcataatggtcagaaaagtggagaaatccagctctccatttccgtctatcccgtgggtctgcaggtgccgctgcacctcccctggcgttgggctggcccccaggcacctcatggccaccatgaggtcgggggctttatcttccccctctgctgctgtcatacaaggagaagcatttcttgtctcattaatttggtc

SEQ ID NO: 62311 - DNA, 477 bp, Homo Sapiens
ttccagagccacattttattccaggatgcgacacggggcggcggatgcctggcctcggaaaccccctccctgcctatgagggcttgtccagggctcccctggaacacagctcagccaggcaaggctgggagagggctgggccccccaggtgacctgcagacgcctcccccacctacatgccccacgcaaggggagccctggagcccggcctgccttgacaggaaggagataggtgaaaaataaatacacggctgggccgcctgcagcaagcgcgacagtgcccgggacccccagggccactcctgcctctggtggcctcaccgcggcccaggccctcgtccccaagggttcagacaccactgtcggcgagcaccgtgctgggcgcagaggccacgtgtggtgggacggcagcctgctggcccctccaggtgaggaccaggagcacaggctgtggcaactccagcccgggcaggggcc

SEQ ID NO: 62312 - DNA, 512 bp, Homo Sapiens
ttattgaattaaactttactactggatgtaagaagtggcttagagtccagtgtaacatggtggctgggagtgtgagtggatgaatggggggcccgatataggaactggggcctctgggatgaggccgagttccattcctgtccttcttccacgaccatccttaccttcccacccccaccgctcccattctgcagatgagaaaaccgaggctccgaaaggaaaaaccactgcctggattcccacgcctcttctttaactcatttgcaggtgagggcagggaaggaaaatcctagggtcagcattggggagggggggactctcctaaatttattgggcaacaggctgcaggtgagggggctgacaggaggagggtcggggtgtaataacttaaaaaccgtaggtgacagcggcagctcctcaagagacctttgcagaggggagggtgtggggtatttacaaggattttgtacaaagtgccccgcgccagcctggggcaggaagtgggggtttga

SEQ ID NO: 62313 - DNA, 612 bp, Homo Sapiens
gcacgaggagcagatccgcctgaaggcggccgagcaccgtcagaccgtcttggagtccatcaggacggctggcaccttgtttggggaaggattccgtgcctttgtgacagactgggacaaagtgacagccacggtggctgggctgacgctgctggctgttggggtctactcagccaagaatgccacgcttgtcgccggccgcttcatcgaggctcggctggggaagccgtccctagtgagggagacgtcccgcatcacggtgcttgaggcgctgcggcaccccatccaggtcagccggcggctcctcagtcgaccccaggacgcgctggagggtgttgtgctcagtcccagcctggaagcacgggtgcgcgacatcgccatagcaacaaggaacaccaagaagaaccgcagcctgtacaggaacatcctgatgtacgggccaccaggcaccgggaagacgctgtttgccaagaaactcgccctgcactcaggcatggactacgccatcatgacaggcggggacgtggcccccatggggcgggaaggcgtgaccgccatgcacaagctctttgactgggccaataccagccggcgcggaagacctgtccctgc

SEQ ID NO: 62314 - DNA, 1413 bp, Homo Sapiens
  misc_feature (1287)..(1299): n is a, c, g, or t
catatcacggccatggggtctcagcattccgctgctgctcgcccctcctcctgcaggcgaaagcaagaagatgacagggacggtttgctggctgaacgagagcaggaagaagccattgctcagttcccatatgtggaattcaccgggagagatagcatcacctgtctcacgtgccaggggacaggctacattccaacagagcaagtaaatgagttggtggctttgatcccacacagtgatcagagattgcgccctcagcgaactaagcaatatgtcctcctgtccatcctgctttgtctcctggcatctggtttggtgtttttcttcctgtttccgcattcagtccttgtggatgatgacggcatcaaagtggtgaaagtcacatttaataagcaagactcccttgtaattctcaccatcatggccaccctgaaaatcaggaactccaacttctacacggtggcagtgaccagcctgtccagccagattcagtacatgaacacagtggtcagtacatatgtgactactaacgtctcccttattccacctcggagtgagcaactggtgaattttaccgggaaggccgagatgggaggaccgttttcctatgtgtacttcttctgcacggtacctgagatcctggtgcacaacatagtgatcttcatgcgaacttcagtgaagatttcatacattggcctcatgacccagagctccttggagacacatcactatgtggattgtggaggaaattccacagctatttaacaactgctattggttcttccacacagcgcctgtagaagagagcacagcatatgttcccaaggcctgagttctggacctacccccacgtggtgtaagcagaggaggaattggttcacttaactcccagcaaacatcctcctgccacttaggaggaaacacctccctatggtaccatttatgtttctcagaaccagcagaatcagtgcctagcctgtgcccagcaaatagttggcactcaataaagatttgcagaatttaatacagattttttcagctgtttttagggcattataaatggaaatcataacgtggttttaggttatcaaaccatggagtgatgtggagctaggattgtgagtgacctgcaggccattatcagtgcttcatttgtgcagaagtggcagcagagagggcccatccaaatacttaagagaaaacagacctagtcaggataagaatttgtttcagctgttcccaaaggcctgggagctttttgaaaagaaagaaaaaagtgtgttggcnnnnnnnnnnnnnagaaagttagaattgtttttaccaagagtttatgtggggcttgattcccccttcatccattggcgggaacatggattggggatttgatagaaaaataaaccctgcttttgattc

SEQ ID NO: 62315 - DNA, 947 bp, Homo Sapiens
gttctcttatgataatccttatacttgctctcagattccacaggcctctgtttatagagtggcaaaggcaggcgagctgtggtttattgtttataaatttttttataaatgttatggtattcaaagccactgacatttaatatttactgaagccattcttagacagcagtggtctttatccctttctggaaagaaaaggaaaatgaagggtaattactgtcaccatggagattgtagaggtaaggttggggtataggtcaggcctggcctttctttgtcatctgcttatagtctagtgctaagtatgccactaagtttcagatatatggaatactttatttttttaaaggtatataaactctgagttattgagaattaagtattcactgtatattaaggggaagcttttgccaagttgtggtcttcaaatttatgtttactcttcctattggcagaataggtgctatttaagagtaaaccaaaggataagcagagggagtccctataaccaaagatggacagcatagccctggatagccagataaaccactctttgtattaagaaatgtttctttcctagtggtgaggggtgggtaactgtgaaagagctttatatcttgtctattcatggtattatagctgtatattcccaggatgataagcttgattgaaatcctgtatttagtcatatattatttgcgctgcttcatttgtatcatgtgcaatctctagaccaaccctatttttaaactctggtacagcatcattttgtacatattcccagctgcagaactagtatcacttatctcagcaaaagagattgtttgcatggaaagattaatagcactgattagatttctaatattttgcatttttgaaatgtttgttttctacgtgattatatttaaaactttagtaaatactaacatgaaaccaaaacctcgtgc

SEQ ID NO: 62316 - DNA, 631 bp, Homo Sapiens
gacagcagcagctttgagcgagcaaagttctgggtgaaggaactgcgcagcctagaggagggctgccaaatctactttatgtggcaccaagagtgacctgctggaagaagaccggaggcttcgacgtgtggacttccacgacgtccaggactatgcagacaatatcaaagttcagttttttgaaacatccagcaagacaggccagagtgtggacgagttcttccagaaagtggcagaggattacgtcagtgtggctcccttccaggtgatgacagaggacaagggcgtggatctgggccagaagccaaacccctacttttacagctgttgtcatcactgagtcagcactcacctggcctgggggaattaaaggaattccccgtaagggctggacccagctcctttctgggcttgggtagtcaaatgtctgagctaccccaggtcctcatgtcagcagagtggcgcctgcctgtgctggcccatggaacggagacagcattgggctgactgtgggcatgaggagggataaggctgatttggaccccaggcttttgccctggacagcacttgtgtctgcagattatttaagtggcttttgatctgtaaataaaatcagtgcactgtgaatcac

SEQ ID NO: 62317 - DNA, 1067 bp, Homo Sapiens
gcacgaggctcttcatgtcttgagcaaaataaacatcttctactattctgtgttgttgttgaccctgtatacagtgctgggtccatggttttttggtgaaatcattgatggcaaatttggttgctgcttttcctttgggatatttgttaatggacatttcctacaaggcagcataacatttataattggaattctccagctggcgttttttaacatccccttgatggcttacatgtgttggagcttgctgcagcggtgctttggtcacaacttcaggtctcatctccatcaaagaaaatacttgaaaattatgcctgttcacctacttatgctactgctgtacatctggcaggtttattcctgctactttctttatgcaacatacggcaccctagcttttttattctcccctttgcggacctggttgacactgctgacacctgttctcattcgttatgtgtggacactgaactccaccaagtttggaatcttcatggtgcagttaaaaagccacctgagctcctgaaggccatgtctcaccactggcagctgggcagaagcccagcctctgtgtctgtagcccaggcctctaccccagtagcaggtggagggccaggattggtgggtgagctttagggagcagctgctcgtttggagtcctggacgttggagggattacccactactgatacctgcagaatggactgcagaaaagtctcaaaaataatgcctttattccttccctccctaaggaggcaaagagttgatttacctttgtgaagagaaaacccttatctaggacatccacagggtagaggttgggtgtgtgtacgggagtgtctgaggcccagtgtgttttttagggttaccccatgtaaagcacttaccgctgtgcttggaattcagcagctgtcaaaggtgcaatttcaggggcagggaacctttgaggatctgggcccgaccctcactacccctgagatattagttcccaggcctgttttcccacaggattgtgggctctctgcttccttagtcggaagtgttttcaactaatcaaatcctcgtgc

SEQ ID NO: 62318 - DNA, 827 bp, Homo Sapiens
ggaaattggttttttaaaaagcaactgtttaattgcttaaataagctatgtattaaatctgtctccagttagagctatcttcctagcataggccccttaagtagcatgggggatatattttttgctataacgtaaaaattttcctttaaccactgccctctccttctttctccttcaaggttctttccccctcagttttgttgttgtcttactctggagatgccaagtgtattttttctttctatgtaattttagattcgccttacaatgtaaatcttcacattggagataatattggttggaccttgcccatcttcactctagccttcgtatttgtgaaggactcagccaccttccttcttcaccccatgcttctcaccaaatttttgttgtcattgagggcacttggataactcaagttgatatttatagctgatcaatctatatgtgtcacagaactatgctgcctaaagtgatcttggctccttaatggtccttttggccccttggatagttaacagctgagtaattctaatctcttctgtgttttccttgccttaaccacaaattgtggtgctttttgtatattttatgtataaatcacaaagttgaattctgactatttttaagacaaaagtctgttaaacttttttattgtaaagaatatttattatgcgaatctctattattttatggtatttattgcaaaagactgttgaaatgtactcatgtttgaatataacaaaatatcaatacttaacggaaaataaggtgacacgaagaaagtacatatgttaactataatgcagaaaatatattaattaatg

SEQ ID NO: 62319 - DNA, 1310 bp, Homo Sapiens
  misc_feature (126)..(134): n is a, c, g, or t
  misc_feature (1113)..(1121): n is a, c, g, or t
cgtccgcaaaagtttaaatttggaatgctgtatatattagagaatatggggaatcatggtgtgaccaactgtacaaggaagattcatatgaaggtcttaggggaaaaagataattctgaagggtgnnnnnnnnntctctcccatggagattcttcacattatatggtttgacataagggtttataaggttgtttgtccaactaatgaaaatgcgcttaataaaaaattctgaccttgggtaagaattcgctttttaccgcattgccgctttcatgtacatacatgagtgcatgcacctatcaatgtgttttcttcccaacacttattaaatataaaacaacctgattttgtgctcgtttctcgtttttcttgaggccctgaagcttccaagataaatataagactaaaatttgcttgttccttcacacctgatttctcctagaaccataaatacctcctatggggaactaagaaatcatgaatactgggattttcttattggattttttacttttgttttgtggggataacgagacagaagtgaaaggaaaactggtgccggtattactgttgaaattaatgtacagtgaatgtttttaaagtattaattttaaaaaaccatgttctctagaaacaagttttaaaaatctatatgaaagttttaaaatgttccagctaactaatggataagcataccagtaaagccaaagtaaaggttagtgcctttaaaactaacctgtgttagagttacatgaatctggctctaaagtatctattttgcatccatttatatatagatcttaaacagaaatactctaggttgccacaccacagttttaagaagttatgctgctgctgttactctcttctaggattctggtggtaaagtagagaaactcggacactatattaaccttactgaaacatgctttaaatcgtgtctaaaatctgatttgagcaagtcactgccgagcttctgagtctgcattgacactgctactgactcacctctccttccctggaataaggcttcagcttccctatgctgtgaagacaccatttgtaagcactttgaacataagcactgtgtgacagcgctggatatcatgcttnnnnnnnnncctctccctgactcccatccccataataatgagttttgtttggaattgtaataagtaatgaactgcatggtttagaaaattataaatatttgatcagctgtcctctctgaaaaaaattgcacccctttttcttttttaaaattttgttgcatcttcgtagtaatgtaattgtattttatgcctgctttt

SEQ ID NO: 62320 - DNA, 810 bp, Homo Sapiens
cgggtacaggataaggaggggacctgaaattggtgagatggaatcttagatcgtccccccatgtgcccagccctcattcgaattctactctttggttaaagttagaaattcagagatttaggggtggaggaagagctttggggaagatgaggtaaggaaagatgactcgtgaagttaataggatgtctttaatttctagatgtgcctgagcttctgttcttttcctctttctttgtgtctctcttgaatatatttactttgtgtctcttaactctgtttaaggttctgtgtctatgcatctctctctttcttttttcaaccttttcattttcctatccagggatttaatcagcagaattactttttgataggggaggtataaggtttggcctgtaaggttctaactgccttcttttttttcacagaggtggcttatggcagatttttcctccttcaaactccaaacataatttttaagactatgtgccagtggactcttcccttatatctctgcaccacaagttgttggatgtttccttttcctcccttatgtctacctcaccaacctcgctcatcatttggcccttatccttccttgtacacctaccttcagatttttgcttacactttgatttcagagctttattccccagtctgttcttactcctttgtcgcttatccagaatgatgctatgtgtagcatcttgctgtaaatcctgtacaatgattctgtgtaaatagctgtggcctatgccaataatgaagagcaagcctttcaggtaagcaaattaaagttcagtttgctcatgg

SEQ ID NO: 62321 - DNA, 852 bp, Homo Sapiens
aactgtacaagagttatttatttttccttaatctcaaagctatttttagtaatacaaaaaagccatattaacatttttttccgttagaaaacatgatgtacaaaactttggatgaaaagatacgtcaaatttcatttaatcacttggaggaaaatccaccaactccatcaataccacccaaagtgttttaggcagtgaataaaatcaaaataatgcatcttaataaattccagctgttaaaagaacaaacttagcaatatataacagtttgctaacaggatttttgactattcactttgggagttatttttaaaaatccacttttttactgagtcttactacataccaggcactgtacttggccatctaggtaactaagaaaacgttggttaagataggaaagacccataaatcagtcctttggttaccaaattcaatttttaactttcaaacatcctccaagatcaagaaaccctaactaaaaatacatacccttctaagtgttatttgattttattagtagcaagggtgtttggtaaggtcatgaaccactatttttgatccattattccaattaagaatgcgtgtcaaaacctaatttgttatttttctaatgagtttaagatttggcattcagttgttacacatgtggttcaatgatttatcatgaaccctaaactgcacactgctcaaaaacagcaaaacagatgtgcattaaatgaaataatgtttttgatacatatcttaaatttcaatcagtttagggtcctttgaaggaaaagatatccagttatcgggtggcaaagagcagaggaggtaaactcctcgtgccgaattcctgcagcccggggg

SEQ ID NO: 62322 - DNA, 891 bp, Homo Sapiens
gttgttaaaaacatgtgaaagataggtatggaaaaagcatacacccccaaacagaaaggagttattaaagtaatttacaaacctctcagcactaattagtgtccaactccaagtgggtcaattccttagtataatattaaggcttactagtatcactgctttttccttagcttaatgacttacttagaatttatcctttattttaaatgatctgtactatctagtgtctaaaacactattctccagaaaaatcaatcattttctagccctctccctcagtcctttattgtccattccaatacattgaacacatttcctttaccctccacacacttcttccaaaaggaagcacccgttgagtccttttgagggtgatttgtcttacaactgactgacttagcaggaatttaattaggtcatatttggtgatgagacttatggagtgtgcctctctctcccaactgctgcttaaaatgcaaggacaagcaattagaagccatcctaaggtgcttacctcacacgccacccatgaggcttgtggccacagtggcacttgggtgtggctcctctgttatttgtcctcatgtgagaaagcagatcatctccaaatcttgccatttgtatacttttggtggagacttggatgtcatatcttctttgttttgggttttcttccctagcttattttgtggcttttaaagaagtggattgtattgtgagatcctgtgattcctggtggccagtatcctggattcctctaagatcttgcctctttcctcctcatgaaagcagcacacattgtgttaacttatgtctcttgttaaatgagcttaatgtctttgtgttttgtccaaaactgtattgaaaaaatattgtttaatgccctcgtgc

SEQ ID NO: 62323 - DNA, 896 bp, Homo Sapiens
gcacgaggctcaaccttctcgttgattccctgaagaccaagcagaacatgccacccaggcagctgctggaggatatcaaagtcgtcttgtgcagtgaagagtttcagtttctcaacccaacccctgttcctctggaactggagaaaaaactcagtgaagcaaaatcaagacatgactccatcacagggagcctaaaaaaattcaaagaccaactccaggctgataggaaaaaagatgaaaacagattcttcaaaagcatgaataaaaatgacatgaagagctggggcttgttacagaaaaataatcataaaatgaacaaaacctcagagcccgggtcatcttctgcaggcggcagaactacatcggggccaccaaatcaccactcttcagccccatcccactccctgtttcgggcctcgtctgctgggaaagtcacttttccagtatgtctcctggcctcttatgatgagatttctggtcaaggagcgagctctcaggatacgaagacatttgacgttgcgctgtccgaggagctccatgcggcactgatggaaaaaggaagtccctgcagcagtccccgcactctttaagcagctgtttaccgaaggcaccagttcagccaggagtgaaatccggagaggagcaacgccagcctgggtcacagtccatcaaaccccatgagcccgaccactctcgctcttccttacattcccacgtcccccttctctcccaacccctcatatcagcaagggaaattaattaatgagatttgataaatcagtagatagaatgaggtcccccttttgaaatatttagcagactggaacccccccgcaagcctctgtagggggtggatggagacacttctaactttaataaactgcgactgaacgtgg

SEQ ID NO: 62324 - DNA, 816 bp, Homo Sapiens
ccaacaagaccacatatgtgagggcctttggtgacctatctgaaggctcggttgcccagctgctatcctcagcagctgggcttgcctgtggagggagtgacttgcactggcagcactgcatgtcacctgggaacccctgcagacaaagctaacatcccagacagacagatgtgaccaggacaaacgtgcaataatgccaaatgttaaaatgtgagtttaccagcctagctatgggactgctggctcctagtccaggaatcatgggggtatgactgcctctccaaccctgtgggctgtaagcaagctcaggctagtctccccactgggggctgtgcccctccctgggacggttccgtgggcagccccatcactgtgttcaatagtgtgagaatgtagctaaagcccctgctgctgctgctgcacatgccacagcaggcggtgggggctgcgtggggacaatccatcgtggagtgttctttcagcttaggtctggacaggagacttggcgggagatgctccaggatgtgggtgattctgtacctggggaggctatctctgacctcccgacaggggacactcccaggccagcccaggggtcaggggcagaggtgcacacctcagcatgagccaagactggggtcagggagcaggtgtggtttgagccaggacctggggcgggggtggggccggggcctttctgcctcatttgctttcaatgaaagcctcaaagcagccaaaaccaggctttcccccttcctcgagtttgaatatccagaatcttttgtacttcttgttggttaaattgtttatttttgt

SEQ ID NO: 62325 - DNA, 1513 bp, Homo Sapiens
  misc_feature (213)..(266): n is a, c, g, or t
  misc_feature (1440)..(1450): n is a, c, g, or t
gagttgaaaatgctaaactgaagaaagaaattgaagaactgaaacaagagctaattcaggcagaaattcaaaatggagtgaagcaaataccatttccatctggtactccactgcacgctaattctatggtttctgaaaatgtgatacagtctacagcagtaacaaccgtatcttctggtaccaaagaacagataaaaggaggaacaggagacnnnnnnnnnnnnnnnnnnnnnnnnnnnnnnnnnnnnnnnnnnnnnnnnnnnnnncagcaatcaatagctggaagtgccgactctaagaagaagtagatgtcggagaaatagccccaaggacagttgtcagtggcctggtgaatcatgttcctcttgaacagatgcaaaatcggatggtgattttactttgtaacctgaaacctgcaaagatgaggggagtattatctcaagcaatggtcatgtgtgctagttcaccagagaaaattgaaatcttggctcctccaaatgggtctgttcctggagacagaattacttttgatgctttcccaggagagcctgacaaggagctgaatcctaagaagaagatttgggagcagatccagcctgatcttcacactaatgatgagtgtgtggctacatacaaaggagttccctttgaggtgaaagggaagggagtatgtagggctcaaaccatgagcaacagtggaatcaaataaaatgcttccactaccaaaagacattagagaaaaccttaaaagtaataaagagaaatatatttgtcacttatacctaaaatatgagtggctcatttttgcgttactctcttctagacttgactagtcatttacttggtatatattgttttcattgattggggaaacactagatttttacctcggtttttgatcatttataatggggagaggaagttgcctatgttttgtaataatttattttttagcaggaatattgattagcagcttttttttctttatacacatagataactaactagattaatgtttagtttcttatttgtaggcacaggatgcatgaaatttcaagctctgggattttttgtatattgtgtatctgtatcaaaaatatcctctccttttcaaaaatgacaggttggaaaatgtttgtcagacttattaactggtcatattataataatactgataatgcccaactgctcattctgaaagccaaacataaaagctaggagaagtggcatctgaacatttttgctttgctgccagagtaaccctgactaataatacaataacagcaatttttttaaaaaactgagatttcctactggcttgaagtttttctatttagcaaaataattagtaataagttttgactaggtctaaagaatgaacacattgtaaacagttgccacagtagtttctaataaattgatcataaaagcagctatccnnnnnnnnnnnaattctagcttctttttaaagattatttgggtacctaataatctttaaaaagaagctagaatt

SEQ ID NO: 62326 - DNA, 822 bp, Homo Sapiens
cccccccagaaaatgcatcattggaacgcgtcctcccggggctcaaggtcccttcacgcacgcaagaccgggaccaccatcgcgggcttggtgttccaagacgggggtcattctgggcgccgatacgcgagccactaacgattcggtcgtggcggacaagagctgcgagaagatccacttcatcgcccccaaaatctactgctgtggggctggagtagccgcggacgccgagatgaccacacggatggtggcgtccaagatggagctacacgcgttatctacgggccgcgagccccgcgtggccacggtcactcgcatcctgcgccagacgctcttcaggtaccagggccacgtgggtgcatcgctgatcgtgggcggcgtagacctgactggaccgcagctctacggtgtgcatccccatggctcctacagccgtctgcccttcacagccctgggctctggtcaggacgcggccctggcggtgctagaagaccggttccagccgaacatgacgctggaggctgctcaggggctgctggtggaagccgtcaccgccgggatcttgggtgacctgggctccgggggcaatgtggacgcatgtgtgatcacaaagactggcgccaagctgctgcggacactgagctcacccacagagcccgtgaagaggtctggccgctaccactttgtgcctggaaccacagctgtcctgacccagacagtgaagccactaaccctggagctagtggaggaaactgtgcaggctatggaggtggagtaagctgaggcttagagcttggaacaagggggagtaaaccctcgtgc

SEQ ID NO: 62327 - DNA, 887 bp, Homo Sapiens
  misc_feature (774)..(791): n is a, c, g, or t
agatgaccccagaaagcccgagagcatctctacctcgtcctcttctttgacaacaaacgaacctgacagtggctgcccaggaccaagctggttcctctgggtgtgaaccaggacctagacaaggagaagatgctggagggccgcaagtccaacatccgcaagtcagtacagatcgcctaccacagggctctgcagcaccgcagcaaggtgcaaggcgagcagagcagtgagaccagcgatagtgattgatactgctcaacacagcccaacctatagtgccctgtgacttctctcctcccctttgctcactgtcctggagtggcaccggcctttgcactgactcatttctggtcttggggccagtctcaggggaagctgggtgggggaggtccctcctgccctaagtgcagctggactgtacagaacactccaagggccaatggcagttcagcgcaaggagagggagggcccacaggtcagaaaaagctccagagacctcacagcattgtagggcggggtggtgggccaaagttaggacactgcgtaaaacaggccatcccaccacctctacctgctcatgccaggagaatccataactgcctagaggcctggggcccctaccggtcgtgaggtgagtgggcatctgtccagcctggaagaggggcactaggtgactccctcccctgctgttgtaaatactgtaattatcggagaatttaaattattttcatttgtaactgcgtttccgggtcgcgccagagtcatttggtactnnnnnnnnnnnnnnnnnngactgggggctgtccccatttcccttctctttcccatagattcccccacctttcaaactggtttgtatttatttcaaaggaagaaaatcctcgtgc

SEQ ID NO: 62328 - DNA, 888 bp, Homo Sapiens
taaagaatggcattttgaaggacattttacctccccatatgatttgattggttaggactttcttctgtaaatcataccttttcacatcttaagtttttacatttgccattttccaaatctcaatttgggcaagaacgatatagtcacaactatggggctgctttcaaaagcggggctccatttctactgtcagatcaatgtggtgctgtaaccatctttttatccctaccttcaagaacctccttatatgaagcctgtctttatccatcagaaggtgtgtgaaatcatcacttccttctggttttatgtatttgtagactatgcagcttttcattaaactgccaagtatatacaagacagatctgaaattaggcctgagtgttccgatccaccactgtactagtaaataaaaatccacctaccttttatgtggaaaattatgtgctattgagtaacttttagctcttttttaaaaaatgggtgaaatttaagtgtcttttttatgagaatgacacatgaagagatctgagagcaatctcatgtagtcttccatgaacctgcaattgtttggtatgcgtcagcattttccaatttccaggttggatctagagctgctgttgatcactcaggcatactaatggattcatttagatgggtccaagctgcagtccatgagcaataacagactaccccagatactgcagtttacgcagtgcttagtaaatgagatttgtggaactaagttattagttacctgaggcttcttaagaaagtcttcttttttgaccagttgatgtgaaagagggagcatgtgacacagccagtatggtggagtgctagggttatcctgtttacaataaatcgcctgaatttaaaaaaccctcgtgc

SEQ ID NO: 62329 - DNA, 786 bp, Homo Sapiens
gcacgaggggaggttctatttcatttaaaaatgtattcatttccctggccccacagatgcttccctccatactttttatttgctctgtttcctcagatttattttgtcttgccccattgcctctccttccttgaactctttccttttcaatctcaactcattcactgctgttgctcatttgcccttttccatgtattttttcctacttaggattttccactctatctttgtggttcatgaggactttgcctcttctcctgcctcattccctgactttctctagttagatgtcagtcctaaataggttttcctcacttcaggcctcacccctcaccttgtttttttgggggctccagggaccaatctggggctggaaatgttaggaggttgccttggtgctgccccagatctgtccagcagggggcagtaagtgatcttggtagtatccctggctgctaagcccttggcaggggtggtcctttctacattcccattcacttaacagctcttttgggattgggtgtttcattccatttctgcccactccctctcctctcctctctggtaggtttaattttatgctttccctgattccagctttctgcttcctgaggactcccgctccccccaccccaaagtttgtctgtggtgttatagtggtaactgcagttcctcctctggaatgtagactgtatatgtttaataactcaccttctctatccttgctcaaaatgtgggataacgcgatgactgtgaccctggttggaaattaaacttgttttatgc

SEQ ID NO: 62330 - DNA, 418 bp, Homo Sapiens
cgcgtccggtggttgctgtaaggggtcctccctgcgccacacggccgtcgccatggtgaagctgagcaaagaggccaagcagagactacagcagctcttcaaggggagccagtttgccattcgctggggctttatccctcttgtgatttacctgggatttaagaggggtgcagatcccggaatgcctgaaccaactgttttgagcctactttggggataaaggattatttggtcttctggatttggaggcaatcagcggacagcatggaagatgtgtgctctggctcggataagagatgggacatcattcagtcactagttggatggcacaaggctcttcacagacgcatctgtagcagagtggaacttgtactaacttatgatagaatgtatcagaataaatgtttttacctcgtgc

SEQ ID NO: 62331 - DNA, 1602 bp, Homo Sapiens
  misc_feature (305)..(324): n is a, c, g, or t
gcacgaggatcatattgataatgtgagattctttagccactttggggagcctgtctctccagaagcctttcttagtggtgcccacagttggagcccaggggccatgtttgcaaactgattcatgtgcatggctgacaggagtactggttcactaccaatgcctgagcttttctcttacatagaaaaactgtccgctctcagtaatcacaagcagcatccgttttgttttctcttcttgggagacatctgtcaaaccaggaatattcttgaaaagaacgtgagcaggaaaaactgctggtgatacnnnnnnnnnnnnnnnnnnnnatcttgcctgttggcttcaatacatttgagaatacgctgaagagggaaaatttcagtgatggagattctagattaaatatcaggactgatttcctggtgggattatggtccagttttaccaaagaaccaattccttgaatgttggaatctaactttttatattgtcattattattgttgtttttaaacggttctttgtcttttctgttttatttttctcaagctgctttcaggagctagcagaaaataactcaaagttgaagactctggaagattttgctttaacctaactcgcattgatgtattaaatttataattttagcattcccaatagatcctatcattccttaaacataataccctttgtcttggagtagaatactaagttagagttagtggatttctagtttaggagaggagctcaaaactatatctttacaaattgaaaatgaaatagggtgttttcccttttgtgcacacctatattaccttaagaaatttccttccatagacagctgcctcaaagggaaatcctctttaaaccgtagttggcgcagaggtcagtcctagtcggagcttaggagaggcggagacgctcacatcgtctgacttgagtcgccactgattgtggcaacagctttgcctcatgagtcaaaaattggcaatttcttttgatttttagttgttgaatttgctgtttcaagcatttgtacatattagaagtctaaggagtagcaagtcagtgggaggactttttcacccctggcattagcagcttcgacctcattttccagatgcaccagctcctattaataagttagcaaggaaagtgtatgtcacgtgcaggaacagtgaggcagggacaggggttctgctccttctcacttcaccaccggcacacagcttgcccctgtctttgcccccaaaggtattttgtgtctagtgtcaaattggagctattcttcactggtccttaaccttgggttttaaaaagaaggcttctctgtttgggtagcgtaagagctgagtatagtaagtcctcttccaaagagatggcaatatgctgggcatctactttaaaacaaagttgtctgatttttgcaagagaggttaggattttattgttcttatttccctttacagttctgcagttccatcacagtatttttttaaataactcaggtgtatgagaagaaattagaaaagaaaattaacttatgtggactgtaaatgttttatttgtaagattctataaataaagctatagtctgcctcgtgc

SEQ ID NO: 62332 - DNA, 1585 bp, Homo Sapiens
  misc_feature (340)..(354): n is a, c, g, or t
  misc_feature (427)..(442): n is a, c, g, or t
  misc_feature (464)..(472): n is a, c, g, or t
  misc_feature (612)..(621): n is a, c, g, or t
gcacgaggggacattcagatagcgctcccttctgggtgttatggaagagtggctccacggtcaggcttggctgcaaaacactttattgatgtaggagctggtgtcatagatgaagattatagaggaaatgtaggagctgtttaattttggcaaagaaaagtttgaagtcaaaaaaggtgatcgaattgcacagctcatttgcgaacggattttttatccagaaatagaagaagttcaagccttggatgacaccgaaaggggttcaggaggttttggttccactggaaagaattaaaatttatgccaagaacagaaaacaagaagtcatacctttttcttnnnnnnnnnnnnnnngtttttgcttcaagtgttttggtgttttgcacttctgtaaacttactagctttaccttctaaaagtactgcannnnnnnnnnnnnnnnatgatcaaggaaaagatcattnnnnnnnnncacaaagaagtttttctttgtgtttggatcaaaaagaaactttgtttttccgcaattgaaggttgtatgtaaatctgctttgtggtgacctgatgtaaacagtgtcttcttaaaatcaaatgtaaatcaattacagattnnnnnnnnnngcctgtatttaactcatatgatctcccttcagcaacttatttgctttaattgctttaaatcttaagcaatattttttattcagtaaacaaattctttcacaaggtacaaaatcttgcataagctgaactaaaataaaaatgaaaaggagagattaaaggtattccttgttcttcccttctcttcactagtctaaaaacttctttttaatcttaagattctttgtgatgagggtgagaaaaagaatcctcagtttatttttccactattaatctttcttttgataaatcctctattgactgggtagaggtatgtttgtgaaagacatgtaacttggggatttgttactttaggtttgttcccttgaatttcatctcatcaggcaaattgtactagttgtagttacgagttttccctcagtgaagtagcaataggctgtaatcaagaaaatatgccatttatagagataagataaatgaaataatacttcagccaccaggtttttctgtctcacatacataagcagcatttcattgcagatatgggactgattctgtggcttaccttgattaacatcttttggaagttttgctagtgtgctttcctttctttactatgtttctcagattcctttgtatcagggttttgggtgtcacttaggttttgtccatcagattctgtgagacaccaggcatcgttttgaggatgtgggttacacacatggagtgcttctggaactatcagcccacttgaccacccagtttgtggaagcacaggcaagagtgttcttttctggtgattctccaggccatttaataccctgcaatgtaattgtccctctgtggctcacatttcattagtgagccatgaaatcaactcagtgggacatagccagcatttttgcataccaggttgggctataaaatatttctgttgtcaataaattttaaatgttttccctcgtgc

SEQ ID NO: 62333 - DNA, 593 bp, Homo Sapiens
  misc_feature (90)..(110): n is a, c, g, or t
  misc_feature (162)..(178): n is a, c, g, or t
tcggaatcctgtcgattatactggacagcttgtggcaagtgaatttgcctgtaacaagccagattttttaaaatttatattgtaaatatnnnnnnnnnnnnnnnnnnnnnatatatatatatatgtacagttatctaagttaatttaaagttgtttgtgccnnnnnnnnnnnnnnnnnaatgctttgatatttcaatgttagcctcaatttctgaacaccataggtagaatgtaaagcttgtctgatcgttcaaagcatgaaatggatacttatatggaaattctgctcagatagaatgacagtccgtcaaaacagattgtttgcaaaggggaggcatcagtgtccttggcaggctgatttctaggtaggaaatgtggtagcctcacttttaatgaacaaatggcctttattaaaaactgagtgactctatatagctgatcagttttttcacctggaagcatttgtttctactttgatatgactgtttttcggacagtttatttgttgagagtgtgaccaaaagttacatgtttgcacctttctagttgaaaataaagtgtatattttttctattaaaaaggaaacctcgtgc

SEQ ID NO: 62334 - DNA, 700 bp, Homo Sapiens
caagaagaagaagtacaacgcgcggttcccgccggcgcggatcaagaagatcatgcagacggacgaagagattgggaaggtggcggcggcggtgcctgtcatcatctcccgggcgctcgagcttttcctagagtcgctgttgaagaaggcctgccaggtgacccagtcgcggaacgcgaagaccatgaccacatcccacctgaagcagtgcatcgagctggagcagcagtttgacttcttgaaggacctggtggcatctgttcccgacatgcagggggacggggaagacaaccacatggatggggacaagggcgcccgcaggggccggaagccaggcagcggcggccggaagaacggtgggatgggaacgaaaagcaaggacaagaagctgtccgggacagactcggagcaggaggatgaatttgaggacacagatactgatggggaagaggagacatcacaacccccaccccaggccagccacccctttgcccactttcagagccccccgacacccttcctgcccttcgcctttactctgcctttgcccccagcgcccccgggcccctcagcacctgatgaagaggacgaagaagattacgactcctagcgccttctgccccccagaccatagccccttttagttggttttagttgctctggggggaggagagaaggtagagctgttcttaaatttatt

SEQ ID NO: 62335 - DNA, 1233 bp, Homo Sapiens
gcacgaggctcggcagctgggagagaacttctctgggatctactgcagccttctgcctttgggatgctggtcagctgacagccagagagtggtctttgactcggctcagcgcagccggcaggacctgtttgctgtggacacccaagtgggcactgtgacctccctcacagctggagggtcaggtgggagctggaagttgctcacaattgaccaggacctcatggtggcacagttttccacacccagcctacctccaaccctgaaagttgggttcctgccttctgcagggaaggagcagtcagtgttgtgggtgtccctggaggaggccgagcccattcccgacatccactggggcatccgggtgctacagccacccccagagcaagagaatgtgcagtatgctggccttgactttgaagcaatcctgctgcagcctggcagccctccagataagacccaagtgcccatggtggtcatgccccacggggggccccattcatcctttgtcactgcctggatgctgttcccagccatgctttgcaagatgggctttgcggtactactagtttgcagtggaacaggtgctccaggaggaacactttgatgcaagccatgtggcccttatgggtggttcccatggtggcttcatttcctgccacttgattggtcagtacccagagacctacagggcctgcgtggcccggaaccccgtgatcaacatcgcctccatgttgggctccactgacatccctgactggtgcgtggtggaggctggctttcctttcagcagtgactgcctgccagacctcagcgtgtgggctgagatgctggacaaatcgcccatcagatacatccctcaggtgaagacaccactgttactgatgttgggccaggaggaccggcgtgtgcccttcaagcagggcatggagtattaccgtgccctcaagacccggaatgtgcctgttcggctcctgctctatcccaaaagcacccacgcattatcagaggtggaggtggagtcagacagcttcatgaatgctgtgctctggctacgcacacacttgggcagctgaagccctgccattttgcatgagctgatcagcctgtgccacacttcgcttttgaggagctcaacggtttggcagggcagcaggaggctttttgggctttggactccacggatgcgtgggcagaggaatgtgggctatgtagtcataataaattaggacacag

SEQ ID NO: 62336 - DNA, 690 bp, Homo Sapiens
ttactctttccatgtcagtggccgtggagttccgcgactacctgggcgacttcatcgagcactacgcgcagctgggccccagccagccgccggacctggcccaggcgcaggacgagccgcgccgggcgctcaaaagcgagttcctggtgcgcgagaaccgcaagtactacatggatctcaaggagaaccagcgcggccgcttcctgcgcatccgccagacggtcaaccgggggcctggcctgggctccacgcagggccagaccattgcgctgcccgcgcaggggctcatcgagttccgtgacgctctggccaagctcatcgacgactacggagtggaggaggagccggccgagctgcccgagggcacctccttgactgtggacaacaagcgcttcttcttcgatgtgggctccaacaagtacggcgtgtttatgcgagtgagcgaggtgaagcccacctatcgcaactccatcaccgtgccctacaaggtgtgggccaagttcggacacaccttctgcaagtactcggaggagatgaagaagattcaagagaagcagagggagaagcgggctgcctgtgagcagcttcaccagcagcaacagcagcagcaggaggagaccgccgctgccaccctgctactgcagggtgaggaagaaggggaagaagattgatcaaactgaatgaaacccc

SEQ ID NO: 62337 - DNA, 428 bp, Homo Sapiens
acgcgtccgtgcgcaccggggaacaaggtcgtgaaaaaaaaggtcttggtgaggtgccgccatttcatctgtcctcattctctgcgcctttcgcagagcttccagcagcggtatgttgggccagagcatccggaggttcacaacctctgtggtccgtaggagccactatgaggagggccctgggaagaatttgccattttcagtggaaaacaagtggtcgttactagctaagatgtgtttgtactttggatctgcatttgctacacccttccttgtagtaagacaccaactgcttaaaacataaggatgtttcagttcctccatttaacagatatgaagagcattttaagaggtgcagcctctggaagtggatcaaactagaactcatatgccatactagatatgtttgtcaataaacttatgacgtg

SEQ ID NO: 62338 - DNA, 909 bp, Homo Sapiens
aaacacctgaagagttcaagtgaaaggaatttccacatgtccccctacatggtcggaattaacaagcaggagtttgctagttgattccaatgcagttgatgagctatccactctccgaagggcaactggaccagaagacagccatgtcactcctgtggaagtcctatcccccttgtttgcattgctaaggaactgattccagaagccactgagaaatacttaggaggaacagacgacactgtcaaaaagaaagacctgttcctggacttgatagcagatgtgatgtttggtgtcccatctgtgattgtggcccggaaccacagagatgctggagcacccacctacatgtatgagtttcagtaccgtccaagcttctcatcagacatgaaacccaagacggtgataggagaccacggggatgagctcttctccgtctttggggccccatttttaaaagagggtgcctcagaagaggagatcagacttagcaagatggtgatgaaattctgggccaactttgctcgcaatggaaaccccaatggggaagggctgccccactggccagagtacaaccagaaggaagggtatctgcagattggtgccaacacccaggcggcccagaagctgaaggacaaagaagtagctttctggaccaacctctttgccaagaaggcagtggagaagccaccccagacagaacacatagagctgtgaatgaagatccagccggccttgggagcctggaggagcaaagactggggtcttttgcgaaagggattgcaggttcagaaggcatcttaccatggctggggaattgtctggtggtggggggcaggggacagaggccatgaaggagcaagttttgtatttgtgacctcagctttgggaataaaggatcttttgaaggcc

SEQ ID NO: 62339 - DNA, 1618 bp, Homo Sapiens
  misc_feature (707)..(759): n is a, c, g, or t
gaaaatgagtcttcctctttaattaaagatctgacctgtatggtaaaggaacaaaaaacaaaactggcagaagtttctaaattgaaacaagaaacagcagcaaatttacagaatcaaatcaacacccttgaaattttaattgaagatgacaagcagaagagtattcaaatagaacttctcaagcacgaaaaagtccagcttatttctgagctagcagccaaggaatcactaatatttggtttaaggacagaaagaaaagtatggggacatgagctggcacaacaaggatcttctctagcccaaaatcgtggaaaattggaggctcaaattgagagtttatctagagagaatgaatgtctgcgaaagacaaatgaaagtgatagtgatgcattaagaataaagtgcaaaatcatagacgaccaaactgaaactattagaaaattaaaagattgtttacaagaaaaagatgaacacatcaaaagattacaagaaaagatcacagaaatagaaaaatgcactcaagaacaacttgatgaaaaatcttcacaactggatgaggtacttgagaagttggaaaggcacaatgaaagaaaagaaaaactaaaacaacagttgaaaggaaaggaagtagaacttgaagaaatcagaaaagcttacagtacactgaatcggaagtggcatgataaaggagaacttctatgtcatcnnnnnnnnnnnnnnnnnnnnnnnnnnnnnnnnnnnnnnnnnnnnnnnnnnnnncttaaagcggaaagagacaaaagtattgaactacaaaagaatgcaatggaaaaacttcatagtatggatgatgcccttaaaagacaagttgatgcaatgttgaagctcatcaggctgaaatagcacagctggccaatgaaaagcagaagtgtattgattctgcaaatttaaaggtccatcaaattgaaaaagaaatgcgtgaacttttggaagaaacatgcaagaacaaaaaaacaatggaagcaaaaattaagcaacttgcttttgctttaaatgaaattcagcaagatatgtgatggttctgagaatgaatttaattgaaatagaccagcagacctattgtaaaaatgattaaatattgtaatagtagtaactgctatgactttgaaatgtctctttctatacatttcattatgaatatatttttaaagacttttgatcaagtattaattgtataggttttttataataaattgttgacaattttgtctattagaaaaaactatcataactagacttacaatatttttcttgtttctgtactatacgttgtttggtaattacacatttgcctacaaatttgtgaatgaaaagattagtattttcaccatatgaggtaaaacattttaatcattgttatcttattgtgatgatgaagaactaattatatttgttatttaattgatgtagctcaattcttttaaagtacttatgtagccaaaaagcatttgaaatctgtatgataaaagatgtggcattcttaagaaagtatatgtagccatctccacatcactcattatgaccccttcttttataatgcttatatcttttcattaaagattacatttaagcctcgtgc

SEQ ID NO: 62340 - DNA, 1209 bp, Homo Sapiens
gcacgaggcaccccttgagaaatcgggctggctatttatccaattatatcattcttttgtgtcatctgtttttagcctgtttatgtctagaacatctatcaatgggttgctaggaagaggctcaatgtttgtgttttcaccagatcagtttcagagactgcttaaaattaatccagactggaaaacccacagacttcttgatttaggtgctggagatggagaagtcacaaaaatcatgagccctcattttgaagaaatctatgccactgagctttctgaaactatgatatggcagcttcagaaaaagaaatacagagtccttggtataaatgaatggcagaatacggggttccagtatgatgtcatcagctgcctgaacttgctggaccgctgtgatcagcccctgactttgttaaaagatatcagaagtgtcttggagccaactagaggcagggtcatccttgcccttgtcctcccctttcatccctatgtggaaaacgtaggtggcaagtgggagaaaccatcagaaattttggaaatcaaaggacagaactgggaagaacaagtgaatagtctgcctgaagttttcagaaaagctggttttgttatcgaagctttcaccagactaccatacctgtgtgaaggcgacatgtataatgactactacgttctggatgacgctgtctttgttctcaaaccagtataaacacgtggaggtcgaagtcttcagagtccgcaccctccgggatgtgcccttggaagagggtctgtgttcacaattacgtgaagggaggacccttggggaccgccattttaaatatcatgtaggaatttaaaaagccaaaatactaattatttctttgtagtgtgtaaaggaatgtttttaaaagacaaaaacccaactctttgtggatttttatcaactctttactcagagccactttccaatgcaggtcacactccaattatgatggaagatattttttatacttaattgcagtagggactcattcccagacaaagcaatagtcacgacttcatggaaccaatcaatggattgttttttgaagactggcaataaagctgtccattcaattccaaatactggttttaaggtatagccactgatattctttcatgtttagaaattctttctgttattattcaagaaaatgtttttaatcatgctaataaacttttttggagatg

SEQ ID NO: 62341 - DNA, 1568 bp, Homo Sapiens
  misc_feature (866)..(874): n is a, c, g, or t
gcacgaggatctgaagtctgctgcagtaaaacacagaaggctttaaaatgttttcttgcataaaattcaaaacttttaagtagctgcttatgagaatagggaaggcagaaagctaatgtctgtctcaagatacaggacagctgtttgctcatcaacctcaactgtgtgtgcaactgaggaacatggctcaagaaactaatcacagccaagtgcctatgctttgttccactggctgtggattttatggaaaccctcgtacaaatggcatgtgttcagtatgctataaagaacatcttcaaagacagaatagtagtaatggtagaataagcccacctgcaacctctgtcagtagtctgtctgaatctttaccagttcaatgcacagatggcagtgtgccagaagcccagtcagcattagactctacatcttcatctatgcagcccagccctgtatcaaatcagtcacttttatcagaatctgtagcatcttctcaattggacagtacatctgtggacaaagcagtacctgaaacagaagatgtgcaggcttcagtatcagacacagcacagcagccatctgaagagcaaagcaagtctcttgaaaaaccgaaacaaaaaaagaatcgctgtttcatgtgcaggaagaaagtgggacttactgggtttgaatgccggtgtggaaatgtttactgtggtgtacaccgttactcagatgtacacaattgctcttacaattacaaagccgatgctgctgagaaaatcagaaaagaaaatccagtagttgttggtgaaaagatccaaaagatttgaactcctgctggaatacaaaattcttgagcatctgcaaactaaaaattgacttgaggnnnnnnnnnccctagtcattgggaatgtagagcagtgtatcttgcatgtcatcggaagaatagatttttgttttggttttgttttgaaaatgactctgaacatttatttccattgcaatttctgtggctgaggagacttaaactttacaagtattatccttttaagatcattttaattttagttgagtgcagagggcttttataacaaacgtgcagaaattttggagggctgtgatttttccagtattaaacatgcatgcattaatcttgcagtttattttctcattgtgtatgtatatatcgcttttctctgcagcacgatttctcttttgataatgccctttagggcacaactagttatcagtaactgaatgtatcttaatcattatggctgcttctgttttttcattaacaaaggttattcatatgttagcatatagtttctttgcacccactatttatgtctgaatcatttgtcacaagagagtgtgtgctgatgagattgtaagtttgtgtgtttaaacctttttttgagcgagggaagaaaaagctgtatgcatttcattgctgtctacaggtttctttcagattatgttcatgggtttgtgtgtatacaatatgaagaatgatctgaagtaattgtgctgtatttatgtttattcaccagtctttgattaaataaaaaggaaaaccagcctcgtgc

SEQ ID NO: 62342 - DNA, 908 bp, Homo Sapiens
gcacgagggcctctgagagggtcttgttctagatttcatattgcacttggagggtaacagctgctttttcacgcatggtactcttgatgtttttcactctgtcaaggattttgttggctatcaatgaatgtgtctaaaacttagtgcttccaggtagttatagtactccaaatcaaggaccaacttaaacgttaatttttgtgcaaaaacaaacctgaaaaatatgcttcggaaactgtgcatagttctaattgtaagtcagattgtatattcaaattgtaattaagagatttaaatattagaacggtatgtaaggtagtataattaccactattttaaaacaattcagttaaacactgctgcaatatttcagtgttgtgcttgaaaatatgtacagtttttttccaatattaataccttatgttgtccttaaatatttctaaaagcgcctttatttcagcattacctttttttcatcactatcttttataaaacattaatataagtcgttacttttagaaactaaaggaaataatagctggaaaaccctctgtagtttaaaatcagtcattaaactcacaatagggtaagtaaatatagccacctgttaacatgtaaataagcataatttgttccaaagatggaatattgaaacttagttcatgtctgctgtaaaatattatttaaatgctgctgggcatttcacttaaagaacttaatgtcaacagctacaacaaagaccaaatctgaactgctaatgtggctgctttgtagggaatggactaatatcagtgtgttagatcttaaggtatcagtatttcagaatcctgcgacgattttatttctaaattcatgtactgtatgtccataagtgaaaataaaatgtcatattcttttctattattggt

SEQ ID NO: 62343 - DNA, 597 bp, Homo Sapiens
cccccgggctgcaggaattcggcacgagggtaacggtcctcagcgcaagggtcatttcgtcgctgggaagggacggccctcgcccgcggtgatggtggttagcaagatgaacaaagatgcgcagatgagagcagcgattaaccaaaagttgatagaaactggagaaagagaacgcctcaaagagttgctgagagctaaattaattgaatgtggctggaaggatcagttgaaggcacactgtaaagaggtaattaaagaaaaaggactagaacacgttactgttgatgacttggtggctgaaatcactccaaaaggcagagccctggtacctgacagtgtaaagaaggagctcctacaaagaataagaacattccttgctcagcatgccagcctttaagattgaattagattgtgttgttgtggttttatttctgaaagtaaaacttgccataaattagaaaacaatttcccaaaataaaatccttttttgtatgatggtatacagttttcagtaatgatgtatacattgtattgatttttttccctaaatgtgttattttaataaatatctcatgaatgagtttgaagtttgcttgg

SEQ ID NO: 62344 - DNA, 1795 bp, Homo Sapiens
  misc_feature (1271)..(1511): n is a, c, g, or t
gcacgaggtttcttttcaagtcaattgaactgaaatctccttgttgctttgaaatcttagaagagagcccactaattcaaggactcttaccgtgggagcaactgctggttctatcacaatgaaacggctggtttgtgtgctcttggtgtgctcctctgcagtggcacagttgcataaagatcctaccctggatcaccactggcatctctggaagaaaacctatggcaaacaatacaaggaaaagaatgaagaagcagtacgacgtctcatctgggaaaagaatctaaagtttgtgatgcttcacaacctggagcattcaatgggaatgcactcatacgatctgggcatgaaccacctgggagacatgaccagtgaagaagtgatgtctttgatgagttccctgagagttcccagccagtggcagagaaatatcacatataagtcaaaccctaattggatattgcctgattctgtggactggagagagaaagggtgtgttactgaagtgaaatatcaaggttcttgtggtgcttgctgggctttcagtgctgtgggggccctggaagcacagctgaagctgaaaacaggaaagctggtgtctctcagtgcccagaacctggtggattgctcaactgaaaaatatggaaacaaaggctgcaatggtggcttcatgacaacggctttccagtacatcattgataacaagggcatcgactcagacgcttcctatccctacaaagccatggatcagaaatgtcaatatgactcaaaatatcgtgctgccacatgttcaaagtacactgaacttccttatggcagaaaagatgtcctgaaagaagctgtggccaataaaggcccagtgtctgttggtgtagatgcgcgtcatccttctttcttcctctacagaagtggtgtctactatgaaccatcctgtactcagaatgtgaatcatggtgtacttgtggttggctatggtgatcttaatgggaaagaatactggcttgtgaaaaacagctggggccacaactttggtgaagaaggatatattcggatggcaagaaataaaggaaatcattgtgggattgctagctttccctcttacccagaaatctagaggatctctcctttttataacaaatcaagaaatatgaagcactttctcttaacttaatttttcctgctgtatccagaagaaataattgtgtcatgattaatgtgtatttactgtactaattagaaaatatagtttgaggccgggcacggtggctcannnnnnnnnnnnnnnnnnnnnnnnnnnnnnnnnnnnnnnnnnnnnnnnnnnnnnnnnnnnnnnnnnnnnnnnnnnnnnnnnnnnnnnnnnnnnnnnnnnnnnnnnnnnnnnnnnnnnnnnnnnnnnnnnnnnnnnnnnnnnnnnnnnnnnnnnnnnnnnnnnnnnnnnnnnnnnnnnnnnnnnnnnnnnnnnnnnnnnnnnnnnnnnnnnnnnnnnnnnnnnnnnnnnnnnnnnnnnnnnnatgacagagtggagactctgtttcaaaaaaacagaaaagaaaatatagtttgattcttcatttttttaaatttgcaaatctcaggataaagtttgctaagtaaattagtaatgtactatagatataactgtacaaaaattgttcaacctaaaacaatctgtaattgcttattgttttattgtatactctttgtctttttaagacccctaatagccttttgtaacttgatggcttaaaaatacttaataaatctgccatttcaaatttcaaaaaaaacctcgtgc

SEQ ID NO: 62345 - DNA, 293 bp, Homo Sapiens
ctggggcctgggctgctgctggttcttcatcagtcccttggtctctagcctcggccagggctgctctgctctccgccctcctttgtgtatcaagtgtcgctcacagccccattcactggggagcctttcggatctatttggtctttctcatgtcccccactggtctgtaccccagggagcgggtgcttgtactgtgtgaatccagtgttcacattcacacttaatgacttccttggcaccaatcatgtatttcaccgtttgcactttttgtatttcaataaaaatgttgatgc

SEQ ID NO: 62346 - DNA, 633 bp, Homo Sapiens
caggagggccgcaccgccaccctccggtaccctcggagccccgacggctacctccagatcggctccttctacaagggagtggcagagggagaggtggacccagccttcggccctttggaagcactgcgcctctcgatccagacggactcccctgtgtgggtgattctgagcgagatcttcctgaaaaaggccgactaagctgcgggcttttgagggtaccctgtggccagccctgaagcccacatttctgggggtgttgtcactgccgtccccggagggccagatacggccccgcccaaagggttttgcctggcgtcgggcttgggccggcctggggtccgccgctggcccggaggccctaggagctggtgctgcccccgcccgccgggccgcggaggaggcaggcggcccccccactgtgcctgaggcccggaaccgttcgcccccggcctgccccagtcaggccgttttagaagagcttttacttgggcgcccgccgtttctggcgcgaacactggaatgcatatactactttatgtgctgtgttttttattcttggatacatttgattttttcacgtaagtccacatatacttctataagagcgtgacttgtaataaagggttaatgaag

SEQ ID NO: 62347 - DNA, 1575 bp, Homo Sapiens
  misc_feature (66)..(75): n is a, c, g, or t
  misc_feature (310)..(336): n is a, c, g, or t
  misc_feature (342)..(344): n is a, c, g, or t
  misc_feature (501)..(531): n is a, c, g, or t
  misc_feature (732)..(741): n is a, c, g, or t
  misc_feature (856)..(890): n is a, c, g, or t
gcacgaggctacagtctttagactaagcatgcaagacatacgactaagtgcaactgagtgaaatgnnnnnnnnnnaaattttaatcattccctaaaggtttgaactgaggtatgcgtactaacagtttctcatgctgttatctttactcatgtctagctacacatgctgagaatgaactaatctaccagatttttatcctcttttgaataccaaactaaccagcaaccactcagtttagaagcacagggcccccttcccatgaccctgtctggctactgcctgcacatcatgaagctgcctggaaaaggnnnnnnnnnnnnnnnnnnnnnnnnnnngttatnnnaaatctaaagtcttgcgtgaccacagactgccctttatacagaaagcagagtgaagcttcaaaagtaactgccagaaaagtttttgtaccaagcttatgagtggatgggagtgttacttttctttaaatgaaaaatgctgaccaaagcctaatcggnnnnnnnnnnnnnnnnnnnnnnnnnnnnnnnctgaaggatatatgccaagataaaccaaaattaatacagtgatcacagcacagttcttaaacaaaagtggcatacaatctaaaaatatctctttttctagaaatactattatgtaatctagttcaattatggaagcttttctgtcctgactctaaactgtctcctttattggatactctaattgcagtggcatacattcannnnnnnnnngagatgggactcccttccttctgtagctcctttaatattgtgtcctatttttatctgcagtagccccataaaatctctttaagagaatgagttttggtctctgtagaggtacacnnnnnnnnnnnnnnnnnnnnnnnnnnnnnnnnnnntaacaactttggttccattatctacttggtcttctaaatttacgatgaaggagcagttctctttctcaggttgcaatagcctatcgcttgtcatttgcctctaaattcttttgcctcctttgatcaacaataagaggatatttggcttcatcagataaagcataaaacagagaacataatttacctttgtgtaatatctttggtaattttagaaaaaagggacaaagaaagaatataaattaagcttcgaaaggctctcgaactaaaaaaaactacagtcctatataaataaatgacaggaaagtgggtgcagagctgaagtgtggaggggttctaaggactgaggttgtactgacctgtaaccatcacatttctgcataccatgtttgggacccccccaaagcccagggcctacatgatatcttctatgagtttttgtgatactgggttggtgatataatattgcataacaaactgcagtaccaaatttgcatatttgaaattaacactttagcatttgctgaactcagccctcgttaactcccttaacaagttcaatctgaaatcgaatttgcattcaaacagtttaatgccaccaagtaggtctgaactaatgtataaactcagcgccgccgccgccacccctacttttaagggcagcctcgtgccgaattcctgcagcccg

SEQ ID NO: 62348 - DNA, 689 bp, Homo Sapiens
tttacttaagggtactaagcaaggtccactctagtgtagctgaagagaatgcatatttggctacactatttctgtttactgtattttgcttcctactttatgtctaaatgctattgtttgtttaaaatcctaataatgtctcatttccaatatgttattttcagataactaaggttttgctactaatgtcagccatttactctcccactaattgggattattttttaaaagaggtctttctccccgaaatacaagttttagaaaatcttagaagaggggtgggtgcatgtcttaatgctgggaagcggcaactttggggttgaacttacttgaatggattaaaaattgcattgtgttacagagctagaaaattttatgtatgaaaaacgataatagccttacactgagtacaaataatactttaagagcatgtgaagatgtgatcatttgtgatgttacttgtaaaaaaaagtatatatacatatcttttgaagtgttaaaaggaaactagtactttatattctttatcatatcactttttgtaagtgttgaatatattcctgtttatttttctatgttctgttttgtagccttaagaagtgtttcaaacatatctgaatgtataaaataagagtaaatgccctacatggtgtgatgctgcattatatataaaactgtgtgcatatatt

SEQ ID NO: 62349 - DNA, 479 bp, Homo Sapiens
ccttctcctcccctctccccactcccggtgctgaggctgcatcagaccctggtagggaggggtgccgcagccactaacggtatgtgctctccttcagccctctcccttcggagggacgtggtcttgcccactgtccttttgcctccatgctgaggtcggtgctgtatttcagagggagggtccttttcattctccttgctttgtatttaaggactggggcatagcatgggggcagtcccccagacctcttcattccccctcctgtggtgagggctaggtgtgatcaacacttttcttctccattcccttcctgcttttttcatggtgggggatccaccaggtcatctaggctctggccctagttgaaggggcaccccttcctctgtgccaagaggattcatcctgggagagggggcaaggtggaatgcagataactcacatgtaaaaggaacttgggtaggtaaataaaagcctcgtgc

SEQ ID NO: 62350 - DNA, 764 bp, Homo Sapiens
gagtcagcccttggcttctgcttcaaaccctcaagaggggaagcaactccgtgtgcctggggttcccgagggagctgctggctgacctgggcccacagagcctggctttggtccccagcattgcagtatggtgtggtgtttgtaggctgtggggtctggctgtgtggccaaggtgaatagcacaggttagggtgtgtgccacaccccatgcacctcagggccaagcgggggcgtggctggcctttcaggtccaggccagtgggcctggtagcacatgtctgtcctcagagcaggggccagatgattttcctccctggtttgcagctgttttcaaagcccccgataatcgctcttttccactccaagatgccctcataaaccaatgtggcaagactactggacttctatcaatggtactctaatcagtccttattatcccagcttgctgaggggcagggagagcgcctcttcctctgggcagcgctatctagataggtaagtgggggcggggaagggtgcatagctgttttagctgagggacgtggtgccgacgtcccccaacctagctagggtaagtcaagatcaacattccagggtttggtaatgttggatgatgaaacattcattttttccttgtggatggtagtgctgtagagttcactgttgtacccagtttgttttttatttgttaagaaaaaatacagcatcattgcataatttttgatggtaataaatttgaataatcagattttttacaaaccagg

SEQ ID NO: 62351 - DNA, 468 bp, Homo Sapiens
  misc_feature (301)..(309): n is a, c, g, or t
tggtggtgaccacgtcaggagaccccaaagcgaaagtattttgtgtccaaaggcctgaccgttaaaagctgcagcccctgcctttgtgtttggtgttgaggggacgaagggacccctgcccctttttgccagcagaggcagtagggcacaaagggaagaagaaggtggggccctggatgactttccaacctattcaactgacttgctcccctctcctttttttctctttagagacccagcccagggccctcccacccttgcccagacctggtgggcccttcagaaggaggggtggacctgnnnnnnnnncactttcatttggtggtgtgagccatggggtgtgtatttgtatgtggggagtaggtgtttgaggttcccgttctttcccttcccaagtctttgggggtggaaaggaggaagagatactagttaaagattttaaaaatgtaaataaaatatacttcccag

SEQ ID NO: 62352 - DNA, 886 bp, Homo Sapiens
aaaatcttaagattagaaccaacagaatacaaagattcattcagaatacatgtaatgaagtgaacacaaaggtaaagtttgcagacaattccatgaaaaaacatcagcgctcaggaggaggctgacagtatacagcgcaatgaactattacttaatcaagaagtaaataaagggtgttaaagaggagatctataatcttaaagacagactcaccgctattaagtgttgcatcttacaggtattgaaacttaaaaaagtgtttgactatattggactaaactgggatttttcacaacttgaccaattacaaacccaagtatttgaaaaagaaaaggaacttgaagaaaaaattaagcagttggacacatttgaggaagaacatggcaaatatcaggcattattaagtaaaatgagagctattgatttgcaaattaagaaaatgactgaagtagtactaaaagctcctgatagctctccggaaagcagacggctcaatgcccaaattttaagtcagagaattgagaaagccaagtgtttatgtgatgagataataaagaaattaaatgaaaataagacctttgatgactcattcaaggagaaagaaatactacaaataaagctgaatgcagaagaaaatgataagttatacaaagttctccaaaacatggtattagaactctcaccaaaagaattggatgaaaagaattgtcaggacaaactagaaacttccttacatgttttaaatcagataaaatctcaattacagcagcccttacttataaatttggaaattaaacatattcaaaatgaaaaggacaattgtgaagcatttcaggagcaagtttgggcagaaatgtgtagtattaaagctgtgactgctattgag

SEQ ID NO: 62353 - DNA, 871 bp, Homo Sapiens
ccccgggctgcaggcgcgggtacagcttttcgctgactacattcagcccgtctggtaaacttgtccagattgaatatgctttggctgctgtagctggaggagccccgtccgtgggaattaaagctgcaaatggtgtggtattagcaactgagaaaaaacagaaatccattctgtatgatgagcgaagtgtacacaaagtagaaccaattaccaagcatataggtttggtgtacagtggcatgggccccgattacagagtgcttgtgcacagagctcgaaaactagctcaacaatactatcttgtgtaccaagaacccattcctacagctcagctggtacagagagtagcttctgtgatgcaagaatatactcagtcaggtggtgttcgtccatttggagtttctttacttatttgtggttggaatgagggacgaccatatttatttcagtcagatccatctggagcttactttgcctggaaagctacagcaatgggaaagaactatgtgaatgggaagactttccttgagaaaagatataatgaagatctggaacttgaagatgccattcatacagccatcttaaccctaaaggaaagctttgaagggcaaatgacagaggataacatagaagttggaatctgcaatgaagctggatttaggaggcttactccaactgaagttaaggattacttggctgccatagcataacaatgaagtgactgaaaaatccagaatttcagataatctatttacttaaacatgtttaaagtatgttttgttttgcagactttttgcatatttatttttacatggtttaaatcgactgtttttaaaatgacacttataaatcctaataaactgttaaaccc

SEQ ID NO: 62354 - DNA, 833 bp, Homo Sapiens
atcccgtggtctgtctgcaggaactctcccgtctgtgagaagcctcttccgagtcgaccttcccggccacccgggccctgtgcttgctcggaagagctcactcccagctgcggcctgggcaccgcgggccatgtgtgtttgcatgaggaactcttttagtggcagacacttaagagacggctgcggtcaccccacgcctccgcggctcaggagccgtcctgggtgcataggaccagtttctgtgacttttctccagttgggcatgttgacagacatgtttcccctcctcccaccctcattttctggtcctcgcgactgagagccaggggcgacatcatgaccttctgtcccggccgccttagccccgggcacagggaaggcagctgggccgtttctgtctgtgtcccatcctgctgtccttctgtcctggatgtttcatgggcccggggccccccagggaagcttacccctcctgtgctgggtggaggccacgggacacctcaggtgccacccaccttggccctaaaacagccaccaggaaagcagccggagagccggacagcaggcagcctgtctgggttcctgaggcctgggggtggcagacgagcccacggcgccgtggtcccagcagcagggttgtcagtcggagcatcctggggctccctggctcctggccgtctgtgaggtaggcgcagtaccgtgtatcgtaggtagcagtaggaacgggggccgccgcggccctgcagccgctcatggcggtgaggtgtgtgccaagcccacccggggtgcagggcgtgacgtgtggggaataaataggcgttgtgacctctgtc

SEQ ID NO: 62355 - DNA, 1306 bp, Homo Sapiens
gcacgaggggcatttcttaaaagggtgagcaacagaacaaaaggcagaaaaggcatacctaaggactaatttaaacacatatcaatgtgaaggactaatttaaattactatcatttatgattgcagtaataaagtgataagcattcaagcaactctgtattttccccatattattttaaatgtccattttcatttataggccaaatcctgccaggaaagtaaccagatctctggatttcactgttaagtcatttcagattgaccatattcagacagtcatggggtgaaataattcacttacctccaaaatagcatcctatatgccaataatgagttattgatctgactagttgtatgtctttctgttcaaaatagaaattatcctttcttactaatgccttgaaagaatgaacaaataaaaattcccagaccacagaatttccacagcaagaatacacttattttaattaacaatagcacagatatagcatagggcagtgggttttttagttaatttatggcgtactttgtttatccattggccaacctgaaggaaatgaaactcacctatctttctatcacagatgaatgtgctagatgaatgatttgggttgtatctgatcatggttcacaaaaattatgttagtgtgttttcagtatgctaaaaagtcagagtgatacaaaagtgatatttaaaaatatacacacatgtatgtacacatgcttcagaaatattgttgcttagggtgatttgggcagctaaatagtaagtactttttaaaatttttgcatcatcatcttcctatttaatgaattgtgatttaaaacaaaatgaaaataagccaggtattctaaaagatcctggatacaaattaagaattttgctttattttaaaccaaattgagattaaattgaagaaaagcaagcaaattaatttcagcttgattatcaacctgtatcaagaacaaaaatgggaggaggtgtccacatttatggtgtgtataggtaacatggggaaaatgctattctgtgttttggaaaagaagaaatagtgccgtcctatttatttctatatttagaaatttttctcaaagaaatttcaattgtatctatgagatgggtttctaagtatcttattgtgtgttataagtgccttttaatatcatactaagtgtgagcttctggacattttcaagagcttacaaaaactaagtggcattgtatttttataaccccattgagaagactaagtaagaaatgaaatgtcctatcaattttattttgtcatgcttcaaaccctcgtgc

SEQ ID NO: 62356 - DNA, 815 bp, Homo Sapiens
atttccacatggaatcaatctttaacaacctctgagccttggggtacagaccacctttcacaaaacgaaatgctatgactgtatcttgatatctcgaactttcaaaaatatattttcagtacacccagttgccaaagttttgctgtctcttagagaaagaactatgaaatcaactgacaagaaacacattcttattgacaattgtgtataaactggattgcagactgttcttactgtaactacttcctgattaggaatatgaccatttgactgttcaatgattatttgtatttacagtttccagagtttgtcattataataggaacaatctttgctgtatacttttaaaaaatactctgctatttctcttgctggaactgttgaaagaaaatatatagaatgatctattgctcatcagctttattttttaaacatacgacttattttgttgaaattgtcaaagactgtatttagatctcataatgctttgttaaacgtttacaagtaaatagtttgaattcagtaaatattattggttgttgtattgatcaatgcatgttacccattcaaccattttatagactaccaatttcttttatgttaactagaatgcttttgttaaaagttatttgttcattatttgtgctacccctttgattatgcagacaacctcatcagctgcctaacttatccatctttgaacttctgactacttgttgtatctgctggatatttagttcaactgtatagttttatttacttctgtatgtgtatttttgtgaagtattcacaaaggttaagttaaaacctcgtgc

SEQ ID NO: 62357 - DNA, 566 bp, Homo Sapiens
  misc_feature (199)..(207): n is a, c, g, or t
tttgacaatgaatatggaattgcatacaatagtctgtcttcagagattcttgaaaggttgcagaaaattgatgctccaccaagtgccagtgtcgagtggtgcaggaagtgttttggagcgcctctcatttaaatagagattcactagaatgttgacacacaaggcttggggattagatttcatctggaaacattcaagnnnnnnnnnccaaatcgtaagaactggtgaatacggaattgaagtaactcttggggacaatatataatgaattatgattcatattgcattaccttgaaatatgaagtgccatttgaatgtcccagggcttattaatattgaagattttcaacccctgaactgcttttctgcctctgtggaaaactactttgggattcttcagtatttgtagtagtttgatagaaataatgaggaaccatattcattttaggcattgtttatatttgaagttactgagtttgaggaatggcaaattaaatttgcctaacccccaaaacaaatgaaatatctcaattataaaagcaacatggccgggcacggtggctcag

SEQ ID NO: 62358 - DNA, 398 bp, Homo Sapiens
ctggactgcccacacggtgactctcttttgtcctttttcagctttaaccggatcgacattccaccatatgagtcctatgagaagctctacgagaagctgctgacagccgtggaggagacctgcgggtttgctgtggagtgaaaagcaaccaaaggcaacagagtctagctcatggccaccagaccaaaagcatccagcttctgtgcacctcctgcaaagctggcagaggccctggaattccagatcacctgaggggaaagggttgtctctctcctttctgttgggggagggggatgggggacttttgttggtggctcccacccatatatccctcctttaccatagtactcccacccacttccatcacccatccaataaaatgcagccaggcctcgtgc

SEQ ID NO: 62359 - DNA, 819 bp, Homo Sapiens
cccttaaggagaggaaaaagaaggagcaaagatcgacatacagaacctccttacccacacaatctccgtccgtgaagtctttggcaggtccccacaatagaggaggtggaagatgaagaagagagaaaccataggcagatgataaagggaagcttttgctggggaagatgtcatcagagatttcttgaaagagaagagggaagctgtggaggcgagtaagccaaaggacgtggacctgacactacctggtgggggggagtggggtggtgtgggcctaaagcccagtgccaagaaaagacgccggtttctcattaaagcccctgagggtcctccaagaaaagataagaatttgccaaatgtgattatcaatgagaagcgcaacatccacgcagctgctcatcaggtacgagtgcttccatatccatttacccaccattggcaatttgaaaggaccatccagacccccataggatccacatggaacacccagagggctttccaaaagctgactactcccaaggttgtcaccaagccaggccatatcattaaccccataaaagcagaagacgtgggctaccggtcttcctcaaggtcggacctgtctgtcatacagaggaatccaaaacgaatcaccacacgtcacaaaaaacagctgaagaaatgctctgtagattgagttgctggaggagtgacagccaggagccctgacttcacttcctttggtccagttttactttgatacagggtggattccaaaactggctcagtacattgcatgtagttaagccacattttaaaaataaaggcattttttaattt

SEQ ID NO: 62360 - DNA, 778 bp, Homo Sapiens
gcacgagggatttgttggtggcattccccttttgggaaagcaatgtaaggttatgtctgtgtatgtcattcacacttaggcaagcatacacaggcacatggctttaagaaccacactgatgccttgataattaaaaagaatacaagcattccatgtacacatgttaattagcagttagtgactgggccaacactttctcataaaaattggccttttacatgttgtctaattatcatttttccccaaattttgcgttgtaggactactgttcgaagatttttggaagaatactgagaacggcataaagtgaagatcgacatttaaaaaatgaggtgaaagaaagctatagtggcatagaaaaagtataaagctcagttagtttttttattattattattattaaaagttaattcaggactgatgtgacctaccagatttcagaacatgtgttaatagtatatatgccactgaaaacttaggtcctgtatcatacttttttctttaagactttttaagaaatattacttaaacatgtggcttgctcagtgtttaattgcaagttttcaatcttggactttgaaaacaggattaaacgttagtattcgtgtgaatcagactaagtgggatttcatttttacaactctgctctacttagcctttggatttagaagtaaaaataaagtatctctgactttctgttacaaagttgattgtctctgtcattgaaaagttttagtattaatctttttctaataaagttattgactctgcctcgtgc

SEQ ID NO: 62361 - DNA, 814 bp, Homo Sapiens
ttttcttccaaccctgcaacactggccaatgcccctgcatcttctcctttagctgaaattgatatcacaaatgttgctgagttacttgtagatttgacaagaccaagtggattaatcctcaggccaagacttcccaagattatcaggccttaacagtacatgacaatttggctatgaaaatttgcaatgagatcttaacaagtccgtgctcgccagaaattcgagtctatacaaaagccttgagttctttagaactcagtagccatcttgcaaaagatcttctggttctattgaatgagattctggagcaagtaaaagataggacatgtctgagagctttggagaaaatcaagattcagttagaaaaaggaaataaagaatttggtgaccaagctgaagcagcacaggatgccaccttgactacaactactttccaaaatgaagatgaaaagaataaagaagtatatatgactccactcaggggtgtaaaagcaacccaagcatcaaagtctactcagctaaagactaacagaggacagagaaaagtgacagtttcagctaggacgaacaggaggtgtcagactgctgaagccgactctgaaagtgatcatgaagttccagaaccagaatcagaaatgaagatgagactaccaagacgagccaaaaccgcagcactagaaaaaagtaaacttaaccttgcccaatttctcaatgaagatctaagttaggaaagacgatggaggtggaatcctttaagattatgtccagttatttgctttaataaagaagaagttacccttgtcaaaatcagaac

SEQ ID NO: 62362 - DNA, 1031 bp, Homo Sapiens
tccgaagggacaggtgccagttagacgaaactgcatctctgttgtacgtgtcagtctagaggtctcactgcaccgagttcataaactgactgaagaatcctttcaactcttcctgactttcccagccctttggtttgtgggtatctgccccaactactgttgggatcagcctcctgtcttatgtgggcacgttccaaagtttaaatgcatttttttgactcttggccaaaatttagaagatgctgtgaatatcattttgaacttgtgtaaatacatgaaagagaaaacctttgtctggaacttctaggctttgtgcaagctgtgtccaaggcaagtacataaactggtacctattaatgaagaggcagctgatgccatgcacttgtctgagggcatagctccatgtcttctgacattcctggtgtcccaaagaatagcaaaaagccagtttgaatattatgtaacttatttttttaatgtggacaggggaccttgaaaatcactaagttattaaaaatgtggatgtgctagaattggatatgtccaggaacatgggaagggctcactattggaatcccatgagtttccattttgtctttacccaaaggtattccaaagctgactgcatttgtaccatcttatttcttttggggattatacacctcagccgcctgagatgggggtcagctctttatataaagggaaaccagaccaggcctaaagcccaccccctaccctcacccccacaatcctctcctgaaacttaaaaacagtgggaatataggaaagggaaccaaatctcattaattaattgttctcccccattaccccactgaatgaatggccatacaggctaagctgaataatgacaaagttgaaaggaccaatacagccccttttataaggattttgaatgttttgcaaatgtattggtccctgtgttgtattttgtagccttttcctgggcttcagctcccctacttcttgtatgtgtatgcatactgtagctaaccattaaagtcatgacacac

SEQ ID NO: 62363 - DNA, 887 bp, Homo Sapiens
gcacgaggcggccgtcgggtgtgagctgcgccgaccgctctgagggttcgtggcccaccgctccttcgcggtccctgccgccaccgtccacgctcagcgttgtagagaagatggtgggtcggaacagcgccatcgccgccggtgtatgcggggcccttttcattgggtactgcatctacttcgaccgcaaaagacgaagtgaccccaacttcaagaacaggcttcgagaacgaagaaagaaacagaagcttgccaaggagagagctgggctttccaagttacctgaccttaaagatgctgaagctgttcagaagttcttccttgaagaaatacagcttggtgaagagttactagctcaaggtgaatatgagaagggcgtagaccatctgacaaatgcaattgctgtgtgtggacagccacagcagttactgcaggtcttacagcaaactcttccaccaccagtgttccagatgcttctgactaagctcccaacaattagtcagagaattgtaagtgctcagagcttggctgaagatgatgtggaatgagaaacaaatgtcaacataataaaatctcagttaaaaatattttaaaaattcttggtagttgagcagctctgggggaataagggcaaatatgcttgttatgaactacactgaaatctaccaaagttaatgtttactttgtgtagatccatttgtctattttatttatttttcccagtgaaaagtgtattttgatagagaacttttcattctataaatacactatgagttactaaaatatcatggattttgtttattcctgaaacatagttacatagttaaactgtacatatgacatggcttatgttaaaaatacccagtgctcagttttgaaagataggc

SEQ ID NO: 62364 - DNA, 1036 bp, Homo Sapiens
gcacgaggctgaaccgggcggacttaatgcagagacaaggccagtatgacccacctccaggagccagcaacattttgggacttgaggcatctggacatgtggcagagctggggcctggctgccagggacactggaagatcggggacacagccatggctctgctccccggtgggggccaggctcagtacgtcactgtccccgaagggctcctcatgcctatcccagagggattgaccctgacccaggctgcagccatcccagaggcctggctcaccgccttccagctgttacatcttgtgggaaatgttcaggctggagactatgtgctaatccatgcaggactgagtggtgtgggcacagctgctatccaactcacccggatggctggagctattcctctggtcacagctggctcccagaagaagcttcaaatggcagaaaagcttggagcagctgctggattcaattacaaaaaagaggatttctctgaagcaacgctgaaattcaccaaaggtgctggagttaatcttattctagactgcataggcggatcctactgggagaagaacgtcaactgcctggctcttgatggtcgatgggttctctatggtctgatgggaggaggtgacatcaatgggcccctgttttcaaagctactttttaagcgaggaagtctgatcaccatttgctgaggtctagggacaataagtacaagcaaatgctggtgaatgctttcacggagcaaattttgcctcacttttccccggagggcccccaacgtttgctgccggttttggacagaatttacccagtgaccgaaatccaggaggcccataagtacatggaggccaacaagaacataggcaagattgtcctggaactgccccagtgaaggaggatggggcaggacaggacgcggcccccccaggcctttccagagcaaacctggagaagattcacaatagacaggccaagaaacccggtgcttcctccagagccgtttaaagctgatatgaggaaataaagagtgaactgg

SEQ ID NO: 62365 - DNA, 561 bp, Homo Sapiens
gcacgaggcggagccgagccatgtgtctttacacctcgctgttgtcacatctcagggaactgaccctcaggcacaccttgcagaaggcaaggccctgccctgcccaacctctgtggtcacccatgcatcttccactggaacgtttcactgcaaacacaccttggagaagtggcatcagtcaacagagaggggcagggaaggagacaccaagctcacccttcgtcatggaccgaggttcccactctgggcaaagcccctcacactgcaagggattgtagataacactgacttgtttgttttaaccaataactagcttcttataatgatttttttactaatgatacttacaagtttctagctctcacagacatatagaataagggtttttgcataataagcaggttgttatttaggttaacaatattaattcaggttttttagttggaaaaacaattcctgtaaccttctattttctataattgtagtaattgctctacagataatgtctatatattggccaaactggtgcatgacaagtactgtatttttttatcctcgtgc

SEQ ID NO: 62366 - DNA, 1127 bp, Homo Sapiens
ccttaatgggcaagaatttccgctcctacctgctggatctgcgaaacactagtacgcctttcaagggtgtacgcaaagcactcattgatacccttttggatggctatgaaacagcccgctatgggacaggggtctttggccagaatgagtacctacgctatcaggaggccctgagtgagctggccactgcggttaaagcacgaattgggagctctcagcgacatcaccagtcagcagccaaagacctaactcagtcccctgaggtctccccaacaaccatccaggtgacatacctcccctccagtcagaagagtaaacgtgccaagcacttccttgaattgaagagctttaaggataactataacacattggagagtactctgtgacggagctgaaggactcttgccgtagattaagccagtcagttgcaatgtgcaagacaggctgcttgccgggccgccctcggaacatctggcccagcaggcccagactgtatccatccaagttcccgttgtatccagagttcttagagcttgtgtctaaagggtaattccccaacccttccttatgagcatttttagaacattggctaagactattttcccccagtagcgcttttttctggatttgcattcaggtgttattcttaatgtttctgtcaaagcttcttaaaaatcttcacttggtttcagccatagttcaccttccctgttccaggtttatttaattccaaaggtgagagttggagtgagatgtcttccatatctatacctttgtgcacagttgaatgggaactgtttgggtttagggcatcttagagttgattgatggaaaaagcagacaggaactggtgggaggtcaagtggggaagttggtgaatgtggaataacttacctttgtgctccacttaaaccagatgtgttgcagctttcctgacatgcaaggatctactttaattccacactctcattaataaattgaataaaagggaatgttttggcacctgatataatctgccaggctatgtgacagtaggaaggaatggtttcccctaacaagcccaatgcactggtctgactttataaattatttaataaaatgaactattatcaaataaaacgtatgaa

SEQ ID NO: 62367 - DNA, 834 bp, Homo Sapiens
cagtcaaacgtaaaatgaagtcatctgtactcccaaaggcgtccactcttcaaagtcatcagctgtcatgagcaaggagatgtaagaacaacgctcttgtcccaggaaccattcaagtaaatggccatggaggacagccatcaaaacttgtgaagaggggacctggaaggaaacctaaagtagaagttaataccaatagtggtgaaattatacacaagaaaaggggtagaaagcccaaaaagctacagtatgcaaagccagaagatttagagcaaaataatgtgcatcccatcagagatgaagtacttccttcttcaacatgcaattttctttctgaaactaataatgtaaaggaagatttgttacagaaaaagaatcgtggaggtaggaagcccaaaaggaagatgaagacacaaaaattagatgcagatctcctagtccctgcaagtgtcaaagtgttaaggagaagtaaccgaaaaaagatagatgatcctatagatgaggaagaagagtttgaagaactcaaaggctctgaaccccacatgagaactagaaatcaaggtcgaaggacagctttctataatgaggatgactctgaagaggagcaaaggcagctgttgttcgaagacacctctttaacttttggaacttctagtagaggacgagtccgaaagttgactgaaaaagcaaaagctaatttaattggttggtaacttgtaccaaaatattttacttcaaaatctataaagcaggtacagttaaggaataagtagaactaaggcttctgcttccttgctgctgtggtggagtagggaatgttatgatttgatttgc

SEQ ID NO: 62368 - DNA, 1362 bp, Homo Sapiens
gcacgaggtacacaaaatatgtgggaaagattttttgcatgacttttctctcattttattcttccataatgtatttctactataaaatagaatcaacttgggttatatttgtcatttactttgttctgttagattttttcagttgtttttggaaaaattctagaaatcaggatgaaaaatgcagcttttccagggttgctggactgggggttttatttgggcctccttattataatttgtcactacttataaaaaacattctgttgcaaacagtggtgttgcattgaattgaactttggcaatgagaacacagcacacagctcccttttcaaaaagggtctcaaccccagtgtgtatttttgtacatcaacatttagaatacttatggcagataagtaaggcatgtcactgtgtccttcagtaacctctctcagtaactggtttctttatccctaacatgaattcatttctcctttgaagtcatttattattttataaattgagaacaaccacaccaccaaatgtcacaccttcttataaagtgtgaacaaggaaggtcatgtttttgtgggtattttgtcagacttagaggtttcatttcagggcatagtcaaaggcatcatcctcccaactacccacttgattatgtatttcagatccctccgtgggggccttctttctgacagagaattctttgaggtccgcagtagtgcttttgtcagcacagactgctaatctacatcttgctgcgttctgtttgctgaggttgggcttattcatttaacacgtaccaaccattatccagaggcaccatggagagttagtcatggaataaagcactgtccttgcagatgaaaaaagtctccagagcagacttctgacaggaaaggtttagatgctggagagttgaagaggtgtaagaagagatcgtgccctcatttttcacttatttttttggttattcatttataataaaaggttggcattgatatggtacaacctgcaaattacttgcagttctgagtttcagataaaacattataaaacattaaattcaatacatactgctcctttgaaatttgggtaaaaaattgtacaaccgtatatatagtcatttttgtattttttctatgttgtgaaaaccaaaattgtaattttataagtctttgattcactaaaattatataatttaaatgtattttttgtatatttagaaataaggagtccagagactacgcttaactttctatgcatgcatttgaaagctgtttttacctgatcggtgtagtaataagttgtattcataaaatactgatctgtgttgcatttcaaaataaactggtgtgtgctctgccctcgtgc

SEQ ID NO: 62369 - DNA, 643 bp, Homo Sapiens
tttgtcagcactaattaaatactttatgaataaatacaataccaaacaaaatgcattcaaatgctttctaaaaaaattttaaaggcctttctactcaggctaatgacaaacacaataaaggcagatatgctagtttaacataattggctgattttatacagcacttatatcttttagtccacaagtatattattaaatgatagagaacatctaatacaaccatttctacagaactaggaaataaatttctaagaaagaaagattttacagaccccatcttttatacccaccccaacagtctaactctaaagaggataaagccaatgactttcctcacaagagctcacgactaacgtcgctttgctatcaaaatctgtatttctgatccgttatgagcattgagacaagattcaaatattcccaaagaaagaagcacaatgcacgttgtgatcgcctattcagcaacagcgagcactgcatccaaaactctcatcccaggaattaaataaggtcagccacattcatgggcatctcctccactgtagtattgtagaaagtctcaatgtcacgaagaatcctcttgtcttcttcagtaacaaagtttatagccacacctttcctcccaaatcgacccccctcgtgc

SEQ ID NO: 62370 - DNA, 653 bp, Homo Sapiens
gcacgaggtataattgaaatgtttagtttttatgaaaaatgacaagtcgatggttaaacttctcatgtctttggtgctttggccctaatagcactggacaacaccacgaccacatggaaacatatttttggaagcaaaactttaattttatataacgtatgctatggagagctaagacaatttaaggactacttgttttctattttttttcttaataaaatggaatccactgtgttgaagactcttgatatcatgtgcttgtctaaccattttttgttttataaattataataaaatatagttgtgataatggtcatcgaatggatttgtttggaaagctacatcttatttgtgaaatgttttttaaatcagagtaactatcaactgattcagctttttgttgttttgttcttggctataatacttgtgactcatgaagaattatgttgacaaacaggataaattccacatgcattttatttcccagtgagttgtataaactttatttttgttgaaggttgtatgttaaatcaatgttacattcttatatcacttcttgagaaggaagttccgatttgaaattgtatcatttccttcaaaatgaagggcagtgcttagttaaataaaagattgatgatatcttttcctcgtgc

SEQ ID NO: 62371 - DNA, 1596 bp, Homo Sapiens
gcacgaggagcacacaagcttctaggacaagagccaggaagaaaccaccggaaggaaccatctcactgtgtgtaaacatgacttccaagctggccgtggctctcttggcagccttcctgatttctgcagctctgtgtgaaggtgcagttttgccaaggagtgctaaagaacttagatgtcagtgcataaagacatactccaaacctttccaccccaaatttatcaaagaactgagagtgattgagagtggaccacactgcgccaacacagaaattattgtaaagctttctgatggaagagagctctgtctggaccccaaggaaaactgggtgcagagggttgtggagaagtttttgaagagggctgagaattcataaaaaaattcattctctgtggtatccaagaatcagtgaagatgccagtgaaacttcaagcaaatctacttcaacacttcatgtattgtgtgggtctgttgtagggttgccagatgcaatacaagattcctggttaaatttgaatttcagtaaacaatgaatagtttttcattgtaccatgaaatatccagaacatacttatatgtaaagtattatttatttgaatctacaaaaaacaacaaataatttttaaatataaggattttcctagatattgcacgggagaatatacaaatagcaaaattgaggccaagggccaagagaatatccgaactttaatttcaggaattgaatgggtttgctagaatgtgatatttgaagcatcacataaaaatgatgggacaataaattttgccataaagtcaaatttagctggaaatcctggatttttttctgttaaatctggcaaccctagtctgctagccaggatccacaagtccttgttccactgtgccttggtttctcctttatttctaagtggaaaaagtattagccaccatcttacctcacagtgatgttgtgaggacatgtggaagcactttaagttttttcatcataacataaattattttcaagtgtaacttattaacctatttattatttatgtatttatttaagcatcaaatatttgtgcaagaatttggaaaaatagaagatgaatcattgattgaatagttataaagatgttatagtaaatttattttattttagatattaaatgatgttttattagataaatttcaatcagggtttttagattaaacaaacaaacaattgggtacccagttaaattttcatttcagatatacaacaaataattttttagtataagtacattattgtttatctgaaattttaattgaactaacaatcctagtttgatactcccagtcttgtcattgccagctgtgttggtagtgctgtgttgaattacggaataatgagttagaactattaaaacagccaaaactccacagtcaatattagtaatttcttgctggttgaaacttgtttattatgtacaaatagattcttataatattatttaaatgactgcatttttaaatacaaggctttatatttttaactttaagatgtttttatgtgctctccaaattttttttactgtttctgattgtatggaaatataaaagcctcgtgc

SEQ ID NO: 62372 - DNA, 1287 bp, Homo Sapiens
gcacgagggagcagtcagcccgcgcgccggccggctccgttatggcgacccgcagccctggcgtcgtgattagtgatgatgaaccaggttatgaccttgatttattttgcatacctaatcattatgctgaggatttggaaagggtgtttattcctcatggactaattatggacaggactgaacgtcttgctcgagatgtgatgaaggagatgggaggccatcacattgtagccctctgtgtgctcaaggggggctataaattctttgctgacctgctggattacatcaaagcactgaatagaaatagtgatagatccattcctatgactgtagattttatcagactgaagagctattgtaatgaccagtcaacaggggacataaaagtaattggtggagatgatctctcaactttaactggaaagaatgtcttgattgtggaagatataattgacactggcaaaacaatgcagactttgctttccttggtcaggcagtataatccaaagatggtcaaggtcgcaagcttgctggtgaaaaggaccccacgaagtgttggatataagccagactttgttggatttgaaattccagacaagtttgttgtaggatatgcccttgactataatgaatacttcagggatttgaatcatgtttgtgtcattagtgaaactggaaaagcaaaatacaaagcctaagatgagagttcaagttgagtttggaaacatctggagtcctattgacatcgccagtaaaattatcaatgttctagttctgtggccatctgcttagtagagctttttgcatgtatcttctaagaattttatctgttttgtactttagaaatgtcagttgctgcattcctaaactgtttatttgcactatgagcctatagactatcagttccctttgggcggattgttgtttaacttgtaaatgaaaaaattttcttaaaccacagcactattgagtgaaacattgaactcatatctgtaagaaataaagagaagatatattagttttttaattggtattttaatttttatatatgcaggaaagaatagaagtgattgaatattgttaattataccaccgtgtgttagaaaagtaagaagcagtcaattttcacatcaaagacagcatctaagaagttttgttctgtcctggaattattttagtagtgtttcagtaatgttgactgtattttccaacttgttcaaattattaccagtgaatctttgtcagcagttcccttttaaatgcaaatcaataaattcccaaaaattt

SEQ ID NO: 62373 - DNA, 943 bp, Homo Sapiens
tgagccaccatgcccggcccataagtaccgtttttgaggttcagtcttaaacatttgctttaagaaaacagtcttgaatttcacatgctgctatttttatattttgccattttacagtactgttttgttttgaattcatgcatatcattgaaaatttctcgttttcattttctagatgacttcttgtctgagacagaaaaatttcctactacagcagtgcagtccagaggttaagatgtattagaattatacaatatcagtttaaaaatctgtatgcataaagaatgcaccactcaacttttttattcataagctaatatttttttaaagttacattaagattttttctcttttgcagctacatttgaaagtgatagaataaagagattttaatgagttatcactttttcagctgatatattcattttaatggcttttttgaaagttcctttttcatgaacacacccgagaaatcttaaatagacactttgcaatatttaagaacctaatgctgtttaattttggtacagcttccacattgcatgttcactttagtatttgcaatttgatatatttcatggtggcaaaatattagctctgttttgggacattttaaaatagaactatccttgttcgatagcataggaaaatgttctggtgattgtcagggtctcctaatatttatctcaattcttttataagtctatggaaattatttaattattttaaaacgtacacacttttcttgtaaatatgtcacatctgagttcaaaaaaattactttgaataccttaatatttgctgcatttttttccgtatatataacatgtcttctttcagaatgggaatatatgtgtgcctcccaacatttactgttaaagtgtgttatctttatatgtcaaactggttgaacactgtaatgagaataaactgcacagagttt

SEQ ID NO: 62374 - DNA, 1583 bp, Homo Sapiens
gcacgaggggatggtgcaggagcgcgagaaggatatcctgacggccatcgccgccgacctgtgcaagagtgaattcaatgtgtacagtcaggaagtcattactgtccttggggaaattgattttatgcttgagaatcttcctgaatgggttactgctaaaccagttaagaagaacgtgctcaccatgctggatgaggcctatattcagccacagcctctgggagtggtgctgataatcggagcttggaattaccccttcgttctcaccattcagccactgataggagccatcgctgcaggaaatgctgtgattataaagccttctgaactgagtgaaaatacagccaagatcttggcaaagcttctccctcagtatttagaccaggatctctatattgttattaatggtggtgttgaggaaaccacggagctcctgaagcagcgatttgaccacattttctatacgggaaacactgcggttggcaaaattgtcatggaagctgctgccaagcatctgacccctgtgactcttgaactgggagggaaaagtccatgttatattgataaagattgtgacctgggacattgtttgcagacgcataacctggggaaaatacatgaattgtggccaaacctgcattgcacccgactatattctctgtgaagcatccctccaaaatcaaattgtatgaagattaagaaacagtgaaggaattttatgagaaaatataaagagtctcctgattatgaaaggatcatcaatcttcgtcatttaagaggatactaagttgcttgaaggacaaaagatagcttttggtggggagactgatgaggccacacgctacatagccccaacagtacttaccgatgttgatcctaaaaccaaggtgatgcaagaagaaatttttggaccaattcttccaatagtgcctgtgaaaaatgtagatgaggccataaatttcataaatgaacgtgaaaagcctctggctctttatgtattttcgcataaccataagctcatcaaacggatgattgatgagacatccagtggaggtgtcacaggcaatgacgtcattatgcacttcacgctcaactctttcccatttggaggagtgggttccagtgggatgggagcttatcacggaaaacatagttttgatactttttctcatcagcgtccctgtttattaaaaagtttaaagagagaaggtgctaacaaactcagatatcctcccaacagccagtcaaaggtggattggggaaaattttttctcttgaaacggttcaacaaagaaaaactcggtctcctgttgctcactttcctgggtattgtagccgctgtgcttgtcaaggctgaatattactgaagaatgatcctgttcaacctcctagtgcctctactgaattattcctcttttaaatggttaatgaaccaataatttttaaatcataccaaaaatagtaagaaaatatgcaaacactctgtgatcaaacttaaaagtcattgccattcatcattaataaaagttgccatttcacacctctactataagagaaacctcgtgccgaattcctgcagcccg

SEQ ID NO: 62375 - DNA, 994 bp, Homo Sapiens
  misc_feature (684)..(739): n is a, c, g, or t
gcacgaggggtaccgctttaaaagtcaaaggtttgggcaaaactacccctgatccttcagctaacattagtctggatggtgtagacgttcctcttgggaccgggatttcatctggtgtgaatgacacctctctactatataacgagtacattgtctatgatattgctcaggtaaatctgaagtatctgctgaaactgaaattcaattttaagacctccctgtggtaattgggagaggtagccgagtcacacccggtggctctggtatgaattcacccgaagcgcttctgcaccaactcacctggccgctaagttgctgatgggtagtacctgtactaaaccacctcagaaaggattttacagaaacgtgttaaaggttttctctaacttctcaagtcccttgttttgtgttgtgtctgtggggaggggttgttttggggttgtttttgttttttcttgccaggtagataaaactgacatagagaaaaggctggagagagattctgttgcatagactagtcctatggaaaaaaccaagcttcgttagaatgtctgccttactggtttccccagggaaggaaaaatacacttccacccttttttctaagtgttcgtctttagttttgattttggaaagatgttaagcatttattttagttaaaaataaaaactaatttcatactannnnnnnnnnnnnnnnnnnnnnnnnnnnnnnnnnnnnnnnnnnnnnnnnnnnnnnngcctcttgtggtgaggggtgtgggaagaccaaaggaaggaacgctaacaatttttcatacttagaaacaaaaagagctttccttttccaggaatactgaacatgggagctcttgaaatatgtagtattaaaagttgcatttgaaattcttgacttttttatgggcacttttgttttccaaattaaaactttaccacaaatatacttacccaagggctaatagtaatactcgattaaaaatgcagatgccttcttt

SEQ ID NO: 62376 - DNA, 876 bp, Homo Sapiens
cccatgcgagtccagaaggaggtggccggcttcgttctgaaccgctgcaatatgcaatcatcagcgaggcctggcgggctagtggaggaaggaatcgtgtctcctagtgacctggaccttgtcatgtcagaagggttgggcatgcggtatgcattcattggacccctggaaaccatgcatctcaatgcagaaggtatgttaagctactgcgacagatacagcgaaggcataaaacatgtcctacagacttttggacccattccagagttttccagggccactgctgagaaggttaaccaggacatgtgcatgaaggtccctgatgacccggagcacttagctgccaggaggcagtggagggacgagtgcctcatgagactcgccaagttgaagagtcaagtgcagccccagtgaatttcttgtaatgcagcttccactcctctcattggaggccctatttgggaacactgcaagcccttaatcagccctctgtgacataggtagcagcccacggagatcctaagctggctgtcttgtgtgcagcctgagtggggtggtgcaggccggtagtctgcccgtcactttggatcatagccctgggcctggcggcacagcagcacttgcgttctcggggctgtcgatttcctgccacctgggcagataacctggagatttccaccttttcttttcagcttgattgcatttgactatattttacagccagtgattgtagtttcatgttaatatgtggcaaaatatttttgtaattattttctaatccctttctgagtactctggggccctgcatttatgaggcacctaccttcattttgctaacgcttattctgaataaaagtttttgattcctcctcgtgc

SEQ ID NO: 62377 - DNA, 540 bp, Homo Sapiens
gcacgaggcttgccttcttcacccagctaatctgtagggctggacctatgtcctaaggacacactaatcgaactatgaactacaaagcttctatcccaggaggtggctatggccacccgttctgctggcctggatctccccactctaggggtcaggctccattaggatttgccccttcccatctcttcctacccaaccactcaaattaatctttctttacctgagaccagttgggagcactggagtgcagggaggagaggggaagggccagtctgggctgccgggttctagtctcctttgcactgagggccacactattaccatgagaagagggcctgtgggagcctgcaaactcactgctcaagaagacatggagactcctgccctgttgtgtatagatgcaagatatttatatatatttttggttgtcaatattaaatacagacactaagttatagtatatctggacaagccaacttgtaaatacaccacctcactcctgttacttacctaaacagatataaatggctggtttttaga

SEQ ID NO: 62378 - DNA, 276 bp, Homo Sapiens
gcacgaggccttcctagaggccctgggggccaggctgacttggggggcagacttgacactaggccccactcactcagatgtcctgaaattccaccacgggggtcaccctggggggttagggacctatttttaacactagggggctggcccactaggagggctggccctaagatacagacccccccaactccccaaagcggggaggagatatttattttggggagagtttggaggggagggagaatttattaataaaagaatctttaaccctcgtgc

SEQ ID NO: 62379 - DNA, 653 bp, Homo Sapiens
tttttcaaagccagaacttactccatttttatgcaaaatgtcagaaaaaatgaaacaccctctctcccaagtcagagaaggggaagcaacggctctcacgttgggacaatattatctggaagctgaagaagaaactgaatactccttccttcctccccacccattcctttaaatccggagggggaaaaaatcccaaggtttgcaaagggcctggaatctccgccgaggccggcgagggagaggaaacggctagagaaacacagaaaagacaatttacagagaaatgtttactatctcccttcggagacatttttgaaattaaagggctgtgggtggaaacaccaaaaatgagggagactcccccctcaccaggaagcctgcccgagaatgcccaagtatctcgccactcccgcaggagggagcctcgctctacagggagacagttttgtggttttaatgcggtaggttacagctgttggtttttgcgtgatactgattctattacttgcgttgtattggtatgggatgtgtggatttcggtggaggaaaaaattgccatgtgtgtgtctgatatgataacatttcaaactttcctgggtccagacatggtgattgtgaagaagctgttaagtgcctttttgttttaggcttgt

SEQ ID NO: 62380 - DNA, 839 bp, Homo Sapiens
gggaacaggctttgtacaagctttacagtgcagcagcaaacccacagacatctgtatcatcaagctttccctacaccaaagtcggaatctactgaacaatcagaaaagaaaaaaatgtaatgcaaattttaagaaatacaggtgcatgaccaattgtcaattaaatattcagttttatgtctccatgcaaacattcaaagtgcttccatcagaacggagtaaaatactaaacacctctgaagactgcaaactggattagttcttttacttcagtgtttaataagcagatgtatgtatgcatggttatactattttgttaacatgtacaatttcctgatttttcttcaaaaatgctgttataaagtatttgtctatttatgataacagtacacgtgttttgcttgaatttactaaattctactactgggttataattaaatcatgtgatattccacgtttggatatgctcatttaatttctacagaaaaaattttaaattatttcacattagccatttgttaaaacacagcatcataactcagcaggctggatttaatctgtatcattttatatatatcacaatcttatttttaagcacattttagagttccttagttgctttatcaaaaaccagatattgcttttacatggtttaatagaatataaacctcttgataaaaaatgcacaaaaaatcactttgtatatgtgagtttcactgcattgtatattttttcatttggtacacaaagaatgtattcttcataggtttattcttttaatatgtgaactattattaaagtttactctggttcctaagattaaaaacaaatgcttactg

SEQ ID NO: 62381 - DNA, 771 bp, Homo Sapiens
gcacgaggtgaaagcggagaaacagaaaaactttatcagttgctaacccaatacaaggaaagtgaagatgcagagttactgtggcgtttggcacgggcatcacgtgatgtagctcagcttagcagaacctcagaagaggagaaaaagctattggtgtatgaagccctagagtatgcaaaaagagcactagaaaaaaatgaatcaagttttgcatctcataagtggtatgcaatctgccttagtgatgttggagattatgaaggcatcaaggctaaaattgcaaatgcatatatcatcaaggagcattttgagaaagcaattgaactgaaccctaaagatgctacttcaattcaccttatgggtatttggtgctatacatttgccgaaatgccttggtatcaaagaagaattgctaaaatgctgtttgcaactcctcctagttccacctatgagaaggccttaggctactttcacagggcagaacaagtggatccaaacttctacagcaaaaacttacttcttttaggaaagacatacttgaaactacacaacaaaaagcttgctgctttctggctaatgaaagccaaggactatccagcccacccagaggaggataaacagatacagacagaagctgctcagttgcttacaagtttcagtgagaagaattgagaacttttcagagaagatttatgaaatagctaataaacattgccttttcttttaattctaaacttaatatatgaactataactgttaaaaacctcgtgc

SEQ ID NO: 62382 - DNA, 648 bp, Homo Sapiens
gcacgaggcggaagtgatcccctgcgtggctgggctgctcgggttagatcgtcaggaaaagcctaaagattagactgtaagaaaagaaaatagaagccatgtttcgaagacctgtattacaggtacttcgtcagtttgtaagacatgagtccgaaacaactaccagtttggttcttgaaagatccctgaatcgtgtgcacttacttgggcgagtgggtcaggaccctgtcttgagacaggtggaaggaaaaaatccagtcacaatattttctctagcaactaatgagatgtggcgatcaggggatagtgaagtttaccaactgggtgatgtcagtcaaaagacaacatggcacagaatatcagtattccggccaggcctcagagacgtggcatatcaatatgtgaaaaaggggtctcgaatttatttggaagggaaaatagactatggtgaatacatggataaaaataatgtgaggcgacaagcaacaacaatcatagctgataatattatatttctgagtgaccagacgaaagagaaggagtagaaaggatgattcttctttggccatcatttggtacagtctcatttccaagtcatgtataatctttatggcttccaaggacaagaattaaaatactcttttacgt

SEQ ID NO: 62383 - DNA, 744 bp, Homo Sapiens
  misc_feature (249)..(273): n is a, c, g, or t
  misc_feature (599)..(609): n is a, c, g, or t
tgccaccagagggtggtgccaagtgccacatcccttccgatccattcccctctgcatcctcggagcaccccagtttgcctttgatgtgtccgctgtgtatgttagctgaactttgatgagcaaaatttcctgagcgaaacactccaaagagataggaaaacttgccgcctcttcttttttgtcccttaatcaaactcaaataagcttaaaaaaaatccatggaagatcatggacatgtgaaatgagcannnnnnnnnnnnnnnnnnnnnnnnnaacaaagtctgaactgaacagaacaagactttttcctcatacatctccaaattgtttaaacttactttatgagtgtttgtttagaagttcggaccaacagaaaaatgcagtcagatgtcatcttggaattggtttctaaaagagtaaggcatgtccctgcccagaaacttaggaagcatgaaataaatcaaatgtttattttccttcttatttaaaatcatgcaaatgcaacagaaatagagggtttgtgccaaatgctatgaacggccctttcttaaagacaagcaagggagattgatatatgtacaatttgctctcatgttttnnnnnnnnnnnggtaaatgtaacttaatagttttgtaaatgggagagggggaatctataaactataaatacagttattttattttttgtacatttttaaggagaaaaaataaatattcataacataagagtaaaaaaacctcgtgc

SEQ ID NO: 62384 - DNA, 609 bp, Homo Sapiens
tgaagtacagttgggttcagaactagctattgctgccattgaaaaaaatggtggtgttgttactacagccttttatgatccaagaagtctggacattgtatgcaaacctgttccattcttttttcgtggacaacccattccaaaaagaatgcttccaccagaagaactggtaccatattacattgatgcaaagaaccgtgggtacctggcggatcctgccaaatttcctgaagcacgacttgaactcgccaggaagtatggttatattttacctgatatcactaaagatgaacttttcaaaatgctctgtactaggaaggatccaaggcagattttttttggtcttgctccaggatgggtggtgaatatggccgataagaaaatcctaaaacctacagatgaaaatctccttaagtattatacctcatgaattcccgtccaaggaagcagagttgttaaagagtactggaatagggggtgaaggatctatattcccttattgcattttccttatgtataattttccagatggtgatgttacttttcagtgtactcatatgtctcattttcatttaaaattaaatggcaggaaacaaggactgcatagag

SEQ ID NO: 62385 - DNA, 1256 bp, Homo Sapiens
gcacgaggcaatgcctttataaggactcctaagcgccgaagccaaggagcctcctcccttcctggttcaccccgcccaagggacctgcccccattcctgtggccctggggcccagcttccaatagtgtcagaagcaacttgtggctttgccttggttgtgagatgggtacattccaaaggagcagcctgggggagggggcaggctcagccagcccttggaggctcagagcagctggcccaggctccagctcgcctccagtggaagcccgagcgccctcagaaacgaccctggccaatgtcaacgcagagccgaggcggtgttgtcacggctaatgtgaaatctcttcccgtggcgcccatcctctgactctgcagtgccagcttggacagattgaggtctctgtggctttggtgaccctgcttaagcattcccaccgtgtcccagctctgctctaggactgcctcccactgcggcccctcacctgacttcagggtatggggagggagggagccagtgctccaaggccagggggctttgctcatgagagatgtcaggcttcctggaggcatcaggctttgagccctgctggggtccaactgacctgggaccaggtgtcgcgcagagatgtgcctcattctgtgcctccttctgtgcctcctaccatgttccctttaactgtgcctcagtgtgggttagggaacaattttgttattgtattaagtttattcagttaattcacttgaggaactaaccagtttttactttctgtctagaatgatgtacatgtagtagagtaagccataatgctcccaaagtgccttgttttctctgatacaaacatatttataaggacatattcctgtgggttcttgggtgtgtttgccacatcaagattttagggaaggggggtatatgtgtagtagggatgccgtttgaaaacaggcactcttcccctgaggatgggaaaggagctcttcagttggagatctaggcagtgggttaagccagacccctaaagtgaccctttcctcttctgccctattcttctcagaccctcagaaagacatccaatttttttaaatccctgtagctccaagcctggtctcatttgcttccctgccaggctcatcgtgtgtataccacatttgtgccccactgacctgaaggttccatgtaactgtatacacatgaatacttaaatgccaacatttaaaataatttgataaagtctttgtagccactcagcccctcgtgc

SEQ ID NO: 62386 - DNA, 856 bp, Homo Sapiens
ccgcggggggggccgctctagacatttaaagatcccccgggctgcaggaattcggcacgaggcaggggtcggaggtcagggcgagcgtctcgcaggccgtaggaggaagatggcggtggagtcgcgcgttacccaggaggaaattaagaaggagccagagaaaccgatcgaccgcgagaagacatgcccactgttgctacgggtcttcaccaccaataacggccgccaccaccgaatggacgagttctcccggggaaatgtaccgtccagcgagttgcagatctacacttggatggatgcaaccttgaaagaactgacaagcttagtaaaagaagtctacccagaagctagaaagaagggcactcacttcaattttgcaatcgtttttacagatgttaaaagacctggctatcgagttaaggagattggcagcaccatgtctggcagaaaggggactgatgattccatgaccctgcagtcgcagaagttccagataggagattacttggacatagcaattacccctccaaatcgggcaccacctccttcagggcgcatgagaccatattaaattctatttactatttgttgaatttatttttccgtcagttatgtaaaataaacatactcttcttcctcccctgattattgccattaagcctttaaattctaaacaaattataatgcatcatctatttaggagttagatttggatgtgctattgtatgattacgaatagtctgtatgtttcaagcccttctgtaaaatatgaagaaaagtgctcttagcattctgtgtaaaactgtactgttaaatatatgtgtgtaatcctcgtgccgaattcctgcagcccggg

SEQ ID NO: 62387 - DNA, 1801 bp, Homo Sapiens
  misc_feature (1252)..(1262): n is a, c, g, or t
gcacgagggtcctgtcctggctgctcgctctgcttcgctgcgccgccactatgctctccctccgtgtcccgctcgcgcccatcacggacccgcagcagctgcagctctcgccgctgaaggggctcagcttggtcgacaaggagaacacgccgccggccctgagcgggacccgcgtcctggccagcaagaccgcgaggaggatcttccaggagcccacggagccgaaaactaaagcagctgcccccggcgtggaggatgagccgctgctgagagaaaacccccgccgctttgtcatcttccccatcgagtaccatgatatctggcagatgtataagaaggcagaggcttccttttggaccgccgaggaggtggacctctccaaggacattcagcactgggaatccctgaaacccgaggagagatattttatatcccatgttctggctttctttgcagcaagcgatggcatagtaaatgaaaacttggtggagcgatttagccaagaagttcagattacagaagcccgctgtttctatggcttccaaattgccatggaaaacatacattctgaaatgtatagtcttcttattgacacttacataaaagatcccaaagaaagggaatttctcttcaatgccattgaaacgatgccttgtgtcaagaagaaggcagactgggccttgcgctggattggggacaaagaggctacctatggtgaacgtgttgtagcctttgctgcagtggaaggcattttcttttccggttcttttgcgtcgatattctggctcaagaaacgaggactgatgcctggcctcacattttctaatgaacttattagcagagatgagggtttacactgtgattttgcttgcctgatgttcaaacacctggtacacaaaccatcggaggagagagtaagagaaataattatcaatgctgttcggatagaacaggagttcctcactgaggccttgcctgtgaagctcattgggatgaattgcactctaatgaagcaatacattgagtttgtggcagacagacttatgctggaactgggttttagcaaggttttcagagtagagaacccatttgactttatggagaatatttcactggaaggaaagactaacttctttgagaagagagtaggcgagtatcagaggatgggagtgatgtcaagtccaacagagaattcttttaccttggatgctgacttctaaatgaactgaagatgtgcccttacttggctgannnnnnnnnnnccatctcataagaaaaatcagctgaagtgttaccaactagccacaccatgaattgtccgtaatgttcattaacagcatctttaaaactgtgtagctacctcacaaccagtcctgtctgtttatagtgctggtagtatcaccttttgccagaaggcctggctggctgtgacttaccatagcagtgacaatggcagtcttggctttaaagtgaggggtgaccctttagtgagcttagcacagcgggattaaacagtcctttaaccagcacagccagttaaaagatgcagcctcactgcttcaacgcagattttaatgtttacttaaatataaacctggcactttacaaacaaataaacattgtttgtactcacaaggcgataatagcttgatttatttggtttctacaccaaatacattctcctgaccactaatgggagccaatttcacaattcactaagtgactaaagtaagttaaacttgtgtagactaagcatgtaatttttaagttttattttaatgaattaaaatatttgttaccc

SEQ ID NO: 62388 - DNA, 488 bp, Homo Sapiens
gcacgaggagtttgtggttctagcagatcctaggcaagctggaatagattctcttctccgaaagatttatgagatttactcagactttgccctcaagaatccattctattccttagaaatgcctatcaggtgtgagctctttgaccagaacctgaagctagctctggaggtggcagagaaggctggaacttttggacctgggtcataggctgaacctgttatggacccccaaattctgagagttcctgcaacaagaatactgctgttgacactccagtggaaatcccagcagccttgttagtgcacttgaaagtgggagaatgctgaccctgatgacttgtactgattcctgagccttaacactgtgctctttccttctgtatataccatggtcttactttccaactctgtacagatttatttatggaggagctaggtccataaatgttgtaataaatattcctttgatcttggtgtttgcctcgtgc

SEQ ID NO: 62389 - DNA, 949 bp, Homo Sapiens
accatgaaaaagaaaaatgaccttaataaataacctaaagagtacacgtcaaagaactagaacaaactaagaaccaaactaagcctaaagaacaaactaagccctaaagttagaaaaagaaaataataaagatcagagtagaaatgaatgaaatagagactagaaaaacaataggtcaatgagactaagaagttggctttttgaaaagataaacaaaattcacaaacctttatcaagactaagaaaaaagagatgattcaaataaaataaagaggaaacatcagaactgatactacagaaatgcaaaagaccaccagaggctactgtaaacaagtatatgccaacaaattgaataacctagaagaaacagataaattcctagacacacataattctaccaatacggaatcatgaagaaaaataaaatctaatcagaccaataacacgtagatgcattaataagaaatgctttcccataaaagaaaagcctaggacctgatggtttcattgctgaattctaccaaaaatttaaagaacaattcctctcaaattcttcaaaaaactgaagaagagtaaatacttccaaattcattttatgaggccagcattaccctgatgctaaagccaaagacactacaggaaaaggaaactataggtcaatatgcctgatgaacacagatgcaaaaatctcaaacaaaaaatgctagcaaactgaattcaacagcacacgaaaaggatcagtcaccctgatcaaatgggatttattcctgggatgcaaggatagaccttgtcaacaaatgcaaatcaatgtgattcatcctattaacagaatggataaaaaacatgtaatcatcccaatagatacatctgataaaattaacatcctttcatgataaaaactctcaacacattaggtatagaagaaatgtacctcagcataacctcgtgc

SEQ ID NO: 62390 - DNA, 771 bp, Homo Sapiens
gacccccacgtgctctcggccttcaagcatgtaacttcggggtctgaggccccaggacccacccccctgccacccgtcccaccccactccttgctcagtacctggcgttggtacacaggcaaggattggcacaaccaaaattggcctttttctccctcttaatattgaagaaattcccacatttctcatttggtaatggtgttgtggcctcagatttcttctagtatttgcttctgatgaatgattatggtctatacataaaaaagtaagactaagtattgctgaatttgcagttatgttgtcgtgtataagagctacttccaagtgtggttacaaatgaacccatggaatgatgacttcatgttcttctcgtgggtttgtgccgtgctgctttccaaataggtattgaatttatgcattagtctggtgatttcagttctgtgaaatattttgggatctataccaattaaacattttcatagttctgcctattgtccttccctgaggctccattgctgcttggtggccattctctgcctttttacagtcacctgaacaatgacccatcatctcttgcttgcttgaaatcttgctgaaatgttctcatttcctgtttgctgtatgggctcgggtgggatgtttgttggctctgttgtgtttattcaccaatttgtacattatttgttgtcctttactactgtaaacagtaaatatagtttggtattggggcctcgtgccgaattcctgcagcccgggggatctttttttagg

SEQ ID NO: 62391 - DNA, 644 bp, Homo Sapiens
aatgggatttccacttagtaaatctgctactcaggtatctgctatacatatggattcaaaagtggatgatcacttaatacgagggactgaaaaaagcaggttggaaccagcgactcagttatttcaaaacaccaagaaaataagattagaagacacaaatcaagaaaactttacaaggattgaagggactggcacaggatctctttctgggaaagccttgggttcagtggtatatgtcaaagaaagtgatggactagaaatgacagatgtggaatgaagcaatttgtacgtattaccaaagaaaccaaaaactgcctttgactaaggggggtgttgaaagagaacttaaccttattaggaaaccctgacaaaatgatggaagactattgccttattttgcactatttgtgaatcatcttacactgcatttttttatgatgcttattcaaaaggcagttgctttagggtgaaaaagccttccaagattcaaagcagatttctctggtattatattatatccttcttaaaaaccagagtttttaagtaacagtatttgaatggcatcaaaacattttcattttaatgtatttctttaacaagtggttaaaaaaagtgtccaagcagccgggcgcagtggctcacac

SEQ ID NO: 62392 - DNA, 273 bp, Homo Sapiens
cgtccgtttgctttctaggaggtttgttgttttgcctgttagttttgaggagcaggaagctcatgggggcttctgtagcccctctcaaaaggagtctttattctgagaatttgaagctgaaacctctttaaatcttcagaatgattttattgaagagggccgcaagccccaaatggaaaactgtttttagaaaatatgatgatttttgattgcttttgtatttaattctgcaggtgttcaagtcttaaaaaataaagatttataacagaaccc

SEQ ID NO: 62393 - DNA, 865 bp, Homo Sapiens
cccaagaggaaggtcagctccactgaatgggccacagaggaagagcccaagagagatgcacaacagtcatggttttcttaagcctcttatgaaaccatgaatgagagatgaagctaaagaatagaatccagagatcacaaactcatctagagtacttccacaaaatttacaaagatgtgggaactttatggataggatatattttgtttgttgttgttaatatcaactagaggcactttacatagggttaagtgatcgaacccttttgtggttttgaacaccaacatactggcttacactgctgaaatattttgggtttcattattttgcactggatccaccctgtaaatactcttaagtatacatttcaaccactgttttttctactctttttgctgctcattaaaatctttcatgtaggtgccagaaccatatgtaaacagctttttaaaaaattgaagctggtattttgtttaaacaaaaagccatagaacttggtcatgttttccattttaaaatgatttactgaaacaaagtaatactaataaaaacccacaggcaccaaacaggctgcttaaaatggtctgttaaagacattttttggttatggaatataagaaaagttttgcacatctgtaagggggaaaaacagtatatcaccattgggtagagtggacgggactcatgtaaggactcaatttggggaagagcattcagtggcatgctgttagaggactagtgcccgagaatctcctcacagtatcatgttgcaggaattccccattgctctgcaacttccaaaccagtttgagtcatacaaatgttttctaaacttttattgtattactgcaataaatcctcgtgc

SEQ ID NO: 62394 - DNA, 951 bp, Homo Sapiens
  misc_feature (894)..(904): n is a, c, g, or t
gcacgaggcaggagctttgtgttcgtgagagactagcagaggacaaactggctagagcagaaaatctgttgaagaactacagcttgctaaaggaacggaagttcctgtctctggcaagtaatccagtaattaagaagaaagttcatttcagtggggaaagtaaagagaacatcatgaggagtgagaattctgagagtcagctcacatctaagtccaagtgcaaggacctgaagaaaaggcttcacgctgcccagctgcgggctcaagccctgtcagatattgagaaaaattaccaactgaaaagcagacagatcctgggcatgcgctagccaggtagagagacacagagctgtgtacaggatgtaatattaccaacctttaaagactgatattcaaatgctgtagtgttgaatacttggttccatgagccatgcctttctgtatagtacacatgatatttcggaattggttttactgttcttcagcaactattgtacaaaatgttcacatttaatttttctttcttcttttaagaacatattataaaaagaatactttcttggttgggcttttaatcctgtgtgtgattactagtaggaacatgagatgtgacattctaaatcttgggagaaaaaataatgttaggaaaaaaatatttatgcaggaagagtagcactcactgaatagttttaaatgactgagtggtatgcttacaattgtcatgtctagatttaaattttaagtctgagattttaaatgtttttgagcttagaaaacccagttagatgcaatttggtcattaataccatgacatcttgcttataaatattccattgctctgtagttcaaatctgttagctttgtgaaaattcatcactgtgatgtttgtattcnnnnnnnnnnnctgtttaacagaatatgagctgtctgtcatttacctactcctcgtgc

SEQ ID NO: 62395 - DNA, 1314 bp, Homo Sapiens
gcacgaggaagaaccctgccctgaaggctcagagtggtccagtacgcagtggccccaaaccattctctgcacctaaaccccaaaccagcccatcccccaaacgagccacaaagaaggagccagctgtacttgaactggagggcaagaagtggagagtggaaaatcaggaaaatgtttccaacctggtgattgaggacacagagctgaaacaggtggcttacatatacaagtgtgtcaacacgacattgcaaatcaagggcaaaattaactccattacagtagataactgtaagaaacttggcctggtattcgatgacgtggtgggcattgtggagataatcaacagtaaggatgtcaaagttcaggtaatgggtaaagtgccaaccatatccatcaacaaaacagatggctgccatgcttacctgagcaagaattccctggattgtgaaatagtcagtgccaaatcttccgagatgaatgtcctcattcctacagaaggcggtgactttaatgaattcccagttcctgagcagttcaagaccctatggaacgggcagaagttggtcaccacagtgacagaaattgctggataagcgaagtgccactgggttctttgccctcccttcacaccatgggataaatctgtatcaagacggttcttttctagatttcctctacctttttgctcttaaaactgcttctctgctctgagaagcacagctacctgccttcactgaaatatacctcaggctgaaatttggggtgggatagcaggtcagttgatcttctgcaggaaggtgcagcttttccatatcagctcaaccacgccgccagtccattcttaaggaactgccgactaggactgatgatgcattttagctttgagcttttgggggttattctaccaacaaacagtccattggaaagaaaacagtccctggaattaacagatcagaatgttcacactggttaatctttttttaacaatgagcatgaaggtagcagaagctggtgtgtttccagatggttcttctaaccaaactaatttttcactgttgacaagcgaggcaagggttgcactggaccaaaggctgaggcttggccatctagcattccatacaaaattgtttcctataagcattccttttattctctattctatcctgggtctgcctcaaccgtgagataggagagtctctggtactagctgctgtagcagtgcccttcatccagggcagttaatggagtcttggaccctttctttctctgggatccctgcccagcaccttcctatagagatgactttcctcgtgc

SEQ ID NO: 62396 - DNA, 416 bp, Homo Sapiens
ttcctctcctcctcagtcagctggaggcgctgcagcccccagctcctggccaacatactacccaaatctgaaaaagcagcatgttgagaagatggccccttgtgccttggaaagaggttcccatccctcattggaatcaccacccattccatccaggacttctcttacacttgagggtagcggggtcaggacaatcatctcagtcctgcatcttttcttctgctttcttccctccaagagcaaaacctgggcaaggggacttactgagtgggggtgggtgggggttgggaaaagggaaactggtgggatatggaacatggctctgagcaggactgttgagctcacatagtgttctgactccaaatctgggagcaggagaatgtgtaaacaagaataaagtggaagcaggttggtgt

SEQ ID NO: 62397 - DNA, 859 bp, Homo Sapiens
  misc_feature (147)..(172): n is a, c, g, or t
ggtcctttttccatttctgattccactttcaaagtctgggatatattctttgaaaaaggagtagtatggaatattaagattatgttccttatactcagaatactttttatgagctctcttgtttttttgttactattattcctttgnnnnnnnnnnnnnnnnnnnnnnnnnngtttatagtgttcatgtaattttttttgctgtttaccaatgaactttgccctgttgtggttttgggggatcagaaggattcctaaactgtcatttcatttattggtaggtcatgattgctgagggttttgctttggatttttcatacctataaagtcaatcttgagttgatcagagaaagggaaacttactcctaataaacagactcagaacagaagggacatatgcataaatcaggataccatctcattaatttacaaaggataatctttcttttcattgacaacacctacacccacctgttttccagtgttcttctctctaaacagcaaagccaaagcactctgcacaccaaatcacctgttcagaggtttatgcatgagcatatttcttttaggccgtggtgaagttgataaaccacccctgctttgtaacaaaattattttaaagtgactggaattatctagtccccagattgatcatctcccctggcaacgtgactctgttttttgtgtgtgtttccatgctgactagtcccctactgttaatatcactactaattaggctataaccaggtctttcctggcctgagaaatattctcttaaaatgacctttgttttaatctcattcatgatgttgattttttttcaatgtggtgcaatatatacaataaaatttgtcataact

SEQ ID NO: 62398 - DNA, 502 bp, Homo Sapiens
gcaagattagccccgaggagcgccgatcgcccccagcccctgggctgcagcccatgcgcagtgggggtggctcggtgggcgctgtagtggtgaaacaggagcccctggaagaggacagcccctcgtccttgtcggcggggctggacaaggcccagcgctctgtcatcaagcccatcagcattgctgggggcttttacggtgaggagcccctgcacacccccatcgtggtgacctccacacctgctgtcactccgggcacctcgaacctcgtcttcacctatcctagcgtcctggagcaggagtcacccgcatctccctccgaatcctgctccaaggctcaccgcagaagcagtagcagcggggaccaatcatcagactccttgaactcccccactttgctggctctgtaacccagcgtcagtttcactccctcttggtttttatcaaatttgccatgacatttcatctgggtggtttgaatattaaagctcttcatttttgg

SEQ ID NO: 62399 - DNA, 1480 bp, Homo Sapiens
gcacgaggggatcgtcagtatttaaacagatcacatcatgcgtgagtacaagctagtggtccttggttcaggaggcgttgggaagtctgctctgacagttcagtttgttcagggaatttttgttgaaaaatatgacccaacgatagaagattcctacagaaagcaagttgaagtcgattgccaacagtgtatgctcgaaatcctggatactgcagggacagagcaatttacagcaatgagggatttgtatatgaagaacggccaaggttttgcactagtatattctattacagctcagtccacgtttaacgacttacaggacctgagggaacagattttacgggttaaggacacggaagatgttccaatgattttggttggcaataaatgtgacctggaagatgagcgagtagttggcaaagagcagggccagaatttagcaagacagtggtgtaactgtgcctttttagaatcttctgcaaagtcaaagatcaatgttaatgagatattttatgacctggtcagacagataaataggaaaacaccagtggaaaagaagaagcctaaaaagaaatcatgtctgctgctctaggcccatagtcagcagcagctctgagccagattacaggaatgaagaactgttgcctaattggaaagtgccagcattccagacttcaaaaataaaaatctgaagaggcttctcctgttttatatattatgtgaagaatttagatcttatattggttgcacaagttccctggagaaaaaaattgctctgtgtatatctcttggaaaataagacaatagtatttctcctttgcaatagcagttataacagatgtgaaaatatacttgactctaatatgattatacaaaagagcatggatgcatttcaaatgttagatattgctactataatcaaatgatttcatattgatctttttatcatgatcctccctatcaagcactaaaaagttgaaccattatactttatatctgtaatgatactgattatgaaatgtcccctcaaactcattgcagcagataacttttttgagtcattgacttcattttatatttaaaaaattatggaatatcatctgtcattatattctaattaaaattgtgcataatgctttggaaaaatgggtcttttataggaaaaaaactgggataactgatttctatggctttcaaagctaaaatatataatatactaaaccaactctaatattgcttcttgtgttttactgtcagattaaattacagcttttatggatgattaaattttagtacattttcatttggtttgtgtgtttttgttattgtttatagattaaagcgtttattttataatgaccacattgttttaaatgcgacagtagctcctttctgcctagtatctgcagaacactggctttaaactatactaagtaactggtgatttctctaggaacagacctcgcactttccctcgtgc

SEQ ID NO: 62400 - DNA, 1399 bp, Homo Sapiens
gcacgagggatagagtagcatggtaacgatggtgtcacacccttggtgtgaatggtagcttagtgagcaacctagctcaaggatttgcaaagttaggaagaaggacgagagagcctctctccccaccccaatctaaatatggaatttggtaaattagaatactttgtaatttgtaagaccaaattcatactaattacccgcgtgaaaggtgtttgtttttaacaacattgaagataatcaggaaagattttttcttaatgtttctctcgagcgtagtactataacaaaaacttaatgctaagaaacattttatatgctcctttggatatgcaatttaatctagattatctatttttctcccatgataactaatctgtttttagtatcagcagcatttggcaagtttattttttggatataaactgtggttcatctgttcactgtttctagaaaaaaatcattgccataagaaaaagtataaattagcaagaaaggagagtgacttgatttgcttttggaaaaagaaatgcttaattaattattctgtatttggccttattcgggcattaggaaatctagagatctaaagggttgaatgacaatagtgcccccgtttttagcagaccagccttaactctgggtttgaatcctaaggagattgccacagtgagacttaaggaaatgtttggttggcagatgagcaccaatgactgcagcgtggagtgacgcactgcatggtctgtttattctctaattccaatatgtcttttgcttcagaagcaagaaaagtttcttctctcccctccttcccacccttttttcaaaggcaccacaagtatagacagttgcactacatcaaatctttttttgacacttgtagaaaccagtacacttttagattagacagtatcttcttttaatattttgatttgttttcctttagtttgaaaagttgtataatacttaactgactgtagcaaagttttatatgtggtagcatacctttaatttatcctattacaaaactgttctgaattttcttttggtttttaaaaaacaaaacttgttgcttagaagccatgaattattttattttacttcaactgtcgaaacttccttgttttaaaaaatgatcatttgggttcactcaggaaatgcatgtcaggaaacttgtattataagtttattagttgtgatgtatcagtaactgctgttacccctttttcaaagaaatgtaattgattttgaagttttctagattgtcacatgctttgtgactaatgcaagaaagcaagtcctgtgttgtatttgttctagtcatttttattcaggctatatattgtagcttaatttttatttgcaattaatttatttaaatttaagtaggataccctcgtgc

SEQ ID NO: 62401 - DNA, 908 bp, Homo Sapiens
  misc_feature (845)..(854): n is a, c, g, or t
gaacgcaaagtgaatctttgcaagaagagattgccttttgaagaaactccacgaagaggaaatccaagtttgctgactctctgaggctgccaaccggaacaatgacgccctgcgccaggcaaagcaggagtccactgagtaccggagacaggtgcagtccctcacctgtgaagtggatgcccttaaaggaaccaatgagtccctggaacgccagatgcgtgaaatggaagagaactttgccgttgaagctgctaactaccaagacactattggccgcctgcaggatgagattcagaatatgaaggaggaaatggctcgtcaccttcgtgaataccaagacctgctcaatgttaagatggcccttgacattgagattgccacctacaggaagctgctggaaggcgaggagagcaggatttctctgcctcttccaaacttttcctccctgaacctgagggaaactaatctggattcactccctctggttgatacccactcaaaaaggacacttctgattaagacggttgaaactagagatggacaggttatcaacgaaacttctcagcatcacgatgaccttgaataaaaattgcacacactcagtgcagcaatatattaccagcaagaataaaaaagaaatccatatcttaaagaaacagctttcaagtgcctttctgcagtttttcaggagcgcaagatagatttggaataggaataagctctagttcttaacaaccgacactcctacaagatttagaaaaaagtttacaacataatctagtttacagaaaaatcttgtgctagaatactttttaaaaggtattttgaataccattaaaactgcnnnnnnnnnnccagcaagtatccaaccaacttggttctgcttcaataaatctttggcctcgtgc

SEQ ID NO: 62402 - DNA, 636 bp, Homo Sapiens
agagatgtcttataatctcttagggacccagacccctaaattctcctcctcccccattttggtgttaaggtggagagggcatatgcatcctctgtcctgatttaggtgtttatagctgaggggtaagaggttgttgtagttgtcctggtgcctccatcagactttccctacttgtcccatatttgcaaggggaggggatttgggggtggggctccattcaccaaaggtgaggtgggttttcattaaccctttaggactttgaagggtatggacctacgtgaatgtgtgtcagggggagacttgctggtgggttagtggtcctcaggatgtgatagaaacatcccgtgtaaaaaggaagttggaatgggagttggcgggcagtgaacgagtgtggggaaggattggtggtggggcaacaggaaggggcctggggccgtttgggtgccctaactttggtagctcagtgtgcatttagagtgggactggggagggaggtaagcttggggtgggctgcttggggcttggcatagggtggaaagggctaccctggggctttgacccccctgtagtatgtgtggagggtgccctcccgtttcccccaacttttgctataacaataaactgtagaggaatttg

SEQ ID NO: 62403 - DNA, 727 bp, Homo Sapiens
gcacgaggatatcaaatttgacaggtattgtataccctttggatctttaggaattaatttttgcctctgtcactcagctttgtatattttgaaatggagataagtatagggaggtcttggaaggaaaattgccagaattcccaaaccatgtaacactcattgagaattccagatccattatatctaaagggcaagtgaaggaaacagtattgtgaactgggtataactccttggttcttaactagtacattcttaatctgtgagacccaaaggttgataaacaataatttaagattgtacagtactctaaacgtctgcaaaggtctagatgttatcagtatcactagtttttatttctgccagtagctcccttttaggttacattgttgtcctctttccagtgtggcatctgtcattggtttttcactatggcaagttcattaaaaagcttgctccattgttatcttcaagtaatgcccataaggagatggaagatatttgagacaattaaggctttagcttctaggcaagagaaataacgttgcattaaatttcaagtttctttctgctagacttgaatgtgtctagccactttaatttatgggggcttttggttttttcctattgtactttgtatgtagaattgttttgaaatatcaagcatatttactttgaatttgaactctttcttaattttgtatttatccttggaataaaatgtaaatcc

SEQ ID NO: 62404 - DNA, 741 bp, Homo Sapiens
agatcagacctcaaaggtagcttttaaaaattgccagaaatatgaaagtgacaaagtacgtgtgataaccctggtgaagaatcgtgaaaaaggtggagcgattagaatgggtatattcagttctcgaggagaaaagatccttatggcagatgctgatggagccacaaagtttccagatgttgagaaattagaaaaggggctaaatgatctacagccttggcctaatcaaatggctatagcatgtggatctcgagctcatttagaaaaagaatcaattgctcagcgttcttacttccgtactcttctcatgtatgggttccactttctggtgtggttcctttgtgtcaaaggaatcagggacacacagtgtgggttcaaattatttactcgagaagcagcttcacggacgttttcatctctacacgttgaacgatgggcatttgatgtagaactactgtacatagcacagttctttaaaattccaatagcagaaattgctgtcaactggacagaaattgaaggttctaaattagttccattctggagctggctacaaatgggtaaagacctactttttatacgacttcgatatttgactggtgcctggaggcttgagcaaactcggaaaatgaattaggttgtttgcagtcttcagttgtgttcttatgcttcagtgtcacatttcatttcatttgaaactaaaattttaagtaaagctgaaataaacttcttgtcattgtc

SEQ ID NO: 62405 - DNA, 763 bp, Homo Sapiens
gcacgaggaacaccccctttagaaagtttttattttcttaaatgtcattgagttgctttgattctattggatttttggcattttttatgggatcatcagttggttccaagtatgttagatcagctaacatctgctactccagtaacagcctcgtacaactgcaggtaggttttctccagaccaattagttttaatagagcaaactaacaacagactgtagtagcatggttatggcaaccagaatcttcagaaaggttaggacattactttttaagctgtcagtggtatcaaataacttacctagttggaggcagataaaggatcccttacgttttttcctataaggcctaaattgaaattgttaaccaaggaaacagggtcagccttgaaaaatcaaggaattcattgtacctaataactgaagtaaaaataactagttgttcaacttttcctaaactcaaatctatttttataaacaaatgtaaataatgtttatattagagttgaactggttttcatttttataactggtagactagaccttccttaaacttttagaaataaaatgaaggcttcactggatttgtgaggataaaatacattttctttaattgtcctagagcaaagtacattagtcaccatgtgttttttgtgccaatgtaaattgtaatttaccaaagaaaaatacatacattgcttggtcttgcagaaaagttcccttgaaagaacctttccaataaataaaacgtcccaaattagcagt

SEQ ID NO: 62406 - DNA, 665 bp, Homo Sapiens
tccataaggaaattcccacagggaagaaagaccatgaatgtagtgaatgtggtaaaaccttcatttataactcacatcttgttgtccaccagagagttcattctggagagaaaccctataagtgtagtgactgtgggaaaactttcaaacagagctcaaacctcggtcagcatcagagaattcatacaggagagaaacccttcgaatgtaatgaatgtgggaaggccttcagatggggtgctcattttgttcagcatcagaggattcactcaggagagaagccctatgagtgtaatgagtgtgggaaggcctttagtcaaagctcatatttaagtcagcatcggagaattcccagtggagagaaaccttttatatgtaaagaatgtgggaaagcttatggatggtgctcagagctcattagacatcagagagttcatgccagaaaagagccttcccattgaattgaaggggagaacgtctccagacagaattttacatcggtttaatctactttaggactggatcccataaaagttataagttccttaagatttttcctgtgtctttcttgattttggaaaaactgtttacttagttctgcctgtagatcatcccttcatgtcctttgaggaagatactgatattaattaggatgcttgggatgc

SEQ ID NO: 62407 - DNA, 1257 bp, Homo Sapiens
  misc_feature (119)..(128): n is a, c, g, or t
gcacgagggtttataatctgaagatatatttcacttttgttctgctttatcttttcataaagggttgaaaatgtgtttgctgccttgctcctagcagacagaaactggattaaaacaannnnnnnnnncctcttcagaacttgtcaggcatggctcagagcttgaagattaggagaaacacattcttattaattcttcacctgttatgtatgaaggaatcattccagtgctagaaaatttagccctttaaaacgtcttagagccttttatctgcagaacatcgatatgtatatcattctacagaataatccagtattgctgattttaaaggcagagaagttctcaaagttaattcacctatgttattttgtgtacaagttgttattgttgaacatacttcaaaaataatgtgccatgtgggtgagttaattttaccaagagtaactttactctgtgtttaaaaagtaagttaataatgtattgtaatctttcatccaaaatattttttgcaagttatattagtgaagatggtttcaattcagattgtcttgcaacttcagttttatttttgccaaggcaaaaaactcttaatctgtgtgtatattgagaatcccttaaaattaccagacaaaaaaatttaaaattacgtttgttattcctagtggatgactgttgatgaagtatacttttcccctgttaaacagtagttgtattcttctgtatttctaggcacaaggttggttgctaagaagcctataagaggaatttcttttccttcattcatagggaaaggttttgtattttttaaaacactaaaagcagcgtcactctacctaatgtctcactgttctgcaaaggtggcaatgcttaaactaaataatgaataaactgaatattttggaaactgctaaattctatgttaaatactgtgcagaataatggaaacattacagttcataataggtagtttggatatttttgtacttgatttgatgtgactttttttggtataatgtttaaatcatgtatgttatgatattgtttaaaattcagtttttgtatcttggggcaagactgcaaacttttttatatcttttggttattctaagccctttgccatcaatgatcatatcaattggcagtgactttgtatagagaatttaagtagaaaagttgcagatgtattgactgtaccacagacacaatatgtatgctttttacctagctggtagcataaataaaactgaatctcaacat

SEQ ID NO: 62408 - DNA, 1121 bp, Homo Sapiens
gcacgagggtccttggagagggtgggccagggcggctttcctgggagctgccactccctctcccaggcctggcccagcggggactcaggatcggggggagacctgaactcgttcccgccgactcaggccctgctgcccctctcaggaacgagaagtgccatgactactacaccacggagttcctgtacaacctgtactcatcagagggcaagggcgtcttcgactgcaggaccaatgtcctgggccacctgcagcagggtggcgctccaaccccctttgaccggaactatgggaccaagctgggggtgaaggccatgctgtggttgtcggagaagctgcgcgaggtttaccgcaagggacgggtgttcgccaatgccccagactcggcctgcgtgatcggcctgaagaagaaggcggtggccttcagccccgtcactgagctcaagaaagacactgatttcgagcaccgcatgccacgggagcagtggtggctgagcctgcggctcatgctgaagatgctggcacaataccgcatcagtatggccgcctacgtgtcaggggagctggagcacgtgacccgccgcaccctgagcatggacaagggcttctgaggccagccatgcccacgcccctccccagcccccacccatgccagcgcagcgccagggctcagatggggcctgggctgttgtgtctggagcctgcaggcaggtgggggctgcgtccctgctcagcccatcccctgcctctatccctggccacctgccaggcctccctcgggctggtgtcttgagaccagcctgccaggccctccagcaggaggacagagtgccctggggcatccaccttcctgcccaggggacgtggcgctgtcggtgtttggaggctgctgccccctggctttggcgccccatgggccctcagcgtctccccatgctgggctcactacatgggccagcccttgctttacctggccggtaggctgctggcgcctaggttgtgttgagagggggatgcccctggccctgcctcactgtgacctgctcctgcccacgtgcagcacctgtcaccttttctagaaataaaatcaccctgactgtggggtgcatcggtctccggag

SEQ ID NO: 62409 - DNA, 857 bp, Homo Sapiens
ccccgggctgcaggaattcggcacgagggaaccatggagggtgtagaagagaagaagaaggaggttcctgctgtgccagaaacccttaagaaaaagcgaaggaatttcgcagagctgaagatcaagcgcctgagaaagaagtttgcccaaaagatgcttcgaaaggcaaggaggaagcttatctatgaaaaagcaaagcactatcacaaggaatataggcagatgtacagaactgaaattcgaatggcgaggatggcaagaaaagctggcaacttctatgtacctgcagaacccaaattggcgtttgtcatcagaatcagaggtatcaatggagtgagcccaaaggttcgaaaggtgttgcagcttcttcgccttcgtcaaatcttcaatggaacctttgtgaagctcaacaaggcttcgattaacatgctgaggattgtagagccatatattgcatgggggtaccccaatctgaagtcagtaaatgaactaatctacaagcgtggttatggcaaaatcaataagaagcgaattgctttgacagataacgctttgattgctcgatctcttggtaaatacggcatcatctgcatggaggatttgattcatgagatctatactgttggaaaacgcttcaaagaggcaaataacttcctgtggcccttcaaattgtcttctccacgaggtggaatgaagaaaaagaccacccattttgtagaaggtggagatgctggcaacagggaggaccagatcaacaggcttattagaagaatgaactaaggtgtctaccatgattatttttctaagctggttggttaataaacagtacctgctctcaaattgaaaaaaaaacaaaa

SEQ ID NO: 62410 - DNA, 594 bp, Homo Sapiens
gcacgaggtggacgtggttttgtctgctgcgcccgctcttcgcgctctcgtttcattttctgcagcgcgccagcaggatggcccacaagcagatctactactcggacaagtacttcgacgaacactacgagtaccggcatgttatgttacccagagaactttccaaacaagtacctaaaactcatctgatgtctgaagaggagtggaggagacttggtgtccaacagagtctaggctgggttcattacatgattcatgagccagaaccacatattcttctctttagacgacctcttccaaaagatcaacaaaaatgaagtttatctggggatcgtcaaatctttttcaaatttaatgtatatgtgtatataaggtagtattcagtgaatacttgagaaatgtacaaatctttcatccatacctgtgcatgagctgtattcttcacagcaacagagctcagttaaatgcaactgcaagtaggttactgtaagatgtttaagataaaagttcttccagtcagtttttctcttaagtgcctgtttgagtttactgaaacagtttacttttgttcaataaagtttgtatgttgcattt

SEQ ID NO: 62411 - DNA, 807 bp, Homo Sapiens
ggggaaatggggtaccgggccccccccgtgaggagtgtgagcatgcctaccctggcccagatcacccagaacatgttgtgtgctggggatgagaagtacgggaaggattcctgccagggtgattctgggggtccgctggtatgtggagaccacctccgaggccttgtgtcatggggtaacatccccctgtggatcaaaggagaagccaggagtctacaccaacgtctgcagatacacgaactggatccaaaaaaccattcaggccaagtgaccctgacatgtgacatctacctcccgacctaccaccccactggctggttccagaacgtctctcacctagaccttgcctcccctcctctcctgcccagctctgaccctgatgcttaataaacgcagcgacgtgagggtcctgattctccctggttttaccccagctccatccttgcatcactggggaggacgtgatgagtgaggacttgggtcctcggtcttacccccaccactaagagaatacaggaaaatcccttctaggcatctcctctccccaacccttccacacgtttgatttcttcctgcagaggcccagccacgtgtctggaatcccagctccgctgcttactgtcggtgtccccttgggatgtacctttcttcactgcagatttctcacctgtaagatgaagataaggatgatacagtctccataaggcagtggctgttggaaagatttaaggtttcacacctatgacatacatggaatagcacctgggccaccatgcactcaataaagaatgaattttatcctcgtgc

SEQ ID NO: 62412 - DNA, 871 bp, Homo Sapiens
cagcaatgaggggatggtgaggagggaaagcgcgggtggatccctccgtgtactaacagtgtccgttcctttccgtccaccacatgctgctccactttggcaatgttgtgagaaacatcatagatcacatgtaggtccaagtcatcaggggttgtgttgaagaccttggcgaaagcctgacgggtttcattgtttaaattaccatgtttatttatatcaacacaaaatacaataataaacacgacaaaaccattttatcttcatgtaacataactcttcagtgaacagaagtactactgttaatgttttggcctttccaaggtcctgcctggggtcaaaacagtattcagagaaagagcagattcttctctaccttccctaaaacacacacaaaggtaacttctattttctaaaatcccattccaataataattaaaaaaacaacagtaagtccacgtagaggagaggattgctgttgtgttatcagcattgcaacctgtatattgctgtagatttcccccaggttctgcgcatcagtcaggaacataaagggtatatcagcccttcggattttcaaggtgatttttcagtaattctttcacctagccctgtactctgtaaaggtctgatttacctgagttatctagaaaccagcaaaaaaagagtctccaagtgatcaaaggtatatggatctatcttgtagaattgaagaaacttatagattttgctgtgacaattcaatggacaaccacgaagcctccactacataatgaactattcacctagtaaaagcttcacattacaatttaatcaaaggtaataaacattgcacaaaagtaccctcgtgccgaattcctgcagcccgggggat

SEQ ID NO: 62413 - DNA, 815 bp, Homo Sapiens
gtcctgcacagcaggcacacggagctgaaggagaagctgcgcagcatcaaccagggcctggaccgcctgcgcagggtcagccaccagggctacagcactgaggctgagttcgaggagcccagggtgattgacctgtgggacctggcgcagtccgccaacctcacggacaaggagctggaggcgttccgggaggagctcaagcacttcgaagccaaaatcgagaagcacaaccactaccagaagcagctggagattgcgcacgagaagctgaggcacgcagagagcgtgggcgacggcgagcgtgtgagccgcagccgcgagaagcacgccctgctggaggggcggaccaaggagctgggctacacggtgaagaagcatctgcaggacctgtccggcaggatctccagagctcggcacaacgaactctgaaggcattggggagcccagcccggcagggaagaggccagcgtgaaggacctgggctcttggccgtggcatttccgtggacagcccgccgtcagggtggctggggctggcacgggtgtcgaggcaggaaggattgtttctggtgactgcagccgctgccgtcgcgacacagggcttggtggtggtagcatttgggtctgagatcggcccagctctgactgaaggggcttggcttccactcagcatcagcgtggcagtcaccaccccagtgaggacctcgatgtccagctgctgtcaggtctgatagtcctctgctaaaacaacacgatttacataaaaaatcttacacatctgccaccggaaataccatgcacagagtcccctcgtgc

SEQ ID NO: 62414 - DNA, 1178 bp, Homo Sapiens
gcacgaggggagcaagcgtctgccgcggtggccgggtgccgatttgacaagatcaaagctgcaggaaaatggacagtgaggttcagagagatggaaggatcttggatttgattgatgatgcttggcgagaagacaagctgccttatgaggatgtcgcaataccactgaatgagcttcctgaacctgaacaagacaatggtggcaccacagaatctgtcaaagaacaagaaatgaagtggacagacttagccttacagtacctccatgagaatgttccccccattggaaactgacgcttggctcctttcttgtggatggattttctcaaagtacacagataaagcatggtttgtttcagtctccaaattcaaacctttgagtaataaatcagcactcaaaaatgtacacccatttagtttgtggtagcaaagtgcaatgcgaaattgaatgagaaactgagatttctcagtaatggtgaatatttcgctctttaaacctaaaactcttcattgagtagcttatatttgaacatgattggttaaacatttgcctctacctctgattttgctttgctgtcaaagtttaacaccttccaactacttatgtgtgtcctgtaacacaggtgattgaacgtatgagagggaaaggcaaagaaaaaggaagccagacactaggagaattattaacttctcatacttccccacattgagaagcattcggagtgtatttagcctgtagatgttgtgatatgcaaatatcccattccctggttactggcattcctaagattcttcatggtattttcaaactttggataaatttacagattagaaagatatctgacagttaatctctgttctccttacaaattccttttgtgctgctggaaaggatctttggctaggtggatgactagttttattcaaagccttttctcaaagccctttcagttacaaccaccccactatggaatcagtatttagttatacatttgtataagaacctgtattttgaaaaacacattcatgtatatttattcctggaattatttgcctgttaaacagtgtctttcatgttctctccccagattgtaaactctgtaagaagctgcttgtatctgtatcccttgttgaaactctgaaaacactgaataactaaaatctcttctcacctcgtgc

SEQ ID NO: 62415 - DNA, 634 bp, Homo Sapiens
tgattttctagaccactgagaaaatctttatttacaataaatttcaataaaatttgcataaatatattcccaatgtacaattttcacctctgatttcttcatatcatttaaaaagttagtctgtcctgttctccttattcctttcagacaccagtgtggcgctgacattggcaggtggaggggagctgccagggagctggggggtggctgagggctcaggctgcttggggtggacctctctctgggccgccaggctttcagctccatccctgccctccagtttcctctccatggtcgccaccaggatcttgagccacgtgttctcggtaaggaggttttctgaggcatcggccagctcctgcagcttgcgggccagctcctgcagctcacgtgtcttctgctcatagagggcctgcagctgctcactgtgtgcgtggagcaggctgtgctgctcttccagggcccgctgctgctgccgcagccggtgctcatctctgcgggcactggagagctgggactccacctgcacttgtgctcgctggaggctgcttatttctgctctcagtttctggatctctctctccaagtgggagatgtgcccccgctgtaaggggggcccctcgtgccggaattc

SEQ ID NO: 62416 - DNA, 919 bp, Homo Sapiens
accaaaccagtgatactttgcagaatgcacattagaactagctacactaggggatctgaaacttgtggaaaagccgtctcctttgactcttgctcctcatgacttcgcaaatattaaagctaacgtcaaagtagcatcaacagaaaatggaataatttttggtaatatagtttatgatgtctctggagcagcaagtgacagaaattgtgtggttctcagtgatattcacatcgacatcatggactatatccagcctgcaacttgcactgatgcagaattccgtcagatgtgggccgaatttgaatgggaaaacaaagtgacagttaacaccaacatggttgatttaaatgactacttacagcacatattaaagtcaaccaatatgaaatgcctgactccagaaaaggccctttctggttactgtggctttatggcagccaacctttatgctcgttccatatttggtgaagatgcacttgcaaatgtcagcattgagaagccaattcaccagggaccagatgctgctgttaccggccatataagaattcgtgcaaagagccagggaatggccttaagtcttggagataaaatcaacttgtcacagaagaaaactagtatataaaaataaacaaaaagtccttgaagctttacagttaatttaggtatgggcttactggactccaacatcttttgtactctttcatgcttatatagaatctgagttcatgctgaatacttttcagccaataatttatagcctttcccttaaatcaagattgagtttaaaattatagtttgtcttttgtcttaacagttctgaatgctgtcctcaaagtatataatgtttcatgtaccaagacccttttcacagtacaataaacagatctattcataaatttttgttattttatcctcgtgc

SEQ ID NO: 62417 - DNA, 320 bp, Homo Sapiens
agatttgggtaccacccaagtattgactcacccatcaacaaccgctatgtatttcgtacattactgccagccaccatgaatattgtacggtaccataaatacttgaccacctgtagtacataaaaacccaatccacatcaaaaccccctccccatgcttacaagcaagtacagcaatcaaccctcaactatcacacatcaactgcaactccaaagccacccctcacccactaggataccaacaaacctacccacccttaacagtacatagtacataaagccatttaccgtacatagcacattacagtcaaatcctcgtgc

SEQ ID NO: 62418 - DNA, 840 bp, Homo Sapiens
  misc_feature (310)..(358): n is a, c, g, or t
gcacgaggcctggattctgccctgacctccatcctggacactgccttgataacatagacccttccactgacaccctcgctctcacaccccctccagctttccgaccccacaccgacaactccccggcttccagaccctaccagcactaccctaaccctcagccgacagtctcagccccaccgacccactttcttggcatatagccccacttaagacccctcctctacttccttctgagtcctctacaaagacatccgggtactacatttccatcccttccctattttgacaccaaattatggtgtagacnnnnnnnnnnnnnnnnnnnnnnnnnnnnnnnnnnnnnnnnnnnnnnnnnaacgtcctggactgcacagacctcccactccagaccatccaggcctggttcccaagacccgatccttcccctgcaaccagacagtctacaactgccccctccagcccattttctgccgtgaaaccccagccagccacaccagactctggaaccctttttcgactgccccaactcttggacaccaggccaactagaacacccaacaccaaactgtacagactctcccaccccaacctccccagactctgcacggatgtcctaggccccctccccaactctaaccagaccccatccccctaagtccctttgtcttgacccccaagtcttcaaccagatatcctcggcaacccacctcccaccctcctcctcttctccttcaagacccaactgagcacccgctctgattccccacagcctttctccctgccaccactcccttagtctttcccaggcttactctcccaataaatgtgctagagctc

SEQ ID NO: 62419 - DNA, 901 bp, Homo Sapiens
  misc_feature (449)..(458): n is a, c, g, or t
ttttttggtttgtttgtttgattttgtcttatcagcgcaacataaaattccaaatcccacttgaacccaactgaagaaaagaagaagattggactcagatgctgtcaacaccatagaaagtccagagtgtttccccagaccataacaaagaacctaaagagaagggatccccagggcagaatgatcaagagctgaaatgcagcgtttaagagacatgtccagtggcctttggaaaggtggtggggatccagttcaggagggaggggtatgtttgtctcccagtctgggcaaaggagtgctatgcggaattctctgcatagcagaaaagctcccaccattttcttttgatgtggttttaaagtctcacgttctctataatagaaacagcaggtcttgtcagctccttgtgtggctgatgtgtctggaaatgatgtagttcaggaaagcannnnnnnnnnctttgaaccttaaaggttctattattaaaagcagcacagattccacatttttatacatgaggattttctttgtggtgaataccaggattgactgcatccctttaaagaagttttatgtccctgactctggctaaaattatttaatttccagatgcttttgtagatgactgaagtatttgtgagccacatattgggagttctagatttgagtgaatggcaggaaagggccatctccattgagatgattaagtgaaccaaactagttctcggaattttacagagaaggagggaatcagactgaagaagctgtgacataggacttgaagaccaaagactttgaaatttgcgagctgctcatgtgtgagttattatcactgctgtctttctattgagttacaaatctatatttttattgaagtttaaataaagaaaaaatttacaag

SEQ ID NO: 62420 - DNA, 1117 bp, Homo Sapiens
ggttcaaaagagtatatatagtcaaaggacaacttgctatatgttttctctgctaaagtggattggttaatttttttactttttgttaccacaaagttcttgctgaaggattatattgtttatcaatccatttaataaacatgttgaaataatatgctatataaatagattcttttttaataaaaattacaacgtagtctaaaggagaaacactgattctgcaaataacaggcaaataaattgttaaaaattttgttgcattaatacttgaaattgtaggtgtttgttaattaatgaagtttaattttctttcatttctagtcattagaccagatctactgcactgttaattaatgttcctgatttatataggtttgtaactatttttttcaaacagttgatacttggatggctattgatgttctctcttcttttcacagagcatgtcctttgcaacctgatcacacaaatgatgaaaaagaatagaactttctcattcatctttgaataacgtctccttgtttaccctggtattctagaatgtaaatttacataaatgtgtttgttccaattagctttgttgaacaggcatttaattaaaaaatttaggtttaaatttagatgttcaaaagtagttgtgaaatttgagaatttgtaagactaattatggtaacttagcttagtattcaatataatgcattgtttggtttcttttaccaaattaagtgtctagttcttgctaaaatcaagtcattgcattgtgttctaattacaagtatgttgtatttgagatttgcttagattgttgtactgctgccatttttattggtgtttgattattggaatggtgccatattgtcactccttctacttgctttaaaaagcagagttagatttttgcacattaaaaaattcagtattaattaaacattacttattctaccctcttttttggcaaggaggacaaatacgcaatgttggaaaaccttggatggatatcttctctttaaaaaaatgtaaagataatttggtcttgagggtttaaacggttgataatgcctctacaacaacaagaaaaaagataaaatactaggatagaatcatggtgggcacagtg

SEQ ID NO: 62421 - DNA, 746 bp, Homo Sapiens
gaccccttaacatcaagtcagtccggtccatctgcaggtccccactcgccccttccgatggcccaggagcccccaagcccttgcctgggcccccttgcctcttgcagccaaggtccgagtggccgctcctgccccctaggcctttgctccaggtctctgaccgaaggctcctgccccttctccagtccccatcgttgcactgccctctccagcacggctcactgcacagggatttctctctcctgcaaaccccccgagtggggcccagaaagcagggtacctggcagcccccgccagtgtgtgtgggtgaaatgatcggaccgctgcctccccaccccactgcaggagctgaggagtgtgagcgtgccgtcatcgactttgtggctttccaggacatctccatcaagaggctgcagcggctgctgcaggccctcgaggccccggagggctggggtccgacaccaagggcgggccgcgcggccttgcagctgaagctgcgtcggcggctcacggagctcctgggggcgcaggacggggcgctgctggtgcggctgctgcaggcgctgcgcgtggccaggatgcccgggctggagcggagcgtccgtgagcgcttcctccctgtgcactgatcctggccccctcttatttattctacatccttggcaccccacttgcactgaaagaggcttttttttaaatagaagaaatgaggtttcttaaagcttatttttataaagctttttcat

SEQ ID NO: 62422 - DNA, 805 bp, Homo Sapiens
ttctattgtttttgggacagacacttggagaccagaaagcttctttgacaaagggaggaagaacagacaaaatggcatgcacacattatgtttactagacatcaaagtaaaggagcagtctttggaaaatctaatcaagggaaggaagatctatgaacctccacggtatatgagtgtaaaccaagcagcccagcagcttctggagattgttcaaaatcaaagaatacgaggagaagaaccagcagttaccgaggagacactttgtgttggcttagccagggttggagccgacgaccagaaaattgcagcaggcactttaaggcaaatgtgcactgtggacttgggagaaccattgcattccttgatcatcacaggaggcagcatacatccaatggagatggagatgctaagtctgttttccataccagaaaatagctcagaatctcaaagcatcaatggactttgaacatagatatttaccattgtctgatgtaaatttcagccatatatggattgatatggtttggatgtatccccacccaagtctcatcttgaattttaatcctcataattcccaggtgttgtggtaggtaattgaatcatgggggcagtttccctcatgctattctcatgatagtgagctttcatgagatctgatggttttataagtgcctggcatttcccctactggctctcattctcactcttgccgccctgtgaagaggtgccttccaccgtgattgttaagtttcctgaggccttcccagccatgtggaactgtgagtcgaaaattaaaccctcgtgc

SEQ ID NO: 62423 - DNA, 1326 bp, Homo Sapiens
gcacgaggaagagctttaaatgctaccaaactggaacgagtatttgcaaaaccattccttgcttcgctggatggtcaccgtgatggagtcaattgcttggcaaagcatccagagaagctggctactgtcctttctggggcgtgtgatggagaggttagaatttggaatctaactcagcggaattgtatccgtacaatacaagcacatgaaggctttgtacgaggaatatgtactcgcttttgtgggacttcttttttcactgttggtgatgacaaaactgtgaagcagtggaaaatggatgggccaggctatggagacgaggaagagccattacatacaatattaggaaagacagtgtatactgggattgatcatcactggaaagaagctgtttttgccacatgtggacagcaagtagacatttgggatgaacaaagaactaatcctatatgttcaatgacctggggatttgacagtataagtagtgttaaatttaacccaattgagacatttctcttgggaagttgtgcatctgacaggaatatagtactgtacgatatgaggcaagctactcctttgaaaaaggttatcttagatatgagaacaaatacaatctgttggaaccctatggaagctttcatttttacagcagcaaatgaagattataacttatatacttttgatatgcgtgcactggacactcctgtaatggtccatatggatcatgtatctgcagtgcttgatgtggattactctcccactgggaaggagtttgtgtctgctagtttcgataaatctattcgaatctttcctgtagacaaaagtcgaagcagggaggtatatcatacaaagagaatgcaacatgttatctgtgtaaaatggacttctgacagcaagtatattatgtgtggatctgatgaaatgaacattcgcctgtggaaagctaatgcttctgaaaaattgggtgtgcttacatcacgagaaaaagcagccaaggattataaccagaaattgaaggagaaatttcagcattatcctcatataaaacgtatagctcgtcatcgacatctaccaaaatctatctatagccagattcaggaacagcgcatcatgaaagaagctcgtcgacgaaaggaagtgaatcgtattaaacacagcaagcctggatctgtgccacttgtgtcagagaagaagaaacacgtagtggcagttgtaaaataattggtattcctaacaatcctgatgtataattatttgttacttttgatttgagaactctacaaataaaagtgctgggactagattaattgcaaacgttcctcgtgc

SEQ ID NO: 62424 - DNA, 888 bp, Homo Sapiens
aaaaagccatctttccacctcggatttatttactcgaccagacaaaaaagtccaattattatacatgacgacaattcctttgataaagatagagaagatagcatcactatactactgtggactggagagattttatgtgcaatacatggcatctagaacctactcttagattaattcttggactggaagaaagattgatccagtaggtgttgattatattcttcaaaaattgggctttcatcatgctaggactactattcctaaatggcttcaaagaggagtcatggatccactggacaaggttctgtcagttcttatcaaaaagctcggtactgcactacaggatgaaaaggaaaagaaaggcaaagacaaagaagaacactaaaaaagtaatttgatctgtgaacaaattatgattgtgtctgttttattacactggagtgtttttttagtataataatttgaaatataactttaaaataattctaaatttgtggctataattaaaagtttgtaagttaacctgttctagttccatcattctgtgtacagtgaagtattgcatgataatgtaaattttgtgaaaaactagattaaaatatataactgcttgttatggtttataattatataatgtgcaatacaattcctgcatctttaaaatgtctgcagaataactgtgaatttttttgttattggattggccgtaacttttagaaaaaaatcttgttgatgataatgtgattttggggaggtcattaattgctttttcttttttaaatgtagacttatataaatacctgtttgtatatagcttgagtaattgtgatatgattgtataccactaaaatattgttaactattataataaagtcacagtaatggttt

SEQ ID NO: 62425 - DNA, 852 bp, Homo Sapiens
ttttttccgggagtcctttttaaattcattttgtgagaggttgtgttatttgccaactggtggagaaacagaagagtagattgtaaccataagacactgctaagactagaaccggactgaacactaaaataaaaatgaaatgttttaaagaaggcaagggttaaataagcctcatgaatttttatagccctttgcattttcccaaagcacaaactcatggttacctgaatatagggaaccagatatggttcttgagaaaccctcatggtaccattcacagcccataaagtttattttctaggactgtggtagatcttgaaatcatatttatatttggccctcaaggctatttttgttgcattatagcatataggcagcagctttgaagcttcagtaacactaagaaatttatgtgtaaatatagcagtcagggaagagaattttaaaaaaggtcattattgaagaagctgaggggacagggtagagctgctgcaatatggagatttagggtaatatggcaaggtcctgctgcttgaagcctgtgagtgggttgtggatatgggactggtggagagtgagactgttaggaaaattgtatttatgaataagggcagttgaagtagaatttttaccagtccacttgaccttttttttccctaaccactggcttttgagccagcttgggatttccctggccattgccaatacctggccatttggcttccaatagtacagtgggtactcaagttcaagggaagaacttccagactttggtgactgttacttcccagagccaacccctagtgcatatgttagggaatttgggcttccaacatgaatggattccttaag

SEQ ID NO: 62426 - DNA, 858 bp, Homo Sapiens
  misc_feature (273)..(286): n is a, c, g, or t
  misc_feature (337)..(355): n is a, c, g, or t
ttaggcgaattggttcccgggccccccctggatatatatttttgactggtgtttttcacaaagtatttttcaatcagagttttcagaacatgacattgttaaagatactgctgtcccggagttgtgtattttgtaaatgttcaagggaactgtttggaaacttctttccaccattcaggaggttatcagaattaataaaagtatctgttatgtgcacttaagccgcagctgctatagatagcactgccttcttgttccagctaggcaatgccnnnnnnnnnnnnnngaagcagttctctttataaagtgttattttgatagtttgtggattctaaannnnnnnnnnnnnnnnnnnaacaccatataagtcaaatatgtatttaacaaagcaatatgtattcattcactttcaagatttgttttggtgtcaaaataacatgaaaaggtagatggagttgcttctgttgaattagctctgccaccaatatgtatcttcatacacgtttggaaatgtttcctgcagcattaggtatgacttgttctgagtactgcttccggtgctaaaatgaacaaagaatttgtacttaatggcatggactctggagaatctatgcgaatcaacctttctaccttaatatctccccaaaaatgtatagtgccttgtttttatgtacagtttatatacagaaaagtttgctctgcatttttgatgatggtttggaacattatctacaattttactctcaaatagtcaaaataaaaacatctcaatttctaataccggttgtaaaaacagtacacatgtcattttgtgatataggactcccaaataaaagtatcagaataaacacctcgtgc

SEQ ID NO: 62427 - DNA, 1212 bp, Homo Sapiens
ccacgcgtccgctaaatacctcaaaggcaacctgcttctgcaggttttgaagtgtcagcttcataagacactgaggtttagaattgtttgattctagaccataactgaagggcataaatggaaacaggatatgaagggaaacaagtagcatcatggagctgaaaagtggtgcatcacccaatggctagcacaaacaaggatcacactgtccattctcttgtctgctaaattaagcattttcttgcctcctttgcttcatcttttcacaacagctggatagagggatcagaaatgactgtgtcatggtgctcattcactgcaaactcccagttgcaagctccttggctcccccggagggagcaagaatctcatagttcagagacacagagggccttttagccctaatgaccttttggatgggactgcaactcatgactatcctgatattggaagaaaggactttgttaatcttctcccccatagctctgctgcgtaggtctacatcttactcagaatcactacacattcctttagtcttcctccaagctccagagccattggtacaaatgctttattgaaactaaatacataatacacacaatgagatgaagacaatatagaagtccgcatagtcatcataatcccgttccttggccggttgaggcagctcagtggctgagcccagtcaagccaacccgcagcttcactcacgacttcaagatttgatgctaattcttttggatttctacagttattaaataagtgtctgagtggactgtctttgttcctttgtgttttgagggctggctgggtaggagtgggggtggtttgtctgtggcagtgaatttttgccaggagaggaacattaaatgccaaaggtaggtggcagtatttcagtctctgccccagccgacaggcagagagaccttcacaaataataagacccaagaaagactgggcctcacctaggcttgtgttccaggaggtgctgccagtctcttcattacagtcaggctctgaggttggggaagtggaagtttccagcttttcatcctcatccctgagggctagaatcagtcagcactatctaaagagagatgtggctgtaaagtggtcatctgaaggtagatacgcctggatagttctggtccaatgcggcgagaagtggatgtcacaccttccccacggcgcacctgtatgtctgcctcgtgc

SEQ ID NO: 62428 - DNA, 925 bp, Homo Sapiens
tccaagatagattgttatgaaaagggcaagtgcagaaaaagtctacacagtcttgctacctgacaagaatgaaaaaagtgaagaaaacacgtatcattcattattgactgatatcagcaggaatgaatactgggcagatacacaagaaaaagaaaagtgaccacctgggtaagttgagggatggattctttatatataatctctttacttcaaatagtttgaaccctgtgaatgtaatacttatttaaaaaattaaacacattttgtattcagaagaacttcccctcaataatattctttctcttcattttatcctccttatctccccacacatgatgtagaatgtttttaataaaacaatttgcggatgcagaatcaatcagtaatgtaggaatcagtaatgccatccatccacttattccttagaattggtaagtttggcaggcacttaggatcctggcatctctctgaaatgagaagcttttgcaacctgtcaaatcacttgcccttggccttgtggtgactctcggtcttcttaggcagaagcacggcctggatgttaggaaggacgccgccctgagcaatggtcacccggcctagcagtttgttgagctcctcgtcgttgcggatggccagctgcaagtggcgcgggatgatgcgagtcttcttgttgtcgcgagccgcgttgccggccagctccaggatctcggcggtcaggtactctaacaccgccgccaggtacaccggcgcgcctgccccaacccgctctgcgtagttgcctttacggagcaggcggtgcactcggcccaccgggaactggagaccagcgcgagaagagcgggatttcgctttggcgcgagctttgcctccttgcttaccacgtccagacattgcaatcagacaaaaatcaccaaaacccttgtgc

SEQ ID NO: 62429 - DNA, 485 bp, Homo Sapiens
tcaactccaccccatcccatcccaccttgaaaatcactgctttgaaccagtgttttccaccttgtcctccacagatttcataggaaatgttcaacaattctgtgaaaggtcacaggacccaattggagaaatcatatgaaaagcatagttggttttggtgtcatatggatcagaggcacaagtgcagaggctgtggtcatgcggaacactttgttatttaagatggctatccagataatcctgaacactgtgtatttattttatttagactaccagcaaagattaaagcatgaaatgtaaaacatttgataaaacttacagccccctacaccaagagtgtatctgtgaaagagctcctacactttgaaaacttaagaatcccttatcatgaagtttgcctgttctagaattgtaagattgttaatttccttcaatctttagtgacaacacttaatttcttttttaataaaaaaaacctatagatg

SEQ ID NO: 62430 - DNA, 753 bp, Homo Sapiens
aagagcgagagaatgatgtcatctaaaggtttttgaagaattatttgggttttcattgcattaaatttctatcactcccagctttgttttcatttaaaaaaatatacaaagagctttgtaaatacaacacattttatttctcccccttcttttaatgtacagcttttttgccacttatatatacttaaaatattcccatgaattatgtccagttcttcttggaaaaaaattgggttttgaatgaacctgcaaagcatcctgcagcgtgagcagctcctccacctggagttccgaagcatcttctcaggccaaagcggcattacccgggaatctgtcttttccgccacagcatggtttgaggcgcagtctgttaatatagctgggccatgtcagtgactgttgtgtttgtggggtcaggtggggggcatggtatttgcaaaaaaaacaaattatggctaatttattattttgttgcagtggggttaactgtaaactcatgtaagagtctgtgatttcctcactggttgatctctctctctgtaatcctcattgcaaattttcaccaggacagcgttttttgattagaggggagctctggcacagtatgctttaatttagcaggaacttccagatgatttaaattctcgatgctgtgatgacacacatatgatctttcgtgtttttgagggactttactttcattgtttgccagcgtggctcgttgctgttgcccaataaagcttgtgtacgttc

SEQ ID NO: 62431 - DNA, 598 bp, Homo Sapiens
cccaatccactgggggagcaatacttcaaaagagaatcctttcctgtttgcattggaagccgtggttatctctgttggctccatgggattgattatcagccttctctgtgtgtatttctggctggaacggacgatgccccgaattcccaccctgaagaacttagaggatcttgttactgaataccacgggaacttttcggcctggagtggtgtgtctaagggactggctgagagtctgcagccagactacagtgaacgactctgcctcgtcagtgagattcccccaaaaggaggggcccttggggaggggcctggggcctccccatgcaaccagcatagcccctactgggcccccccatgttacaccctaaagcctgaaacctgaaccccaatcctctgacagaagaaccccagggtcctgtagccctaagtggtactaactttccttcattcaacccacctgcgtctcatactcacctcaccccactgtggctgatttggaattttgtgcccccatgtaagcaccccttcatttggcattccccacttgagaattacccttttgccccgaacatgtttttcttctccctcagtctgg

SEQ ID NO: 62432 - DNA, 770 bp, Homo Sapiens
gaattccggcacgaggggaaatcctaagagcctgaccgttgatgatgcagggaaccgtccggtgtgaccattgagagggaaaaggtgcccattaaagatccaaagtcatgactgactccaagtatttcacaaccaataaaaaaggagaaatatttgaactaaaagctgaactcaacaatgaaaagaaagaaaagagaaaggaggctgtgaagaaagtgattgctgctatgaccgtggggaaggatgttagttctctctttccagacgtagtgaactgtatgcagactgacaatctggaactaaagaagcttgtgtatctctacttgatgaactacgccaagagtcagcctgacatggccatcatggctgtaaacagctttgtgaaggactgtgaagatcctaatcttttgattcgagccttggcagtcagaaccatggggtgcatccgggtagacaaaattacagaatatctctgtgagccgctccgcaagtgcttgaaggatgaggatccctatgttcggaaaacagcagcagtctgcgtggcaaactccatgatatcaatgcccaaatggtggaagatcagggatttctggattctctacgggatctcatagcagattcaaatcccatggtggtggctaatgcctgtaacggcattatctgaaatcactgagtctcacccaactgcaccttatcttgatctgaacccccttaaccttaataagctgctgacagccctgaatgatcgcactgattgtcggccagatttt

SEQ ID NO: 62433 - DNA, 941 bp, Homo Sapiens
agaaggcctctttggtaaaattgttattgaggatatttccctgaaaaacaaatttatctttaaatttaattccgggaaaatttaaactttcaggcttttattttatcagacagggtaaaaaatttataactcagaatattccctttcccctctttgtgtgatggattgcttggttttagttactgattatttaaaataataagttattcaaatctaggattttgatacaatagttcttctctagaatatagtgtgtgtgtgagagtatatttaaaatttttattaaggcccatggggcagcctttgaggaaaccagaccttggggatcgccaggcaggattagtggcaggaattgagagaacagagccccacagagctcctcggggaccgtcccccagtcacaagagtatctcaaggaagtagtcttctcccacatcccccaaagataactaccagagggtcagttctctgagcccttctcagtgtagaaaagacaagtgtcaaagcttccccactcaccctgagtttgccttctatgacaatacgtcgtttggcctcactgaggctgagcagaggatgctggacctcccaggatattttgggtcaaatgaagaggatgaaaccacaagtacacttagcgtggagaagctggtgatctagactgagaatcagcctgagcttaacacagctggggtctgctactcgcgttttgtagacttttgtgtaactatttgtaccgtaggacagaatgtgaggaggaagtaacacacacagaggaggatgtgtgtgtgtgcatgtgtttgaattcacaaggaagaaattatttatcttgagctttttcctttgttattcagtttttattggtttattactaataatgataataaaatgtaaacaagaaaaaaggaaaacctcgtgccgaattcctgcagcccggggcc

SEQ ID NO: 62434 - DNA, 522 bp, Homo Sapiens
ccacgcgtccgctgacagctggtgcgcctgcccgggaacatcctcctggactcaatcatggcttgtggtctggtcgccagcaacctgaatctcaaacctggagagtgccttcgagtgcgaggcgaggtggctcctgacgctaagagcttcgtgctgaacctgggcaaagacagcaacaacctgtgcctgcacttcaaccctcgcttcaacgcccacggcgacgccaacaccatcgtgtgcaacagcaaggacggcggggcctgggggaccgagcagcgggaggctgtctttcccttccagcctggaagtgttgcagaggtgtgcatcaccttcgaccaggccaacctgaccgtcaagctgccagatggatacgaattcaagttccccaaccgcctcaacctggaggccatcaactacatggcagctgacggtgacttcaagatcaaatgtgtggcctttgactgaaatcagccagcccatggcccccaataaaggcagctgcctctgctccctccctcgtgc

SEQ ID NO: 62435 - DNA, 1136 bp, Homo Sapiens
gcacgaggctccctttctaaaatgaaagctgatgaatcttaaaaggaagaagaaaagaaaagctgtgcaaattcatagtaaagttcgttttttatatgtttccagtgtagcagatctctatgggaatatataaatatatataactggcttattttcttttaatgtgcaatgatggctggatcatttaaagttctttttagaaaataacataagccaaagactcaagtgtaaatatgtctatatggagaaagcacattatatttattggttacttacattccttttttgatggctaaaatactaccaccacacaatcatcttttttttcctgaagaaagctttttctttagctaaaatcaattgtaaacgatttttgtagattattttttgtatgttttagtgtaagtagaagataaactttttattcataaaccaggaagcaatgttctttatagtgattctcttgtgtacatgcttgtgaattaaatttgtgtaaaatcccttggcaattgggtcttttaatataggaccaaattaaaacattttgctgaatatgtatagtttttcacaatttcattaggtaaataatggtttggtgatcatacatgagaaatgtacacattaaaaggccttgctgacaacttgcacaatgttgaacatagcctttaagcatcatttaaattttaaaggaatggagtttttcagcctgtggcccagcactggtcaagaaaacaagatggcaacatatatgctttcagggtcaaatttgagcaaactgtaaactgtcagggtgataaaatgtttctcttgatgtttacatgcacaagctttgcgttctgactataaaaagtgtgaacaaatcaatgccagattcctgttttgcgcattgtcatgggattcttaagtgaacctttctaaatgtggtcttgttcacatgctccacgtagctgtaacttcacatcatcagcttgcagtttgtaattgactaaagcattccagtgtcctctttctagattgccagctcatgacatggtgcttataaagatttaattaaagtaagaatgaaataaagtttttataattataacaaaacctcgtgccgaattcctgcagcccgggggatcctttttaatggg

SEQ ID NO: 62436 - DNA, 855 bp, Homo Sapiens
cacaaaattggaacactggctaaagataattgctatttatttttacaagaagtttattttcatttggagatctggtgatctcccagctatctaaagtttgttagatagctgcatgtggctttttaaaaaagcaacagaaacctatcctcactgccctccccagtctctcttaaagttggaatttaccagttaattactcagcagaatggtgatcactccaggtagtttggggcaaaaatccgaggtgcttgggagttttgaatgttaagaattgaccatctgcttttattaaatttgttgacaaaattttctcattttcttttcacttcgggctgtgtaaacacagtcaaaataattttaaatccctcgatatttttaaagatctgtaagtaacttcacattaaaaaatgaaatattttttaatttaaagcttactctgtccatttatccacaggaaagtgttatttttaaaggaaggttcatgtagagaaaagcacacttgtaggataagtgaaatggatactacatctttaaacagtatttcattgcctgtgtatggaaaaaccatttgaagtgtacctgtgtacataactctgtaaaaacactgaaaaattatactaacttatttatgttaaaagattttttttaatttagacaatatacaagccaaagtggcatgttttgtgcatttgtaaatgctgtgttgggtagaataggttttcccctcttttgttaaataatatggctatgcttaaaaggttgcatactgagccaagtataattttttgtaatgtgtgaaaaagatgccaattattgttacacattaagtaatcaataaagaaaacttccatagct

SEQ ID NO: 62437 - DNA, 380 bp, Homo Sapiens
gcacgaggcccaagtaagaagtgtatctgcctttccatcttttggttttcatttgggcatgtgctattaccagaaacaacaaacttatatttaaaatacccttcatttgacacagtttttaatgagtgatttaatttcctctgtatttgtatgtttagaagactgcctaaaacatgagcactgtacttcataaaggaaactgcgtatgcagattcagtattgtgtatctttggacaattagatggacatttaaaatggaacttctttatctgacaggatcagctacaatgccctgtgttaaattgtttaaaagtttcccttttcttttttgccaataaagttgtaaataaagaccatcatacattaaaatcccctcgtgc

SEQ ID NO: 62438 - DNA, 719 bp, Homo Sapiens
cccggctggacatccctggacaccgcgggccaggaagagttcggggccatgagagagcagtacatgcgtgctggccacggtttcctgctggtgttcgccattaatgaccggcagagtttcaacgaggtgggcaagctcttcacgcagattctgcgggtcaaggaccgcgacgacttccccgttgtgttggtcgggaacaaggcagatctggagtcacagcgccaggtcccccgatcagaagcctctgccttcggcgcctcccaccacgtggcctactttgaggcctcggccaaactgcgtctcaacgtggacgaggcttttgagcagctggtgcgggctgtccggaaataccaggaacaagagctcccaccgagccctcccagtgcccccaggaagaagggcgggggctgcccctgcgtcctcctgtagcccaggcaagagagaagcaaccaccacaagctctcgggactagctgccttcgcaccttgctgtgtgacctgaggccctcactgagcctcaatttcctcatctgggtctcccaggacacatcacatacccacccttacttcctggcctcttctgggctactgccactgtgtgccttctgccaacgcctcctgtccccacctaagcctggtgggggtgaggggctccgggtcactgctgtatataactcccctcccccagaaaaataaatgtcactgccaacgtcctcgtgc

SEQ ID NO: 62439 - DNA, 918 bp, Homo Sapiens
ccttaggcactccggactaagatggcggcgacggccaggcggggctggggagctgcggctgttgccgccgggctgcgcaggcggttctgtcatatgttgaagaatccatacaccattaagaaacagcctctgcatcagtttgtacaaagaccacttttcccactacctgcagccttttatcacccagtgagatacatgtttattcaaacacaagataccccaaatccaaacagcttaaagtttataccaggaaaaccagttcttgagacaaggaccatggattttcccaccccagctgcagcatttcgctcccctctggctaggcagttatttaggattgaaggagtaaaaagtgtcttctttggaccagatttcatcactgtcacaaaggaaaatgaagaattagactggaatttactgaaaccagatatttatgcaacaatcatggacttctttgcatctggcttacccctggttactgaggaaacaccttcaggagaagcaggatctgaagaagatgatgaagttgtggcaatgattaaggaattgttagatactagaatacggccaactgtgcaggaagatggaggggatgtaatctacaaaggctttgaagatggcattgtacagctgaaactccagggttcttgtaccagctgccctagttcaatcattactctgaaaaatggaattcagaacatgctgcagttttatattccggaggtagaaggcgtagaacaggttatggatgatgaatcagatgaaaaagaagcaaactcaccttaaaataatctggattttctttgggcataacagtcagacttgttgataatatatatcaagtttttattattaatatgctgaggaacttgaagattaataaaatatgctcttcagagaatgatatatacctcgtgc

SEQ ID NO: 62440 - DNA, 842 bp, Homo Sapiens
ggcaatggcaagattcccttgctgagaacatgcagatgaataaccttatagctgggatgcagagaggagaaatttctgtaggtaataagtgcactgtattccctctgagctacttcctgggcatagtacatgtatggccagtgtgtgtacttgagccatcaggctcagacacttgttgaatatacctctcattgcattagtttgtaattgtgctagtgctgggtgctgagctcagctgcccggatgacctttccagactgaaggacatactcccctaacagctgggagtgctgctggctggccatttacttccagcccttatgaggagtttcccctgctgaagagccctgcctgccccagatcatacccccttcctgcctgtaacccttaccggctccatatggggtacaaagggctggcctcctcaccccaacttgggaaaccctctggggccatcccagctccagagccccttgtggggtcagtgagacctcattgtggccacattacagcccagtgcctctccctgacaagcctgtacccagccggctcagcccacagcactgtcctatgaaccttcctgcacgccattctccacctcagtatctgctttcggggaacccaacctgcgacagtgcttctgtgtgttttcagtcctgcaggtttgaactctgactttggagacttttccagttatctcatggaatgacagattgtgcctgtatgatatcaggcacaattaatgcaaattaggcagacctatttattctagatgtgaatttgctatttattttaaatgttgattttatgtgttatgtgactctgaacttattgcctcgtgc

SEQ ID NO: 62441 - DNA, 1074 bp, Homo Sapiens
gcacgagggctctctcccggcgcggccgccgccgatcacagcagcaggagccaccgccgccgcggttgatgtggttgggccggggctgaggaggccgccaagatgccgcagtccaagtcccggaagatcgcgatcctgggctaccggtctgtggggaaatcctcattgacgattcaatttgttgaaggccaatttgtggactcctacgatccaaccatagaaaacacttttacaaagttgatcacagtaaatggacaagaatatcatcttcaacttgtagacacagccgggcaagatgaatattctatctttcctcagacatactccatagatattaatggctatattcttgtgtattctgttacatcaatcaaaagttttgaagtgattaaagttatccatggcaaattgttggatatggtggggaaagtacaaatacctattatgttggttgggaataagaaagacctgcatatggaaagggtgatcagttatgaagaagggaaagctttggcagaatcttggaatgcagcttttttggaatcttctgctaaagaaaatcagactgctgtggatgtttttcgaaggataattttggaggcagaaaaaatggacggggcagcttcacaaggcaagtcttcatgctcggtgatgtgattctgctgcaaagcctgaggacactgggaatatattctacctgaagaagcaaactgcccgttctccttgaagataaactatgcttcttttttcttctgttaacctgaaagatatcatttgggtcagagctcccctcccttcagattatgttaactctgagtctgtccaaatgagttcacttccattttcaaattttaagcaatcatattttcaatttatatattgtatttcttaatattatgaccaagaattttatcggcattaatttttcagtgtagtttgttgtttaaaataatgtaatcatcaaaatgatgcatattgttacactactattaactaggcttcagtatatcagtgtttatttcattgtgttaaatgtatacttgtaaataaaatagctgcaaacctccctcgtgc

SEQ ID NO: 62442 - DNA, 789 bp, Homo Sapiens
tgcgctgcgccacgatgtccggggagtcagccaggagcttggggaagggaagcgcgcccccggggccggtcccggagggctcgatccgcatctacagcatgaggttctgcccgtttgctgagaggacgcgtctagtcctgaaggccaagggaatcaggcatgaagtcatcaatatcaacctgaaaaataagcctgagtggttctttaagaaaaatccctttggtctggtgccagttctggaaaacagtcagggtcagctgatctacgagtctgccatcacctgtgagtacctggatgaagcatacccagggaagaagctgttgccggatgacccctatgagaaagcttgccagaagatgatcttagagttgttttctaaggtgccatccttggtaggaagctttattagaagccaaaataaagaagactatgatggcctaaaagaagaatttcgtaaagaatttaccaagctagaggaggttctgactaataagaagacgaccttctttggtggcaattctatctctatgattgattacctcatctggccctggtttgaacggctggaagcaatgaagttaaatgagtgtgtagaccacactccaaaactgaaactgtggatggcagccatgaaggaagatcccacagtctcagccctgcttactagtgagaaagactggcaaggtttcctagagctctacttacagaacagccctgaggcctgtgactatgggctctgaagggggcaggagtcagcaataaagctatgtctgatattttccctcgtgc

SEQ ID NO: 62443 - DNA, 866 bp, Homo Sapiens
gcagaagggcaagtcgattgaggtcaagaacacgatcacgttttagatcacatactccaagaagacactatattaataggcggagtcgatctggaacatacagctcgagatcaagaagcaggtcccggcagtcacagtgaaagccctcgaagacatcataatcatggtttctcctcaccttaaggcccaagcataccagagatgatttaaaaagttcaaacagacatggtcataaaaggaaaaaatctcgttctcgatctcagagcaagtctcgggatcactcagatgcagccaagaaacacaggcatgaaaggggacatcatagggacaggcgtgaacgatctcgctcctttgagaggtcccataaaagcaagcaccatggtggcagtcgctcaggacatggcaggcacaggcgctgactttctcttcctttgagcctgcatcagttcttggttttgcctatctacagtgtgatgtatggactcaatcaaaaacattaaacgcaaactgattaggatttgatttcttgaaaccctctaggtctctagaacactgaggacagtttcttttgaaaagaactatgttaatttttttgcacattaaaatgccctagcagtatctaattaaaaaccatggtcaggttcaattgtactttattatagttgtgtattgtttattgctataagaactggagcgtgaattctgtaaaaatgtatcttatttttatacagataaaattgcagacactgttctatttaagtggttatttgtttaaatgatggtgaatactttcttaacactggtttgtctgcatgtgtaaagatttttacaaggaaataaaatacaaatcttgttttttctaaaaa

SEQ ID NO: 62444 - DNA, 886 bp, Homo Sapiens
ttttgggaaacatcttagctgtgctatctggctaaaattattcttattactcctctctttgacagacttcaagttttcttcatagccctttcaaagtttttgagccatccagagtaaaatcatttctaaatgatagttctgtatatctccaactcgtcttaagtgtatttgcctgtgtgcaacgtattgctagactatgaactcctcagcatggctgctggataacttaattgtcctgagttaatagccttcaaaggacaaatcggtttctttgcagatagcttcgtaaaacttcacatggagtttattttatcatatttcccttttttatttctgctcctcctttaattgcccatcttgcttcagagactgacatttcagggtggatattaattaaagcattaattttgttttttggtatatttctatccctagtatttctatcttactgctaaaaatacaggaaaagtgccgtatttttaatgcatttagtggttttctttggtgttatctgttccatttttctttttcatacattgaagtgtgtctccttttcaaccaaaataatgaaatagtggagaccatgaaattgttgtgcctggctaattggcaaattaatttaccaatataataagtgtagcgccttgtttgaataccctttttgagaaggtatgatgagaatgggcaagggtgtcagcatctcttcttcttaataattaattgttttcagttttggttcacgaagaatgcttagttaatctgtaatgttgcctagagctgtatttatctgtttttatttatactagtgtagtaaagctgcatatcattacagtaaaaacgactactgtgatgagttaatcagaaaatctattaaaatctatatgac

SEQ ID NO: 62445 - DNA, 821 bp, Homo Sapiens
gcacgagggagatctgtgaatattgtgatagaaattctttggtattcatacatttcagctgcaagtcagcaatttcccaggtaccatgtaagctataaaacagtcattcttaaagacagaggatagctgtgactcatgggatcatgaggtccatggctggttgcaggttccctttttccttcctcaggttttgtctcttcctgtgttgtccccagcaagggagagactgtggggtggattgggagaacagattaggagtatagcaaatgaacccagaatggaacagtggggagctaactgtgaatgaggagagtacctgctgcaggacctggaggtcaggtgtgaatgctgtattggcacagggaataaatatcctggcgtctggagccttcacctctccgtcaagtccttcctgtgatactgccatggcacaggatctgagttgcagctctgcaccctaaatcacaccctgggcattgtctgggctgcagggctgccaggttctgtacttgtgtccagctgtggccctggatgctggagctggagggttttctgtgctcagactgtagcctgtagctcttggcctgtgtagagccccctcctgtgccctcagtggctgtcgtttgttaacatcatcaggaagatgggaaaggtcaggcagaatttttctgccctacaaagggtggaagagaaaggacacagtattttcatgaatttaccatatatctttgtttttcttcaacgaaaaagttaattgaggcaatgtcatctgctcaaagttgagtggtttattcacaataaactgtaagtttccctcgtgc

SEQ ID NO: 62446 - DNA, 1172 bp, Homo Sapiens
tggaatcatgttggaagctccacatgtccatggaagtttgtgatgtacggccgaccctacaggcagttaacatgcatgggctggtttgtttcttgggattttctgttagtttgtcttgttttgctttccagagatcttgctcatacaatgaatcacgcaaccactaaagctatccagttaagtgcaggtagttcccctggaggaaataatattttcaaactgtcgttggtgtgatactttggctcaaaggatctttgcttttccattttaagcttctgttttgagttttgccctggggcttgaatgagtcccagaaagtcgttcggatggtgggaggctgcctacgaggcagtaaatccagtcacaatgcctgggaggggcccatccttccaaaatgtaaatccagtctcggtgtgaccgagctggctaacaggcttgtctgcctggttttcctcctacacgtggacattattctcctgatcctcctacctggtccaccccagggctaccggaaggtaaaatcttcacctgaaccaattatgagcagtctccttactgaaggtacagccggatacgtggtgcccccggggctggtgttggcagccggggggaggtgcctgagggtccccacggttcctttctgcttttctgaatgcatcaagggtacgagaacttgccaatgggaaattcatccgagtggcactggcagagaaggataggagtggaatgcccacacagtgaccaacagaactggtctgcgtgcataaccagctgccaccctcaggcctgggccccagagctcagggcacccagtgtcttaaggaaccatttggaggacagtctgagagcaggaacttcaagctgtgattctatctcggctcagacttttggttggaaaaagatcttcatggccccaaatcccctgagacatgccttgtagaatgattttgtgatgttgtgatgcttgtggagcatcgcgtaaggcttcttgcttatttaaactgtgcaaggtaaaaatcaagcctttggagccacagaaccagctcaagtacatgccaatgttgtttaagaaacagttatgatcctaaactttttggataatcttttatatttctgacctttgaatttaatcattgttcttagattaaaataaaatatgctattcctcgtgc

SEQ ID NO: 62447 - DNA, 767 bp, Homo Sapiens
gaattatattgtaaagtctacatctacaatttaatcaggaagaaatgctttgcattacatcaaggacacatttattctaatggaataaaacagacacacacaaaagaccaagtacatgtttttaaaaaatgactacatgtttcacctggtcctatttttgctatttggaccatacttttaagtgaattgatcttacatacatgttaagtctgatttatctccccacatttttaaacactaaatgaagcttctcacaatttctaattataaacaaaaggctgaaaacagtatgggaaacaaagtttcaaaacaaagaaaagttgagtaaaaggtgccccctctatggctcatctgaaagaaacattttactcagagaggcaaacatttctgatctaggagtaagtttcccactcactttgcaaggacccactcattctgcagaaagacctacaagtctttctggtctcaattgcaaagtacgtgaaaatgtgtatgaaagatctaaaagctaaatattagaataaggctaattgaaatcaaaattgtgtgctggtctaaatatacatcttcggcttcttcctttttagtaagtatttttatttcagatgtatttaaaaataacttacatttttagtgtgctttatggtcaatgactgtaaagttgaaactcaaatgagtcagtttaaaatttttgtctcatttgattctattgaaattttaatcacctactactttaatcaagttattcatgaggtaagtttcagctt

SEQ ID NO: 62448 - DNA, 1770 bp, Homo Sapiens
gcacgaggctgcagcaagtattcggtacgaggctaccccacgttattgcttttccgaggagggaagaaagtcagtgagcacagtggaggcagagaccttgactcgttacaccgctttgtcctgagccaagcgaaagacgaactttaggaacacagttggaggtcacctctcctgcccagctcccgcaccctgcgtttaggagttcagtcccacagaggccactgggttcccagtggtggctgttcagaaagcagaacatactaagcgtgaggtatcttctttgtgtgtgtgttttccaagccaacacactctacagattctttattaagttaagtttctctaagtaaatgtgtaactcatggtcactgtgtaaacattttcagtggcgatatatcccctttgaccttctcttgatgaaatttacatggtttcctttgagactaaaatagcattgagggaaatgaaattgctggactatttgtggctcctgagttgagtgattttggtgaaagaaagcacatccaaagcatagtttacctgcccacgagttctggaaaggtggccttgtggcagtattgacgttcctctgatcttaaggtcacagttgactcaatactgtgttggtccgtagcatggagcagattgaaatgcaaaaacccacacctctggaagataccttcacggccgctgctggagcttctgttgctgtgaatacttctctcagtgtgagaggttagccgtgatgaaagcagcgttacttctgaccgtgcctgagtaagagaatgctgatgccataactttatgtgtcgatacttgtcaaatcagttactgttcaggggatccttctgtttctcacggggtgaaacatgtctttagttcctcatgttaacacgaagccagagcccacatgaactgttggatgtcttccttagaaagggtaggcatggaaaattccacgaggctcattctcagtatctcattaactcattgaaagattccagttgtatttgtcacctggggtgacaagaccagacaggctttcccaggcctgggtatccagggaggctctgcagccctgctgaagggccctaactagagttctagagtttctgattctgtttctcagtagtccttttagaggcttgctatacttggtctgcttcaaggaggtcgaccttctaatgtatgaagaatgggatgcatttgatctcaagaccaaagacagatgtcagtgggctgctctggccctggtgtgcacggctgtggcagctgttgatgccagtgtcctctaactcatgctgtccttgtgattaaacacctctatctcccttgggaataagcacatacaggcttaagctctaagatagataggtgtttgtccttttaccatcgagctacttcccataataaccactttgcatccaacactcttcacccacctcccatacgcaaggggatgtggatacttggcccaaagtaactggtggtaggaatcttagaaacaagaccacttatactgtctgtctgaggcagaagataacagcagcatctcgaccagcctctgccttaaaggaaatctttattaatcacgtatggttcacagataattctttttttaaaaaaacccaacctcctagagaagcacaactgtcaagagtcttgtacacacaacttcagctttgcatcacgagtcttgtattccaagaaaatcaaagtggtacaatttgtttgtttacactatgatactttctaaataaactcttttttttt

SEQ ID NO: 62449 - DNA, 646 bp, Homo Sapiens
gcacgaggctcaggagaaggctctggaggacttgaggcatgctgggcctggtgcagtgatggcgctaaggagacccggggaaagacagtatcgtggtcacgtatgcttaggaagcagcacagccgtgtccttagggatgttcgcgtccagtaaagacactggtaactgcggtttcagccaacactcttcatggcagtgtcgacctcgggttagcttctgttgtctttgtggatggttttcctggagcggcctgacgttgacgtgttctctggtcccatgtcttagcggggcatggtacggtttcgtgcctgacgcgtgcattagggtgttctcttatactttcagtagcatctttccacagcaagggccaaaccctcctggttcccttcagagtctttttggcctgatgatgactcttgagtgataccctgtgatgcagacatgccccagatggattctactttctttaaaactagggactttcaagattaaaaaaaagattgtcactactaatttgacgcctaacttcagaagcttcactgtctacatgtgaacttttccagaaaaactgtgccatggacatttttcctttggggaattaacatttaaattttggtaactattaaaagacagatctggttaattt

SEQ ID NO: 62450 - DNA, 1338 bp, Homo Sapiens
  misc_feature (972)..(1000): n is a, c, g, or t
cccccgggctgcaggaattcggcacgaggggatactggagtgtagaatttggaggcagaatgaatacagtgtttcatatttggaagtatgataattttgctcatcgaactgaagttcagaaagccttggccaaagataaggaatggcaagaacaattcctcattccaaatttggctctcattgataaacaagagagtgagattacttatctggtaccatggtgcaaattagaaaaacctccaaaagaaggagtctatgaactggccacttttcagatgaaacctggtgggccagctctgtggggtgatgcatttaaaagggcagttcatgctcatgtcaatctaggctacacaaaactagttggagtgttccacacagagtacggagcactcaacagagttcatgttctttggtggaatgagagtgcagatagtcgtgcagctgggagacataagtcccatgaggatcccagagttgtggcagctgttcgggaaagtgtcaactacctagtatctcagcagaatatgcttctgattcctacatcgttttcaccactgaaatagttttctactgaaatacaaaacatttcattaactgctataggatctgtctgctaatggtgcttaaattctcccaagaggttctcacttttatttgaaggaggtggtaagttaatttgctatgtttcttgcattatgaaggctacatctgtgctttgtaagtaccacttcaaaaaatagttctgtttactttctgcatggtatttcagtgtctgtcatacattaaaaatacttgtcactgttttaagatcttgactcttcatttgtttcagaatagctcttctactgtattctgacaactctttgctttatagcattttgttgtattcaaatgataatggtagcatttccatgcttgtgacagcatttttaagttattaatatattttatcaacctttccatcatgtctgnnnnnnnnnnnnnnnnnnnnnnnnnnnnnaccagtaaaatttattttgtaataccaaataggatttaagaaaattaacgtatttctttactatggaaaaccacattgtcatttgtgacatcatctatattaaatatggttttcacattagttatttgtcacttacttggaaaatgatgctgttaggtcctggtattaaaaatctagaaaagacttgttggtttatgtgctgaaatgtctttatttataattaattttaactactatttacttcatttcggatcctgtttaacaaagatacttgagacatccatttgttttcatgaaatctgtatggatatggaaatgcttgccctaatacctcgtgc

SEQ ID NO: 62451 - DNA, 955 bp, Homo Sapiens
gcacgaggctggccgtggctctgcattcggctgtgagtgccagtgacctggagctgcacccccccagctatccgtggtctcaccgtggcctcctctcttccttggaccacaccagcatccggaggggtttccaggtatataagcaggtgtgcgcctcctgccacagcatggacttcgtggcctaccgccacctggtgggcgtgtgctacacggaggatgaagctaaggagctggctgcggaggtggaggttcaagacggccccaatgaagatggggagatgttcatgcggccagggaagctgttcgactatttcccaaaaccataccccaacagtgaggctgctcgagctgccaacaacggagcattgccccctgacctcagctacatcgtgcgagctaggcatggtggtgaggactacgtcttctccctgctcacgggctactgcgagccacccaccggggtgtcactgcgggaaggtctctacttcaacccctactttcctggccaggccattgccatggcccctcccatctacacagatgtcttagagtttgacgatggcaccccagctaccatgtcccagatagccaaggatgtgtgcaccttcctgcgctgggcatctgagccagagcacgaccatcgaaaacgcatggggctcaagatgttgatgatgatggctctgctggtgcccctggtctacaccataaagcggcacaagtggtcagtcctgaagagtcggaagctggcatatcggccgcccaagtgaccctgtccagtgtctgcttgccatcctgccagaacaggccctcaagcccaagagccatcccaggcctgttcaggcctcagctaagcctctcttcatctggaagaagaggcaagggggcaggagaccaggctctagctctgggccctccttcagcccccatcatgggaataaattaattttctcaatgt

SEQ ID NO: 62452 - DNA, 1071 bp, Homo Sapiens
  misc_feature (155)..(221): n is a, c, g, or t
ttatttagcagccttaaagtttatcaaaaaattgtccagattccacgtgcagcatgcttggccctgcatttaatttaagaaggattaataataatgctctgaatttttcgaaagggattctcctaaacccacccacttctcttgcccaggctgcnnnnnnnnnnnnnnnnnnnnnnnnnnnnnnnnnnnnnnnnnnnnnnnnnnnnnnnnnnnnnnnnnnncttgttagccacctgttatatgggagaacgaaaattgttatattttgaaagtacttattacattatttttattttagtatcttgatgctcctgtcaaaagggaaatgaggcttttaaaaataaagtaccttaattctttattgactttttgccctaaattgctaggtgtgacccagcaatcttttaggaagagattttacagtggtgctttatttatatcaataatccagtatagttaggctgttcattcctcataatagagtacataacagaaaagtgggactttcacattttcatatttaggcacgttccaatttaattccaaaaatactctgtaattctacatctaaaaaaaccgattccctaattcgaatttattggtaccaaagctctctttggctatagacaattaagagttgaccttttaagttaatgtatatgcttaaaaacagttttaggaaaatatttggtagacaaagagtttcaactttaaatgttcactatgtcatttagtgtccaactttacggataggttgactatctaaataggcatttttagtcattaaaaaaaatctagtccccaggaggatccctataactcaaaataacttgtttgtaaaagaaaatttgtttacttacccattagtaagttcctgcatattcattataagatggcaaatcaaacttttctaggatgaagacagcttatttttaagttgtatagtcttagttggtttagggtctcaattttaattaataaaatacttggttttatttgcttgtccttttgaattcctgttttaataattttaaaatgagcccaaagaacgttgaagttcagattaatctc

SEQ ID NO: 62453 - DNA, 1044 bp, Homo Sapiens
gcacgaggagaagtcttaggcagcagcccagacatgtatagaggggcagttagagggagaacaggggtgggaaagggagcaaggggcagatagctcagcaaggaaagaatgggctcagaaaaaggagggctggctggaggagtgaggggcagcttaagtttggggagggtagaaacgccgtttccttgggaactggagtgcagtatgagctgggtgtcacttggctctgaacatactggctttgctgtaatgcttgaaaaggcgttggtatcttcattttacagttcattaacccaagtacgttttcttatttaaatgacaactttggtgctttaaaatgaggtaccactttttaaagctagctgtgtcgagttaaagaaaaaatcagcagttttttctcccagaaatgtaattgccaaacactattcatccccatcttaagttttacaaggtgatgtaatcagcttgttgtagtgatgctggccaaatggtgctcagcaggtgagaacaaaaaaaccccagatttcagtgaactaatacacagcttgagcgtttccatgtgctaatgttgcacacttactaaaaaactttggaaatggaaaataatgtattagtgcaacagttgatgtgcttctttgggcaaagatatagttttgttccacaatttgtacttaaaagcgaaagaacattgaaaacatagacttactggctgtagcaatgctggcctgttaactgataactagaacttaggttcacgtttatgtaaagtgtgtaaaacctagtagagcttgcatagtcggcactcagtaaatgtttggttccttttgccccttggtaagtttattttaccatcctcccacctgccattttgactttattaaatcaacatgtggaccagagtgttaatgagatgttattgcagaagagattgagaaaattggtatatcatgcagataacatacaaaatttttttgtaacgtaaaaaatgcagttttattattgcttgtgcctcaactgtttaagtgaatattaaagggcttggag

SEQ ID NO: 62454 - DNA, 921 bp, Homo Sapiens
tttgaagtgctaagggttttatacagcaaacaaaaagtcaatttgctttccaccagtgcgagagaggatgtatacttttcaagagagatgattgcctatttaccgttgacagagtcccgtagatgagcaatggggaactggttgccagggtctaaatttggattgatttatgcactgttatctgttttgacacagatttccttgtaaaatgtgcctagtttaccaaaattaacaaagggggggaaaggaccttagaactttttaaggtaaaatcaaatatagctacagcataagagaatcgagaaatttgatagaggtaacttgtttaatgtaaatctaatagtacttgtaatttctttctgcttagaatctaaagatgtgtttagaacctcttgtttaaaaataatagactgcttatcataaaatcacatctcacacatttgaggcagtggtcaaacaggtaaagcctatgatgtgtgtcattttaaagtgtcggaatttagcctctgaataccttctccattgggggaaagatattcttggaaccactcatgacatatcttagaaggtcattgacaatgtataaactaattgttggtttgatatttatgtaaatatcagtttaccatgctttaattttgcacattcgtactatagggagcctattggttctctattagtcttgtgggttttctgtttgaaaaggagtcatggcatctgtttacatttaccttatcaaacctagaatgtgtatatttataaatgtatgtcttcattgctaggtactaatttgcagatgtctttacatatttcaatacagaaactataacattcaatagtgtgctgtcaaagtgtgcttagctcacctggatatacctacattgttaaatgtctaaacagtaatcattaaaaccctcgtgc

SEQ ID NO: 62455 - DNA, 656 bp, Homo Sapiens
tccgcaagacagtctacctgcagtcggccctgagcagctctacttctgcagagaagttcccttcaccgcatccgtcgcctgccaaactgaaggctactgcaggtcactgagttgcctgccatccaaaggggatgggcgggattggaagaagctgtggcagctcttttccctgttcacctcccgcctgccagggaaggcaggacccgctctgccaagggccctctgcgtattcccttctctctgaggaattgaaatttttgtctctggtgcacgtaaggcagaatgttccctgacaccagtgtgtggatttttaacatcaccgtgagtctgaaaggaccacaggtttttctgcagctattttctagcatttgccagtccctgtgcctggactgattggaacactttgtttttctccctgtgccatttacccttccacctttccatcctgccttctaccacccttggatgaatggattttgtaattctagctgttgtattttgtgaatttgttaattttgttgtttttctgtgaaacacatacattggatatgggaggtaaaggagtgtcccagttgctcctggtcactccctttatagccattactgtcttgtttcttgtaactcaggttaggttttggtctctcttgccctcgtgc

SEQ ID NO: 62456 - DNA, 1938 bp, Homo Sapiens
gcacgagggaaaaagcgatgggccgaaagagctcataaagtggtggagataaaatcaaaagaagaggaaaggctcaaccaagagaaaaaggtctctgtttatttagaagacacagactaacaattttagatggaagctgagatgatttccaagaacaagaaccctagtatttcttgaagttaatggaaacttttctttggcttttccagttgtgacccgttttccaaccagttctgcagcatattagattctagacaagcaacacccctctggagccagcacagtgctcctccatatcaccagtcatacacagcctcattattaaggtcttatttaatttcagagtgtaaattttttcaagtgctcattaggttttataaacaagaagctacatttttgcccttaagatactacttacagtgttatgacttgtatacacatatattggtatcaaaagggataaaagccaatttgtctgttacatttcctttcacgtatttcttttagcagcacttctgctactaaagttaatgtgtttactctctttccttcccacattctcaattaaaaggtgagctaagcctcctcggtgtttctgattaacagtaaatcctaaattcaaactgttaaatgacatttttatttttatgtctctccttaactatgagacacatcttgttttactgaatttctttcaatattccaggtgatagatttttgttgttttgttaattaatccaagatttacaatagcacaacgctaaatcacacagtaactacaaaaggttacatagatatgaaaagattggcagaggccattgcaggatgaatcacttgtcacttttcttctgtgctgggaaaaataatcaacaatgtgggtctttcatgagcagtgacggatagtttagcttactatgtttcccccccaattcaatgatctataacaacagagcaaagtctatgctcatttgcagactggaatcattaaagtaatttaataaaaaaattgtgaaacagcatattacaagtttgaaaattcagggctggtgaaaaaatcaactctaaatgatgataattttgtacagttttatataaaactctgagaactagaagaaattattaacttttttcttttaattctaattcacttgtttattttgggggaggaagactttggtatggagcaaagaaataccaaaactactttaaatggaataaaaccaactttattctttttttcccccatactggtagataaagcaaactttataagtgggctattgaaagaaaagttacaagcttaagatacagaagcatttgttcaaaggatagaaagcatctaaaagtttaggctcaagatcaatctttacagattgatattttcagtttttaatcgactggactgcagatgttttttcttttaacaaactggaattttcaaacagattatctgtatttaaatgtatagaccttgatatttttccaatactattttttaaaaaattgtatgatttacatatgaacctcagttctgaaattcattacatatctgtctcattctgccttttatactgtctaaaaaagcaaagttttaaagtgcaattttaaaactgtaaattacatctgaaggctatatatcctttaatcacattttatattttttcttcacaattctaacctttgaaaatattataactggatatttcttcaaacagatgtcctggatgatggtccataagaataatgaagaagtagttaaaaatgtatggacagtttttccggcaaaatttgtagcttatgtcttggctaaatagtcaaggggtaatatgggcctgttgtttagtgtctccttcctaaagagcacttttgtattgtaatttattttttattatgctttaaacactatgtaaataaacctttagtaataaagcctcgtgc

SEQ ID NO: 62457 - DNA, 1124 bp, Homo Sapiens
gcacgaggcagaactgagcccaggccacagtaccctattcacgctctgtgcttgtgccaagggggcaatggcggcttcctgtgttctactgcacactgggcagaagatgcctctgattggtctgggtacctggaagagtgagcctggtcaggtaaaagcagctgttaagtatgcccttagcgtaggctaccgccacattgattgtgctgctatctacggcaatgagcctgagattggggaggccctgaaggaggacgtgggaccaggcaaggcggtgcctcgggaggagctgtttgtgacatccaagctgtggaacaccaagcaccaccccgaggatgtggagcctgccctccggaagactctggctgacctccagctggagtatctggacctgtacctgatgcactggccttatgcctttgagcggggagacaaccccttccccaagaatgctgatgggactatatgctacgactccacccactacaaggagacttggaaggctctggaggcactggtggctaaggggctggtgcaggcgctgggcctgtccaacttcaacagtcggcagattgatgacatactcagtgtggcctccgtgcgtccagctgtcttgcaggtggaatgccacccatacttggctcaaaatgagctaattgcccactgccaagcacgtggcctggaggtaactgcttatagccctttgggctcctctgatcgtgcatggcgtgatcctgatgagcctgtcctgctggaggaaccagtagtcctggcattggctgaaaagtatggccgatctccagctcagatcttgctcaggtggcaggtccagcggaaagtgatctgcatccccaaaagtatcactccttctcgaatccttcagaacatcaaggtgtttgacttcacctttagcccagaagagatgaagcagctaaatgccctgaacaaaaattggagatatattgtgcctatgcttacggtggatgggaagagagtcccaagggatgcagggcatcctctgtacccctttaatgacccgtactgagaccacagcttcttggcctcccttccagctctgcagctaatgaggtcctgccacaacggaaagagggagttaataaagc

SEQ ID NO: 62458 - DNA, 1307 bp, Homo Sapiens
  misc_feature (503)..(520): n is a, c, g, or t
  misc_feature (914)..(946): n is a, c, g, or t
  misc_feature (1050)..(1087): n is a, c, g, or t
gcacgagggaatagctcagcctgaacagtgtgatggtcccagctactacatcagatgcggtttttttgctcccttatgttcttcggatatggttatggcatttgtaggcttggaggtaaagaactgaagataactggtgctggatagaggagccttattttttattatggcagcttgctatttttataacatggtgattgagttgaacacaatcaaagtacagtagtaactgatgtccccttcttcctggatgaatgagcagataaatattgatgtcagcatccttgaaccatatcaaagtgagcagtgtttggctactgcttctatttgaaatggtgctgtgttttggttgtggtctgaagctttgaagcgctacttagcatctcctttcttccatggagctctcacgattcaaacatgacagatttggtaaaatgctggttaggttgagtcttccttgcccccactcagtcatctttgtatgaatcccatgatttgggggnnnnnnnnnnnnnnnnnnataccagtttttagctggtgtttatgaagaacagtgagtacctagaactgtgccactaattaaaggaaatcctaagaaggtgcatttctttacagagctgtgtcatgccatcctttgggccctctgctggaaaagtagaatcaagtctcaaataatgcctttttaattgtatcctctagtattatagatataggacagtactgtatcatacctctgtgaatgtaaaatatcttgtacctgctttatgatacgtagtagtgaccgtgctttatcagagctgtttttaatgatgttattctagaatgttttctttcccgatgatgattccgaagctaattttaaaaaacggtgccaggtaccacaaccgtaacagaactttgcaattttctggggnnnnnnnnnnnnnnnnnnnnnnnnnnnnnnnnnaaatggagtgtgctggatgtctctataattttattcagatgactgcagaacctggaaaagctgttgctgctattgatgcataacatactgctattggtcttttnnnnnnnnnnnnnnnnnnnnnnnnnnnnnnnnnnnnnnatttgaatttttggaaactttagctgtgctgtcaactttggaaaaagtatcccggtttactgtgttgagttggccttgtccagaaattaacacccctattggtctagaaacgttaaacttaatttttttccctttgtccaggggtaaccccctgtattaaatatgtaaggttttttttccctgggtttgattacagaaattaataaagttttttttaaat

SEQ ID NO: 62459 - DNA, 795 bp, Homo Sapiens
ggggtggggtagggggctcacaacagaactggccagttgacattgcctgaaagcaccccctttaagggccagttgtggggtggtaagcacagttatgaaaatttttatttagcctccgttttgaatggttttaagaaattttgtatatggaggatggaaaagctttatatatttatgaaaatccttttatttgaaattaaaattatttggtatataattgtttgatatttggggagggttttggaggggagataatgtcactgataaattaaaagcctgttgattttgcagaaaggtactgttagtgactgataaggatgcctttgttttgtacatgaaccaaatctttgttttacatttcttttatccaaaatatttaggcatttgacattttcaaccagaatttcaattatatactgtgatttttatttgttgcaatacattacaatttcagaggtactttggggctcaaaagctaggatttttaagtcagtatgtgcatttcacccgataaagctgttaatggtgagcaaagtattatatactaactagatttttccccatctgtatagtatattatatgtattttgtggtattgagagtatagaaagtttagagtgtcaaacatgcgtttaatgtgtatttttaaacaaatttatggcaattaaaatatttggagacaagggtatcacatttcaatttgtaaagatttttttaactttactgtgtcattaagatgctttgtacaatgccaaaccatagttggggaaaataagtttaataaatatcaaatag

SEQ ID NO: 62460 - DNA, 1626 bp, Homo Sapiens
  misc_feature (293)..(328): n is a, c, g, or t
  misc_feature (372)..(381): n is a, c, g, or t
  misc_feature (783)..(838): n is a, c, g, or t
  misc_feature (891)..(917): n is a, c, g, or t
gcacgaggacagtttccagtgttactcaggtagaagttgatgaaaacgcttacagatgtggctctggcatgcagatggcagaggacagcaagagcttaaagacacaccagacacagcccggcatccgaagagcgagggacaaagccctttctggtggcaaacggaaagagactttggtgtagagaaggctctgtgtgttaactgatgggagagactgtttgtttataaatgtgtacagttttgttttctcgtaaggggagcatcatagggttactttataccagttgtaacannnnnnnnnnnnnnnnnnnnnnnnnnnnnnnnnnnnaatggcagctaaagatatacagattactgttaaattgcagtccnnnnnnnnnnaaagatattttcttgagttatttagaacatggtaagcctggtattttttaatcaaacaaaatatttatgaaatgggttttctcttaattctggattcatcatggctttctaataccaattgtaatatttacaatattcaccaaaacttagaattttgcaaatgctggaattctgccagtgtttctttgctaagccttgcatgcaaaatttgaaattttaacattggcacccaaaacctacatggaatgtatgtctggagtatttcaaactttacattgaaacataatttccttggaaaacaaaccataagcctgaggaggtttttatcaactggaatgctttatattagtttgtttttcactgtacattcctcattttacattcatttaacctgccgattannnnnnnnnnnnnnnnnnnnnnnnnnnnnnnnnnnnnnnnnnnnnnnnnnnnnnnnatgccttttcaaattggcatgtctttaaagtatttttcttcctgattaaaaannnnnnnnnnnnnnnnnnnnnnnnnnnatatatatatatttttttaaatcacattaattttaccaagtgaaaccaagccatactgtttttgagccaattaagaaaattgccatttttaaagtgtagcatttcagggtaaagacccatgaaatggcttgatgtattctagactactgaaagaaaaccacttcaaagattttgttgaaagttttagtgttgtctgaaatgcaagagggaaggtgattggtagtgagttaaaagaaaaagagaggaaaagagagtagttttgtcttcaagtaaaatgtctggttgtgccagacatttcacaagtgtgaaaggagataggagaagctcaacttgagggcgtgtagtaagttgtagaaggctcgaggggacgtggacttatttgccttggtttgcaatacctgcaaataatgagtttgaaaagaaacaatgaaatgtgttaaaaatttgaccatattagataaattttggtggatttagtcataagatggaaaaagactggtgaatcttttattacaaaatgtttctgttaaaatgggatcatcatctttgaaaggggggaggaggagtaaaagcccgattataatggtgatcaattcaagtcagtgttgactattctgtgaaatatatttggccagtggaaatgataatcagaaaagactgtaaatagatccatccaaatgatttctctgtacaaatgaatgatactatt

SEQ ID NO: 62461 - DNA, 761 bp, Homo Sapiens
  misc_feature (142)..(150): n is a, c, g, or t
attgtaaagcatcttggtacagtgtacagtgccttggaaatgataggtatggaataaatggtaattatttttatattatatatattatgtattcctgttattaagtgtagagttttatgagtataatttgattttattaccnnnnnnnnnacaagctgttttctcagtatttttcttggatgggatgaggctaggctggaaagtttttttcatcactaggattttataaaacaattttttttatgaacctttacttacttgactggattggactaaaagcactgatcagaggccagaacataaaaattcagtccctttgtccttccccgtccctcccaaagttactttaagatccttagaatatttctttaaatattttatagacaaaaaatttaaagattatctgtattgcaaaattaaactatttctttaatgaatatattgcttattttaagttccaaaggtgaagtctttaagaataaaacattaccaactcctgcttttatatgtaagcaaacttgattgtggcctttttcaactcatcttccttctaaggttttctgttagcctctaagtagactcagtgaaggctaagggactgctatatgatgaacagtattttgatgcatacatttaatacatacttcttcagaactttttcactgttatgattttattgccattttgcttttttagatgtgtgcagcagactaaaacattaatgagataattgatttttgtcccataaccggacgcgtggg

SEQ ID NO: 62462 - DNA, 860 bp, Homo Sapiens
  misc_feature (629)..(645): n is a, c, g, or t
  misc_feature (772)..(783): n is a, c, g, or t
ttcatgaaaagcaagccgggggccgccatggtggagatggctgatggctacgctgtagaccgggccattacccacctcaacaacaacttcatgtttgggcagaagctgaatgtctgtgtctccaagcagccagccatcatgcctggtcagtcatacgggttggaagacgggtcttgcagttacaaagacttcagtgaatcccggaacaatcggttctccaccccagagcaggcagccaagaaccgcatccagcaccccagcaacgtgctgcacttcttcaacgccccgctggaggtgaccgaggagaacttctttgagatctgcgatgagctgggagtgaagcggccatcttctgtgaaagtattctcaggcaaaagtgagcgcagctcctctggactgctggagtgggaatccaagagcgatgccctggagactctgggcttcctgaaccattaccagatgaaaaacccaaatggtccatacccttacactctgaagttgtgtttctccactgctcagcacgcctcctaattaggtgcctaggaagagtcccatctgagcaggaagacatttctctttcctttatgccattttttgtttttgttatttgcaaaagatcttgtattccnnnnnnnnnnnnnnnnnaaatgctaggtttgtagaggcttacttaaccttaatggaaacgctggaaatctgcagggggagggagaggggaactgttatctcccaagattaaccttcacttttaaaaaattattgtacatgtgannnnnnnnnnnncctgttcatacatttgtgctgcccatgtactcttggcacatttcaataaaattgtttggaaaataaacacaaaaaaa

SEQ ID NO: 62463 - DNA, 810 bp, Homo Sapiens
  misc_feature (488)..(641): n is a, c, g, or t
cagcccccagcacccaggtggactgcagcgcagtgggtgggccagtggccagccagggagaagccccccgtcagcaggctggggtctgcccaccagggcctcccccacgtctgcctttgagggtgcctgccatgccctgggggatcctggcatctttactggactggaagcaggagacagaacagtgtctgtcccggggtgacttcatcaggagaccgcccacatagagctggaccccgcagctgaagcggaaatgtgagacaggctggcacctccggaaaaactgcctttcagccttggtgttccgtgcaaggtgaaaagaaataggtcctcccagtttacagcttgaaatcaggctagtgagtggccctggagaccacgaggggagaatttaaaggccccggctggcagggtttaggtggctggcagaggcacatgcagaccctgcctggagcctgccctaggacgctgggcgggtcagtctccgnnnnnnnnnnnnnnnnnnnnnnnnnnnnnnnnnnnnnnnnnnnnnnnnnnnnnnnnnnnnnnnnnnnnnnnnnnnnnnnnnnnnnnnnnnnnnnnnnnnnnnnnnnnnnnnnnnnnnnnnnnnnnnnnnnnnnnnnnnnnnnnnnnnnnnnnnntgccccagaggaacacacccacaccaggcctcaggattttgtgttgatcaagttccaaggaaaaggaacatttcagccgggcgtggtggttcacgcctggaatcccagcacttgaggccaggagttccagagcagcctgggcaacgcagtgagagaccccatctctatt

SEQ ID NO: 62464 - DNA, 1104 bp, Homo Sapiens
  misc_feature (197)..(245): n is a, c, g, or t
  misc_feature (636)..(857): n is a, c, g, or t
  misc_feature (869)..(887): n is a, c, g, or t
gcacgagggggggaatatttgagcttaaggaaaatgacagaatttttgtttctgtaacaaatgagcacttgatagacatggaccatgaagccagtttttttggggcctttttagttggctaactgacctggaaagaaaaagcaataacctcaaagtgactattcagttttcaggatgatacactatgaagatgtttnnnnnnnnnnnnnnnnnnnnnnnnnnnnnnnnnnnnnnnnnnnnnnnnnctctatgcaatctgagtagagcagccacaaccaaaaaattctacaacacacactgttctgaaagtgactcacttatcccaagagaatgaaattgctgaaagatctttcaggactctacctcatatcagtttgctagcagaaatctagaagactgtcagcttccaaacattaatgcaatggttaacatcttctgtctttataatctactccttgtaaagactgtagaagaaagagcaacaatccatctctcaagtagtgtatcacagtagtagcctccaggtttccttaagggacaacatccttaagtcaaaagagagaagaggcacccctaaaagatcgcagtttgcctggtgcagtggctcacacctgtaatcccaacattttgggaacnnnnnnnnnnnnnnnnnnnnnnnnnnnnnnnnnnnnnnnnnnnnnnnnnnnnnnnnnnnnnnnnnnnnnnnnnnnnnnnnnnnnnnnnnnnnnnnnnnnnnnnnnnnnnnnnnnnnnnnnnnnnnnnnnnnnnnnnnnnnnnnnnnnnnnnnnnnnnnnnnnnnnnnnnnnnnnnnnnnnnnnnnnnnnnnnnnnnnnnnnnnnnnnnnnnnnnnnnnnnnngacttggtttcnnnnnnnnnnnnnnnnnnncttcagtaagtacgtgttatttttttcaataaaattctattacagtatgtcatgtttgctgtagtgctcatatttattgttgtttttgttttagtactcacttgtttcataatatcaagattactaaaaatgggggaaaagacttttaatctttttttcataatatctttgacacatattacagaagaaataaatttcttacttttaatttaatatg

SEQ ID NO: 62465 - DNA, 626 bp, Homo Sapiens
gattctttacaataggatttatgtaaaactttactaagctaaactgctctctgattattcaagagcaaagtattaaaaatttctcaaacttacttgacaacaaaacccattctttcagttacatctactaagagctcgtagttcaataacattccaaagaacgtagtttggaaaacactggcctatcggctgtaataggaagggtctaaagaaaattatttgctgagtcctcataatcaattggctataatcacaatttaataatttatcaatgcaaacagtacattaaaaactgtagcacaatctataatttttaccttcatatgcagagaaattaagaatttacatcttttacaaatatgtatatctctgaaataatgaaatatattgatgggtgaaataatatttctggtattttcttcattataacacgtggaatggaacagtggctagaggtatggatggagcaaggtcaaatatgagctgatggagctgggagctaaataagggtataatatgctacttctgtgtatgttgtgtatggtatagtatgctatttctgtgtatgttcaaattgtttatgtatataataaagttttaaaaatttgtaacaaaaaacctcgtgc

SEQ ID NO: 62466 - DNA, 818 bp, Homo Sapiens
tggaaatcaagaaaattgagatgaatactttactttcatcactgactgcaaagaccccaaggcctgcaccattctcctccggggggctagcaaagagattttctcggaagtagaacgcaaccttcaggatgccatgcaagtgtgtcgcaatgtttcctggaccctcagctggtgccagggggtggggcctccgagatggctgtggcccatgccttgacagaaaaatccaaggccatgactggtgtggaacaatggccatacagggctgttgcccaggccctagaggtcattccttgtaccctgatccagaactgtggggccagcaccatccgtttacttacctcccttcgggccaagcacacccaggagaactgtgagacctggggtgtaaatggtgagacgggtactttggtggacatgaaggaactgggcatatgggagccattggctgtgaagctgcagacttataagacagcagtggagacggcagttttgctactgcgaattgatgacatcgtttcaggccacaaaaagaaaggcgatgaccagagccggcaaggcggggctcctgatgctggccaggagtgagtgctaggcaaggctacttcaatgcacagaaccagcagagtttccccttttcctgagccagagtgccaggaacactgtggacgtctttgttcagaagggatcaggttggggggcagcccccagtccctttctgtcccagctcagttttccaaaagacactgacatgtaatttttctctattgtaaggtttccatttagtttgcttccgatgattaaatttaagtcatttg

SEQ ID NO: 62467 - DNA, 814 bp, Homo Sapiens
cccggagatgtccagggtttggtgagcgggaaggcttgcattcggtatgcagggaggcagacagaaagcattaaaatgcgtgagctcagggctagcaagaacagatcactggcagattttgaaaaggctctgacagattaccgggcagagctccgggatgacccaatcatcagcacacacttggccaagttgtatgataacttactagaacagaatctgatccgagtcattgagcctttttccagagtacagattgaacacatatctagtctcatcaaactctccaaggccgacgtggaaaggaaattatcacagatgattcttgacaagaaatttcatgggattttggaccagggggagggtgtcctgattattttcgatgaacccccagtagataaaacttacgaagctgctctggaaacaattcagaacatgagcaaagtagtggattccctctacaacaaagccaagaaactgacataggtgagtgctggcttcaggaccccagggctgggcagctctgtcttttgcgtgtcgagactgaaaacctcctcctggtgtcctcatggcttcctgattgacactgctctgtcttctcttgcagagttggatctgtagcggtcctttggagagtgtgtgtggcgggagagtgaaaccttgggggaaaatgctaggagattcttttttctttttgttctacttttcgctcggaaagtttttaaatcctcatttggtgcatctgtattccagccaataggtgtgccagttttcatgtaatctttactggcccaacttgggagtggggaaattgctt

SEQ ID NO: 62468 - DNA, 1636 bp, Homo Sapiens
  misc_feature (194)..(218): n is a, c, g, or t
gcacgaggtattgaaattgcttaatttgcacaccctgtacacacagaaaatggtataaaatatgagaacgaagtttaaaattgtgactctgattcattatagcagaactttaaatttcccagctttttgaagatttaagctacgctattagtacttccctttgtctgtgccataagtgcttgaaaacgttaagnnnnnnnnnnnnnnnnnnnnnnnnnaatatcaaaagagtcggtgtgaaccttggttggaccccaagttcacaagatttttaaggtgatgagagcctgcagacattctgcctagatttactagcgtgtgccttttgcctgcttctctttgatttcacagaatattcattcagaagtcgcgtttctgtagtgtggtggattcccactgggctctggtccttcccttggatcccgtcagtggtgctgctcagcggcttgcacgtagacttgctaggaagaaatgcagagccagcctgtgctgcccactttcagagttgaactctttaagcccttgtgagtgggcttcaccagctactgcagaggcattttgcatttgtctgtgtcaagaagttcaccttctcaagccagtgaaatacagacttaattcgtcatgactgaacgaatttgtttatttcccattaggtttagtggagctacacattaatatgtatcgccttagagcaagagctgtgttccaggaaccagatcacgatttttagccatggaacaatatatcccatgggagaagacctttcagtgtgaactgttctattttttgtgttataatttaaacttcgatttcctcatagtccctttaagttgacatttctgcttactgctactggatttttgctgcagaaatatatcagtggcccacattaaacataccagttggatcatgataagcaaaatgaaagaaataatgattaagggaaaattaagtgactgtgttacactgcttctcccatgccagagaataaactctttcaagcatcatctttgaagagtcgtgtggtgtgaattggtttgtgtacattagaatgtatgcacacatccatggacactcaggatatagttggcctaataatcggggcatgggtaaaacttatgaaaatttcctcatgctgaattgtaattttctcttacctgtaaagtaaaatttagatcaattccatgtctttgttaagtacagggatttaatatattttgaatataatgggtatgttctaaatttgaactttgagaggcaatactgttggaattatgtggattctaactcattttaacaaggtagcctgacctgcataagatcacttgaatgttaggtttcatagaactatactaatcttctcacaaaaggtctataaaatacagtcgttgaaaaaaattttgtatcaaaatgtttggaaaattagaagcttctccttaacctgtattgatactgacttgaattattttctaaaattaagagccgtatacctacctgtaagtcttttcacatatcatttaaacttttgtttgtattattactgatttacagcttagttattaatttttctttataagaatgccgtcgatgtgcatgcttttatgtttttcagaaaagggtgtgtttggatgaaagt

SEQ ID NO: 62469 - DNA, 544 bp, Homo Sapiens
cccaaggacgatggtgagaggaggtggggccaggccccctgccccgctccaatcggtaccatcccctccctggttcccagtctggccggggtccccggcccccctgtgccctgttccccacctacctcagctgggtcaggcacagggaggggagggatcagccaaattgggcggccacccccgcctccaccactttccaccatcagctgccaaactggtccctttgtctccctggggccttgggttttgtttgggggtcatgaccttcctagtttcctgacgcagggaatacaggggagagggttgtccttccccccagcaaatgcaataatgccctcacccctcctgagaggagccccctccctgtggagcctgttacctccgcatttgacacgagtttgctgtgaaccccgcaacctcctccccacctcccatttttccttccaggcccatccctggcccagagcaggagggagggagggacgatggcggtgggtttttgtatttgaatttgctgttttgaacataaagaatttatttgctg

SEQ ID NO: 62470 - DNA, 679 bp, Homo Sapiens
gcacgaggaacagccctgcaaggggcttggctctgccacagggcaggagaggaagttgtagcgcctagcgagagttccagccccagacgcccacctgtgcctcagggcaccgcctgccgagcagagaaggcacagcagccgtcagagtccatgagaggtgaaaccacacagcagggatgtccaatatcagaactattaatatcaataaaagtataaccttcccaggtctatgcccaagagaattgaaaacatccatccacacaatacctgtgctcccgcgttcatagcagcattactcaaaagtcaaacggtagcaacaacccaaatgtccatccacagatgaattaagacatgaagtgtgttctgtccatacaatggaatattatttggccataaaaaggaaggaaattttgacgcatgccacagcctgagtgaatcctacaaatattacgctaagtgaaagaagccaatcacgagtttatgtgaaatgtccagaataggcaaatctgtgtatcagagacaaagcacattggtggttgccaggtactggaggaagagagaagaggcatgacagctaacagggacgggctttctttggaagatgatgaaattgtggaatgatggttgcacaactttgtgaatatactagaaaccaatgaattaaaaactttggaagatg

SEQ ID NO: 62471 - DNA, 394 bp, Homo Sapiens
  misc_feature (176)..(226): n is a, c, g, or t
  misc_feature (330)..(339): n is a, c, g, or t
gcacgaggcagaactctctgggtggtagtgctaagatgctcatgtttgtgaacatttctccactggaagagaacgtctccgagtccctcaactctctacgctttgcctccaaggtgaaccagtgtgttattggtactgctcaggccaacaggaagtgaagacggatccagatctcnnnnnnnnnnnnnnnnnnnnnnnnnnnnnnnnnnnnnnnnnnnnnnnnnnnccctatgtctatgtatcgggtgaggggtgggagggttgctggagggtgctttattgggtggagggcaccatgtcccagggctatcaaataaagaatagtttggnnnnnnnnnnaaataaaggttttattagcatttgcccaagaaggcagatactttcatcctcgtgc

SEQ ID NO: 62472 - DNA, 1175 bp, Homo Sapiens
ggaaatgggaagagcaacagtaactccaaagtgtcagaaaatagttaacattcaaaaaacttgttttcacatggaccaaaagatgtgccatataaaaatacaaagcctcttgtcatcaacagccgtgaccactttagaatgaaccagttcattgcatgctgaagggacattgttggtcaagaaaccagtttttggcatagcgctatttgtagttacttttgctttctctgagagactgcagataataagatgtaaacattaacacctcgtgaatacaatttaacttccatttagctatagctttactcagcatgactgtagataaggatagcagcaaacaatcattggagcttaatgaacatttttaaaaataattaccaaggcctcccttttacttgtgagttttgaaattgttctttttattttcagggataccgtttaatttaattatatgatttgtctgcactcagtttattccctactcaaatctcagccccatgttgttctttgttattgtcagaacctggtgagttgttttgaacagaactgttttttccccttcctgtaagacgatgtgactgcacaagagcactgcagtgtttttcataataaacttgtgaactaagaactgagaaggtcaaattttaattgtatcaatgggcaagactggtgctgtttattaaaaaagttaaatcaattgagtaaattttagaatttgtagacttgtaggtaaaataaaaatcaagggcactacataacctttttggtaactccttgacatttttcagattaacttcaggatttatttgtatttcacatattacaatttgtcccattgttggtgtgcactttgtgggtttttcctgcatattaacttgtttgtaagaaaggaaatttgtgctgcttcagtaagacttaattgtaaaaccatataacttgagatttaagtctttgggttttgttttaataaaacagcatgttttcaggtagagcttaaactaaatgatgtgtttacttagtgcagtttctggttatgaatattatattgctatgtgtatattatatggactctttaaaatgattgacagattggcaaatttttaaatctttgtacattgttgagtcatatgtttttagagttaaatttgtttcagataagaaagtgttaaagcctt

SEQ ID NO: 62473 - DNA, 1127 bp, Homo Sapiens
gcacgaggccgcgactgagcttgggtccgactggagctcaggctcgcgacccagactggtgggccaggcctccaagccggccttacacccaatccaaggaggacagaccggacacagagggacggagcgagcaaggagacatggcttcatcattcctgcccgcgggggccatcaccggcgacagcggtggagagctgagctcaggggacgactccggggaggtggagttcccccatagccctgagatcgaggagaccagttgcctggccgagctgtttgagaaggctgccgcgcacctgcaaggcctgattcaggtggccagcagggagcagctcttgtacctgtatgccaggtacaaacaggtcaaagttggaaattgtaatactcctaaaccaagcttctttgattttgaaggaaagcaaaaatgggaagcttggaaagcacttggtgattcaagccccagccaagcaatgcaggaatatatcgcagtagttaaaaaactagatccaggttggaatcctcagataccagagaagaaaggaaaagaagcaaatacaggttttggtgggccagttattagttctctatatcatgaagaaaccatcagggaagaagacaaaaatatatttgattactgcagggaaaacaacattgaccatataaccaaagccatcaaatcgaaaaatgtggatgtgaatgtgaaagatgaagagggtagggctctacttcactgggcctgtgatcgaggacataaggaactagtcacagtgttgctgcaacatagagctgacattaactgtcaggacaatgaaggccaaacagctctacattatgcctctgcctgtgagtttctggatattgtagagctgctgctccagtctggtgctgaccccactttccgagaccaggatggctgcctgccagaggaggtgacaggctgcaaaacagtttctttggtgctgcagcggcacacaactggcaaggcttaatcaaaagactggaaaactgcagtctgtaatagcataaggcttccattatgaaagaaaactacaaaaataatacttcttttccacccgtctttggtatgtattggctaataaaatcagttctgtggaactgggattttg

SEQ ID NO: 62474 - DNA, 854 bp, Homo Sapiens
  misc_feature (812)..(823): n is a, c, g, or t
atctatgatccagattttacattttttcattgggttaaaggaaaacaatattgaggaatgtgatttggaaatgtactttccgttgacaaagaaatttaggtgaaataagagtcatgatctgaaacctaatggtggcaatattcttgtaacagaagaaaataaagaggaatacatcagaatggtagctgagtggaggttgtctcgaggtgttgaagaacagacacaagctttctttgaaggctttaatgaaatttttccccagcaatatttgcaatactttgatgcaaaggaattagaggtccttttatgtggaatgcaagagattgatttgaatgactggcaaagacatgccatctaccgtcattatgcaaggaccagcaaacaaatcatgtggttttggcagtttgttaaagaaattgataatgagaagagaatgagacttctgcagtttgttactggaacctgccgattgccagtaggaggatttgctgatctcatggggagcaatggaccacagaaattttgcattgaaaaagttgggaaagaaaattggctacccagaagtcatacctgttttaatcgcctggacctgccaccatacaagagctatgagcaactgaaggaaaagctgttgtttgccatagaagaaacagaaggatttggacaagagtaacttctgagaacttgcaccatgaatgggcaagaacttatttgcaatgtttgtccttctctgcctgttgcacatcttgtaaaattggacaatggctctttagagagttatctgagtgtaagtaaattaatgttctcatttnnnnnnnnnnnncctcgtgccgaattcctgcagcccggggttt

SEQ ID NO: 62475 - DNA, 1136 bp, Homo Sapiens
ccacgcgtccgcggacgcgtgggttcacgctgacattctttggtcaaggatacagccaaggcactggtacagataagaacaaaccaaatatcaaaatttgtactcaggtgaaaggaccagaggctggctatgtggctacccccatagctatggttcaggcagccatgactcttctaagtgatgcttctcatctgcctaaggcgggcggggtcttcacacctggagcagctttttccaaaacaaagttgattgacagactcaacaaacacggtattgagtttagtgttattagcagctctgaagtctaaacactggaagaattaactgaagtcataacgtgcgtgaattaacagcttctctatttgatatttgaaattcttctgtaagcctgtctgagtgtatgtggaaacgattgtcaaatctaaaatatctatatattaaaaagtaggaaattgtcctagcttaccctaaatttcaaatctgagttgattttgtgattttattgcttataacagagaactcatatttgacatatttttttcattgatgtgttcctggtagattttcacgaatgagctggcaggtctaatgggggaggcggcgtcccagtctgtgttgcagcagcattctcatcgggggtgcgcacaccatcgttactgtcgggcagtaactgccgcttgccttgccgcagtaggagggaaatctcaccttccttccacatactgtcttgagcctttgctaaattaaactgcactttttgctgtttttgcctagtttttcgccaatctacactgattttggactgttacctaagttgaaaaataaaaggttgtcaatcgaatggtggtttaatgtttggacctgccgatgtatttgtatagtggtagaaacatgctgcttaagtggcctaacctgtttcttgccaataagtaggcttatcattttatctttacgtaattctatatctgtgactaggtttttaaggatacagcttataagttgctatcaattttcactacctaagcagaatttttctctaatttactttttgtattttaactaggttttacatggaagccctaaaataaggcaaaagactttttcttttgtaataagcatataataaaccctcgtgc

SEQ ID NO: 62476 - DNA, 748 bp, Homo Sapiens
cctcagagttaaaattatttccctcatactaatgcttaatggcaatgattactccagagttttttaatttttacactgggggcaatagactaggaggtctctgatttcttcttggtctaaagtgttttgattttatttctacataatagctttggtattcatgtatatacatgcatttaattgtgattttatcacctttcccatttctttccccacaagctggcatttcagtagttgcttttgaataatggttttggttacctgggaaggcaggcccagaacccatttccttgacttgcagttccgggctgtgttcacatgactgctgtctagctgatgcatttttcacatttgtcaactctggttagaaacaggtcctcaggagtattctctaacctgatattttctaaaaagatatgttgattcaactttgtttagcatcctactttctagattgtggggctcattttgccagggccaagctaccagaaaagtagaagtggagattacctggtatgtatctctctgggtgccccagttagagctgccacagctcaggaaaaagatgaggcataacgaccttgaatgtaattggagtaagtgacaaaataagaactaccctgggaaaccctgcattcaatgtagctgtcaattcagtatttttaagtacacctgtcagctgtttcttaccacttcgatggttgtgattaatttaaaatcaaaataaaggaattactgagcctcgtgc

SEQ ID NO: 62477 - DNA, 868 bp, Homo Sapiens
gctgcattggtgggacaaatgtgcttccagattggacaagccaaaaatacgtatggaacaggatgtttcttactatgtaatacaggccataagtgtgtattttctgatcatggccttctcaccacagtggcttacaaacttggcagagacaaaccagtatattatgctttggaaggttctgtagctatagctggtgctgttattcgctggctaagagacaatcttggaattataaagacctcagaagaaattgaaaaacttgctaaagaagtaggtacttcttatggctgctacttcgtcccagcattttcggggttatatgcaccttattgggagcccagcgcaagagggataatctgtggactcactcagttcaccaataaatgccatattgcttttgctgcattagaagctgtttgtttccaaactcgagagattttggatgccatgaatcgagactgtggaattccactcagtcatttgcaggtagatggaggaatgaccagcaacaaaattcttatgcagctacaagcagacattctgtatataccagtagtgaagccctcaatgcccgaaaccactgcactgggtgcggctatggcggcaggggctgcagaaggagtcggcgtatggagtctcgaacccgaggatttgtctgccgtcacgatggagcggtttgaacctcagattaatgcggagggtacatttaaagaatgaaatgttcagtgatatactgtgaaaacgaccttagtgcacgggagttttgtttttctgtttagttaaaagttaaggaaccaagtaaaatagtaaatgttatcattgcagattcggctgccaagcatattgggctttactgaataaatgtgaa

SEQ ID NO: 62478 - DNA, 432 bp, Homo Sapiens
  misc_feature (118)..(127): n is a, c, g, or t
aggacgagcgcctggagcgcggcctggaacagcggcaccacaagctaagccggcagttgagccggcgggagcgctgcgtgctgagctgaggccgccggcccgggtggcccataaattnnnnnnnnnnccggcgtccgccgccgccccgggcctgcgctgcggacgacccggccgtcccggaggccgcgcgcgtgtccgctaggggccgccggcgcccttccccgtatagggcagggcggatccccgaccccacgggcggggcggccgccgtatttatttgtcaccgagggtgtgtgcgcgctcgcggcgggtgcggggtcctccccgacggcacggccgggccggcggcctcggggagagggatgcctgggcactaccgccccgcgctggcttgccctcctgttctccagagcaataaagttggacgagact

SEQ ID NO: 62479 - DNA, 1592 bp, Homo Sapiens
gcacgaggggtcctcggtttctgcatgtgttagcattgcattgataactcagaatcttgataaacacttaatatttgggcctgaagcattaaactttctttttattgtatatacttaaaaaatagaactcactgccctatcatacattgtagccctcttattctttggtctttcatatgcattagttaaatcccttaaagtagacattcataaaaacttacattgtttattggagtataaaatattacccaagtttcttcatgagttgacatgagctgttttaaatactggtgtattttcagaacagtaaaattactgaatatcagaaaaaatgttaattgatgatgaagcttattcccaaaatgccttttgtgcatatgatacttggaaagtcactaatgtgcctcagttaatacatcagtaaaatgttgtgtttcttttccagtgtagtgtttttggaatataaattccccatgctagtatagtatctcagcaaagagaatttccccccaggaggctcagtaaaggaataccgtgtcttacccatcgttatgatggaaggctgctttgaaaatggctgttttaccttataaggttaaaattttgatccatatgttaagtgatagaagattttggtgcaacagtagtaggatatatttctcctagaacatcccttattggcttacatgattttattgccttttaatagatatttgtcattttggccaaacaaaagacactgagtagttacacttaagttaaaaatgaggggaaaatcattattttaggtgtggagccatttttattataaactttctcaaaataaaaaaacattgaatcatttcaattttgcagtccctgtattagtatatgaatacatacttgcatttgaattaataacatgaaaagagtatactgtgtttttaaatccgtgtttctttgaatttaaagggtgtacaggtctttctgtagggaaaattattccatgtaaacatttcaactctgtatgaaaatgttaaatattgtaagaaagttatcctctcattttttcactgctatgatatatttattataaaatagggaatgaatgaatgaatatggattgctgttaactagaaacacttctgtatgtcagtcagcatttaatgaccacctactgtgtgcacagcactactggtaaaattttgaagacattgttaacattaaaaaatattttaaagttgtctacaaatctgagccttgtaatgatgtatatttaagttatttttgtttttatagattaaagtaagattaaaatatactatccagttttattactaaaaaagactggttttaattttaccaatgtgtgaactataaaagctttttgcctacagattttacattttaaaattatctatggctgttttaaattgtctagcaatttatatggttgtggttaactcatttaagaaacaattatctttctatattaagccattttcaaatagcaagacagtgcttgtctttttttgttattacactaactgcaattcagtaagctgcatgacaaaatatgtattatgtaaataaactgggtttactcctcgtgc

SEQ ID NO: 62480 - DNA, 892 bp, Homo Sapiens
acgactgagttcgcggagatagcatcatccctgatcaaaggatgtaattctaattaactgtgattgccaaacatttcactctgctgtgccgtctcttcataaagcttcactggggatcatcgtcttcattaaggtttcaacagggaaattcttcacggcgcccttttatgtggcagaaatcagctggggcttgtttagcttccagcacactctcagtcatagcatgtgtagctaaaggaagtaatgggaaggggttcatgttctctttataatgcagtggcaaaaggttctgaaagccttttaaactcgaaccagtgggggaaagatggatcttgaagctaatcctgcagagagttttatagaggccagggattgccttctaaattatgataaaacagaagtgaagagtttcagagcatcagattgagtgaaaagttgtcagattctgtattttttaacaatcttcaataatgtaaagattacttttaaaatatttaagttaaaactacttgaatagtattttgctgaagagcaagatatgcattaatcaccggttttatactgtccaaaatgaagcatccccgtgacaaaccagagtgggcagaagcatcgagagcgtgacaggaaatcccaagactgcttccgcctcagaggcgtcccggctgcgattcgctgccctgttgtcagtgaggcctggctgtcaccgcacaccgcgtccgtgtctccagggggttcctttcttctcacacgtcgcgtgtacccatagcactcttgtgtttctgtttttcccagtatgcatgtttaaaatagaagtgacaagaatcacatccggttgtgtcctgtgggagggtcagaggcagaatctacttacagtggtgtaattacctcgtgc

SEQ ID NO: 62481 - DNA, 944 bp, Homo Sapiens
gcacgaggtggagatattgcaaatcagttagctactgatgctgtgcagatacttggaggcaatggatttaatacagaatatcctgtagaaaaactaatgagggatgccaaaatctatcagatttatgaaggtacttcacaaattcaaagacttattgtagcccgtgaacacattgacaagtacaaaaattaaaaaaattactgtagaaatattgaataactagaacacaagccactgtttcagctccagaaaaaagaaagggctttaacgttttttccagtgaaaacaaatcctcttatattaaatctaagcaactgcttattatagtagtttatacttttgcttaactctgttatgtctcttaagcaggtttggtttttattaaaatgatgtgttttctttagtaccactttacttgaattacattaacctagaaaactacataggttattttgatctcttaagattaatgtagcagaaatttcttggaattttatttttgtaatgacagaaaagtgggcttagaaagtattcaagatgttacaaaatttacatttagaaaatattgtagtatttgaatactgtcaacttgacagtaactttgtagacttaatggtattattaaagttctttttattgcagtttggaaagcatttgtgaaactttctgtttggcacagaaacagtcaaaattttgacattcatattctcctattttacagctacaagaactttcttgaaaatcttatttaattctgagcccatatttcacttaccttatttaaaataaatcaataaagcttgccttaaattatttttatatgactgttggtctctaggtagcctttggtctattgtacacaatctcatttcatatgtttgcattttggcaaagaacttaataaaattgttcagtgcttattatcatatctttctgtatttttt

SEQ ID NO: 62482 - DNA, 703 bp, Homo Sapiens
  misc_feature (60)..(73): n is a, c, g, or t
ccacgcgtccggtgacatggaacaaataacttctttgccaccactttgccttagataacnnnnnnnnnnnnnnccagtttgaactctgacaccacattttccttctatgcaatcatgcctgtctgataatcttgcattgctttcctctgagctttagtgggtcctagttgcacactggcctttctgtgctgtttttcaatttgcctaataatagcagttaccctgattgtaatttatgtaactttaaacaggatcacactgtaccccctgcctgccttatttgcttactgagcacaggacagaggcaatatacaactctgggttcacacacaagctgagatgagaagaggaatgagccatatattggggaaaatcatagtttgtaggtataattatatagtgcttttctccctcaaagtatttttctagccttgaattcattttatcttcattatccctgtgaagtaggtgggacaagtataaggggaagaggggtgctgaatttttaggccaaagactgatattaatacaaatcactcactaactgtagagccttgggcattatcagtgaactactctgagatttactgttttcatctgtttaatgagtagaatgtccgtgatgcctccctcccagggttgttgtgagggtcaaatgagaatgtatgtgaaagatttgtaaatggtaaagcactatattttt

SEQ ID NO: 62483 - DNA, 931 bp, Homo Sapiens
tttactatgcaatagggttaactttgagtttcagcaaatgtctttaggttgaaggaaattaccatgtcatgaaggacctgtctgtggtttttcaatggagtctttaagcatgatcttttttctgtctagtacttgttttcattctggccagcagttctacattaaatcaccttgtcaagggctctgtttacatctatacattttgaagatgaaatttttagccttaaagtttatattctcaagtccttttacaatcagtgtgtctcctgaactagcacacaggctgtagaaacagtcttagaaatcattgaaagatttgattatgaaagaatagcaaaattatatttcttgacatataaaaagttggtttaatgcctttatttctctttaaggaccagaaccaggaatactatatcgaaaaattagtctgtggatttaacactgacttagcatatagcttaaagttgctcttttggtttttaacttcctccatacataagcttcaaggacaataagatgttaaaaaggaggaaataattatttttattttgacactgtgacagttttggtaactaggatcctagggagggaaatgtttgcctgttgaacttctttctgttatgagaggatttagttaggtcattaagatgttgatcacacagcttcaatcacaatatgccaagtataacctggtttcgttagaggtgtctacagtccagatgttcttcgtaataaaagcaaagtttttgaacctctgagtccaaagcaggctggttggcataatatgtaatttgaaaaataaaatcttatcttgcagcactatcagtatgttgaatttattatgtatattatttctaatatccgaaactaaatacttgattttttaatatgtgtgtttattttatgatattgctattaaatttttattatc

SEQ ID NO: 62484 - DNA, 972 bp, Homo Sapiens
  misc_feature (146)..(161): n is a, c, g, or t
gcacgaggaaaagatctaaatgaagaatggagacctcagtgattaaagatattttgtttctgaccttgagcagattgcttacctgttctctagactataacccaacatgtaaaaaaaatttgaagatggtgatgaggaaagtgagnnnnnnnnnnnnnnnngtattatgtttctagcacttttcccttttaaaaagtgaaaatatccttgtacatttttgaaaaatatattttcagttctgaaaaatgtagcagaagtagtgaaaatgtcatattttaaatgttgattattagataaatttaacctgcttagggtttattgtaactacacctttcagacgtgtgttttggagtagtggaattgccagccaggccctgtggcttggaaaggcatcccagaaatcctcggccagaaggtgtggcttgttaaagcattgagattcagagtattttgttttgctggtgtagataggcatgtatttatgcatttttgcatttgtaaaatcaacttttcaaataatgtaaatgtaatatactagtttacttaaaggtacttgggcagaatctaaagctgctacaatgtttgattatgaaaaaaatgtaacatggtaaggatgaaaatgcaacttacaaaaccaaaggaattaaaaattttcggtagtgtttcaaattgtcttctgaacaggaatttaacattggttttgatgaagtgagggtcagttctcaagatttgtgctaatcataaaatgaatgaatgcaaaacaccttgtaatttcatatggaattataaaaattaggtttgctgggttttggcctaataagagtgctagtatgtattggttagaatacatcttactatttcacattttaaaaatcagtacactcttcaggattttcttttatttcaacttggagcctagattactttgccaaatgtattattttcataatgcaataaaatataaattagaat

SEQ ID NO: 62485 - DNA, 907 bp, Homo Sapiens
cagaagttggtcctgccctttgggcgactgaactacctgcccctggaacagcagtttatgccctgccttgagaggatcctggctcgggaagcaggggtggcacccctggctacagtcaacatcttgatgtcactgtgccaactgcggtgcctgcccttcagagccctgcactttgttttttcccctggcttcatcaactacatcagtggcacccctcatgctctgattgtgcgtcgctacctctccctgctggacacggccgtggagctggagctcccaggataccggggtccccgccttccccgaaggcagcaagtgcccatctttccccagcctctcatcaccgaccgtgcccgctgcaagtacagtcacaaggacatagtagctgaggggttgcgccagctgctgggggaggagaaataccgccaggacctgactgtgcctccaggctactgcacagacttcctgctgtgcgccagcagctctggtgctgtgcttcccgtgaggacccaggaccccttcctgccatacccaccaaggtcctgcccacagggccaggctgcctctagcgccactactcgagaccctgcccagagggtggtgctggtgttgcgggaacgctggcatttctgccgggacggccgggtgctgctgggctcgagggccctgagggagcggcacctaggcctgatgggctaccagctcctgccgctacccttcgaggaactggagtcccagagaggcctgccccagctcaagagctacctgaggcagaagctccaggccctgggcctgcgctgggggcctgaagggggctgaggggttgatgtggggttcaggatggcccccccatggggggtggatgatttgcactttggttccctgtgttttgatttctccctcgtgc

SEQ ID NO: 62486 - DNA, 1106 bp, Homo Sapiens
  misc_feature (973)..(983): n is a, c, g, or t
gcacgaggctttgagcagctctgaggatgaagtggatgtgcttttacatggaactcctgaccaaaaacgaaaactcatcagagaatgtcttaccggagaaagtgaatcatctagtgaagatgaatttgaaaaggagatggaagctgaattaaattctaccatgaaaacaatggaggacaagttatcctctctgggaactggatcttcctcaggaaatggaaaagttgcaacagctccgacaaggtactacgatgatatatattttgattctgattccgaggatgaagacagagcagtacaggtgaccaagaaaaaaaagaagaaacaacacaagattccaacaaatgacgaattactgtatgatcctgaaaaagataacagagatcaggcctgggttgatgcacagagaaggggttaccatggtttgggaccacagagatcacgtcaacaacagcctgttccaaatagtgatgctgtcttgaattgtcctgcctgcatgaccacactttgccttgattgccaaaggcatgaatcatacaaaactcaatatagagcaatgtttgtaatgaattgttctattaacaaagaggaggttctaagatataaagcctcagagaacaggaagaaaaggcgggtccataagaagatgaggtctaaccgggaagatgctgctgagaaggcagagacagatgtggaagaaatctatcacccagtcatgtgcactgaatgttccactgaagtggcagtctacgacaaggatgaagtctttcattttttcaatgttttagcaagccattcctaaacagcccaactggcatttaattacccaatactgtatataaggcaaatatggacagttactttcctcttgcctgttcatatccttcagtgacattgaggaagcagtgtttctctttttaaaggagaatagttgtcaaccttcattcatctcttacatctctcaccctctccnnnnnnnnnnnctttgattttcccccttattgatgggactgatattcattctgtttttgatgaacatttggaaactgtcgggctttttattaaagctctgtagaattaaaatgttctggaattatacctcgtgc

SEQ ID NO: 62487 - DNA, 258 bp, Homo Sapiens
ccgagaattagtatttttatgtatggttaaaccttggcgtctagccatattttatgtcataatacaatggatttgtgaagagcagattccatgagtaactctgacaggtattttagatcatgatctcaacaatattcttccaaaatggcatacatcttttgtacaaagaacttgaaatgtaaatactgtgtttgtgctgtaagagttgtgtatttcaaaaactgaaatctcataaaaagttaaattttaacctcgtgc

SEQ ID NO: 62488 - DNA, 848 bp, Homo Sapiens
gagagaacttgaacatttaatatgtcagcaccttgtaaggtgaaggtgtgttttttacacaaattataaataatgaaaaatatgcatttagaaaaagaagcagcagtccccttggcgggccgggctcgaggactctttggttgagtggcaggtgaggccctgggtccagggtctgtcagagcccccctaggtcatctgccaggaaggccagcaggtagcggctgacatgtctgtcgatgatgacaggcgagaaaccgaggacgcgccgggtccctggcaggcccttggggtctggcggatagcagtacaggagcagggccagtcccacagcaaggcccaggccagccaggaagctcatgggtcccctgttactcagctcgccgctctggctgcccgagtctagctctgtgcaatctgagttctgcagagcgtggcggctgggcaggcggctgtgcaggggctgggcatggatatacagggctcggtagaactcctggcagtcccgctcaccgctccgctgcaggtggctcaggaggtcacagagccgcacacgcaaggatgccttggggttccggaacttttccgcctccttgttggtaaggatctgtgggtagtaacggttcagctggaggatgatcctgtccacctgctgctcactcaagcgcccatggcctgtcaggaaaggcgtgtcctgcaccaggcggtcacaataggtctgatctgtcatggcgacggacacagcgccgcccgcagtccccagcggtctgccccgccgcgcgtccgcccctcggtcagccgcccggtccaccagctccagcgaacgccgcccgcgggccgtgccctcgtgc

SEQ ID NO: 62489 - DNA, 432 bp, Homo Sapiens
catcacacctggattttcagtgggaggtttttggtttggagacatccaaagcctgaagccaggtgggtgtgggcaggggctgcattttatgaaactgcccagcaagctgcgctccctggggccccaggatccacctaactggcctggcacctggtgccacgtgctgctgccgccaggatatgcgccttcccacaggtgccctgcctgagttgtgtgcatccaggggcctggtgagcccccaggctggtggcatggcccccctgccccgtgctgaatgaatgtacagagccagacaaagctgtgaatggcctaggggctgagtcccacaccagctgtgaattctcctgcagacaggagggccctggctgtgcacctggggaagtggttgccctggggccagggtgcttgttctgttcaaataaagcctcgtgc

SEQ ID NO: 62490 - DNA, 807 bp, Homo Sapiens
ctgccacggagctcgtagctgcagctttggaggagtaagcggcgtggtagcgaaggtcgccgaacccgcctggctagccggcgagttgagtggcgactcttttgaaacagatggtcaccatgtttagatattagcagtcccgtatgtgcatgtctgcatttgaaaatggaagagggaaacaacaatgaagaggtaattcacttgaacaactttcactgccatcggggacaagactttgtaattttcttctggaaaacccagattatccaaagagagaagacagaatcattataaatcccagtagcagtctgctggccagccaagatgagacaaagttgcctaaaataagacttttttgactattctaaattgactcctcttgaccagcactgcttcatccaagctgctgacctcctcatggccgacttcaaagtgctcagtagtcaggacatcatgtgggccctgcacgagctcaaaggacactatgcaatcacccgaaaggccttttttgatgccattaaaaaatggcaggagctatcaccagaaaccagtggaaaaaggaaaaagagaaaagaaatgaaccagtattcttaaattgatttcaagtttgaacaaggtaatgcaaactatgttggtggcagtgtgtagctgcaacaccgtaccttcttcacagtcagtgaaggaagctgtgctacaggtgtttgctgagcatctggacaggaactattttctcagcacgtcaaaatttttagaaagtggctgcccttgttggcttccttcttcctacttaagataaactgtgagagg

SEQ ID NO: 62491 - DNA, 1098 bp, Homo Sapiens
gcacgaggggagttagcagggctttactgcagagcgcgccgggcactccagcgaccgtggggatcagcgtaggtgagctgtggccttttgcgaggtgctgcagccatagctacgtgcgttcgctacgaggattgagcgtctccacccatcttctgtgcttcaccatctacataatgaatcccagtatgaagcagaaacaagaagaaatcaaagagaatataaagaatagttctgtcccaagaagaactctgaagatgattcagccttctgcatctggatctcttgttggaagagaaaatgagctgtccgcaggcttgtccaaaaggaaacatcggaatgaccacttaacatctacaacttccagccctggggttattgtcccagaatctagtgaaaataaaaatcttggaggagtcacccaggagtcatttgatcttatgattaaagaaaatccatcctctcagtattggaaggaagtggcagaaaaacggagaaaggcgctgtatgaagcacttaaggaaaatgagaaacttcataaagaaattgaacaaaaggacaatgaaattgcccgcctgaaaaaggagaataaagaactggcagaagtagcagaacatgtacagtatatggcagagctaatagagagactgaatggtgaacctctggataattttgaatcactggataatcaggaatttgattctgaagaagaaactgttgaggattctctagtggaagactcagaaattggcacgtgtgctgaaggaactgtatcttcctctacggatgcaaagccatgtatatgaaatgcattaatatttgactgttgagaattttactgccgaagtttacctccactagttctttgtagcagagtacataactacataatgccaactctggaatcaaatttccttgtttgaatcctgggaccctattgcattaaagtacaaatactatgtatttttaatctatgatggtttatgtgaataggatttttcagttgtcagccatgacttatgtttattactaaataaacttcaaactcctgttgaacattgtgtataacttagaataatgaaatataaggagtatgtgtag

SEQ ID NO: 62492 - DNA, 1339 bp, Homo Sapiens
gcacgaggtgaacaatttgtagacttagtgaaataaaataagaggaaagccaaaaacaaacaaacaaaaagcatatggggagctggtattttctctttagcttactgttgtgcctttttatttttctaatcacagcagtatgagttatgagtgccctaatttgtggttagtttctaatttaatgttgtttcatagagtttggagtgttttgatacagggtgaaaatgaacttctggtttcaaacctgcgttactggagacagcccaaagagtaattttctgttttgacaggttttactggaagtatatgtgatgagcagaagaggttatcagcattaaattgttttggttctaaatttggaacagtatatataattaaaagtaaggaacattagaggatttaattagaataaatacatgttttggaaatacagtgacctcttgcagtgtcacaaaagtgcaaagtgatattagctgtcatctgcaatacagaatctcattgcttttgcacatggagcatataggaaactccaaacagatcacaatgaggtttctaaatctgttgggttctgtcttctattgggttctgtgaagcaaaccactgtagctttagctgggttcagtcatatgactcgttggtggaatgcctaggtttttcatcttacatgcagtcttgggggtggatgaatacataatttcttatgtattcgtgtatccattagtgaatagttcaagtctgtttaagagtgtattgagatggcattctctgcatgttaaagatcttaatggcaaccagcacctcttaagtatggtttaaacatattcttagctaattttttccattagtttttgaaattggtggcagttgtctgatccacaagggcaagatcttttgagtactctggggtgtgagtatgtgtgcacacgtgtgtgttggagtgagtgagagaatgtgtctgtgcatgtggccatgctttcctagaatgtcaagtagatatttttacactttgagttttaaagcaattactatcagactgagatcttgtatgccaaactttaatctgcttttatgttttcaggctgaaggtgtgaaaatcctaagaggatttcatattgaatatgtgtacacaattttaactatcgtggtggaaaacatactactataatttattattatatcttccagataatgttattcatttagaacaaataaggtatattttttagaatcaactttgtaagcactataaaatctttaataagttataaggtctatgatgtgtttactttaaaaattgctgttaaaagcaacacgtattaaatatgtaattatcatctgg

SEQ ID NO: 62493 - DNA, 843 bp, Homo Sapiens
  misc_feature (787)..(806): n is a, c, g, or t
ggccccccccggcaagagaagaatcacccctggctggagtttccgatgttcatcgggaaacaactgagaacatacgtgtcactgtcatccctttctacatgggcatgagggaagcccagaattcccacgtgtactggtggcgctactgtatccgtttggagaaccttgacagtgatgtggtacagctccgggagcggcactggaggatattcagtctctctggcaccttggagacagtgcgaggccgaggggtagtgggcagggaaccagtgttatccaaggagcagcctgcgttccagtatagcagccacgtctcgctgcaggcttccagtgggcacatgtggggcacgttccgctttgaaagacctgatggctcccactttgatgttcggattcctcccttctccctggaaagcaataaagatgagaagacaccaccctcaggccttcactggtaggccagctgaggccccaagtgcccaggcttggtcaccgggaagaacaactttcatcccacaattgctgcagaacttttctctccccatcatgggccacagtgggtctcttaatttgattgtggggttctttttgtggggaggggtggtataactttttttcagaagacccatgtgggacacctccaaggctggcctcctcataagccctgcctacaccatgttccagtaaacctctccaccaaggaactgtgttcagctgccacaggcctggaggagtttcctggcctgtcacgtgaggtttgatcagtaaaccagtgcacgcttggccnnnnnnnnnnnnnnnnnnnnctggagcctcgtgccgaattcctgcagcccgggggat

SEQ ID NO: 62494 - DNA, 805 bp, Homo Sapiens
  misc_feature (740)..(761): n is a, c, g, or t
tttcaaaattggagcatgtcgtcatgagaacaggtgctttcggtgcacaataaaccgacgttagcccagaccaatgccctctgaacattaacggtaaccctcaaaactcttcccagtctgctgacggtttgcgctgtgccgtgagcgatgtggagatgcaggaacactatgatgagttttttgaggaggtttttacagaaatggaggagaagtatggggaagtagaggagatgaacgtctgtgacaacctgggagaccacctggtggggaacgtgtacgtcaagtttcgccgtgaggaagatgcggaaaaggctgtgattgacttgaataaccgttggtttaatggacagccgatccacgccgagctgtcacccgtgacggacttcagagaagcctgctgccgtcagtatgagatgggagaatgcacacgaggcggcttctgcaacttcatgcatttgaagcccatttccagagagctgcggcgggagttgtatggccgccgtcgcaagaagcatagatcaagatcccgatcccgggagcgtcgttctcggtctagagaccgtggtcgtggcggtggcggtggcggtggtggaggtggcggcggacgggagcgtgacaggaggcggtcgagagatcgtgaaagatctgggcgattttgagccatgccatttttaccttatgtctgctagaaagtgttgtagttgattgaccaaaccagttcataaggggaattttttttnnnnnnnnnnnnnnnnnnnnnncatacaaagatgggtttttgaataaaatttgtagtgataacagt

SEQ ID NO: 62495 - DNA, 476 bp, Homo Sapiens
  misc_feature (55)..(87): n is a, c, g, or t
agaaagaaaagaaacttggtgttaggtaattgactatgcactagtatttcagacnnnnnnnnnnnnnnnnnnnnnnnnnnnnnnnnncttctgcaatacatttgaaaacttgtttgggagactctgcattttttattgtggtttttttgttattgttggtttatacaagcatgcgttgcacttcttttttgggagatgtgtgttgttgatgttctatgttttgttttgagtgtagcctgactgttttataatttgggagttttgcatttgatccgcatcccctgtggtttttaagtgtatggtttcagaactgttgcatggatcctgtgtttgcaactggggagacagaaactgtggttgatagccagtcactgccttaagaacatttgatgcaagatggccagcactgaacttttgagatatgacggtgtacttactgccttgtagcaaaataaagatatgcccttattttacct

SEQ ID NO: 62496 - DNA, 1163 bp, Homo Sapiens
  misc_feature (983)..(1001): n is a, c, g, or t
  misc_feature (1006)..(1016): n is a, c, g, or t
gcacgaggaggcgggtcacagattcctcttcctctcttctcctcgttcctctgaaccctccaccaatgtgcctcagcctgtgtgctgtgtggcaacagcattctggttcccactgccaagatctcccaccactctgctgggatctgcagtggcagggagtgggggttgtgtaaaggggaagtcatcttttgagatccagatagacatggtttgtgcacttacgtccagatgggaagcatccttcctgcaaccctaaaataatcatgcagcctctcagacggacgccatcggtcccaaggccttaggtggaggaagcaaagcaggccaggcctgtcctgtccgtggacctctaccttctggactccctacgggtgcagagcacttgggtttctctacagccatcgtggcccacttgacactgtgctcctccatcagctggtcacatgccaacacgttcccagcccctgaggcagctccagggtgccccacctgctcctgaggtgggtccctaccctgctgctcctcttcatcctttcccttttgtcctgaaagggaggagcaatggtccaggcattaattccacccagggaattttagctatgccctcatgtcccagggagagagccacacgcctgttttccatttatagcaagattgtttgcatacttttgtaatgaaggggagtgtccagtggaaggatttttaaaattatcttatggatagctcaagtctctgccatttgtaatttttggctctaagctccgattggagacgcttctccttgtgcatgtgagttgactgatgttgtgagtgtaaatgcatttggttatttctggtatcggtggccacttggatggatttttttacattctgttccccagttacaggaaggagtccctttggtgtgtgaatatgtgtgcctgtagagggtggggcagggtggggtggggatggaaatgtgtggcatgcccatgagttgaaannnnnnnnnnnnnnnnnnngaagnnnnnnnnnnncaactctgaggacataggggatgtcagtttcctatggaagagacacctttgacccgttattcttataatcaaaatttgaagggaaaaaaatgttttagttctttccccactcgttgggttcaaatagattaaaaggctgattttcag

SEQ ID NO: 62497 - DNA, 886 bp, Homo Sapiens
  misc_feature (241)..(253): n is a, c, g, or t
  misc_feature (631)..(652): n is a, c, g, or t
tccagctgcaaattgagtctagctttaccagatgatgacggaagtgatgacagcagtccaccatcagcctcccctgctgaatctgagccacagtgtgatcccagctttaaaggagatgcaggagaaaatacggcattgctagaagccggcaggagtgactctcggcatggaggacccatctcctagcacacgtgcccactgaagtggcaccaacagaagtttggcttgaactaaaggacannnnnnnnnnnnnactttagcacataatttgtatatttgaaaataatgtatattattttacctattagattctgatttgatatacaaaggactaagatattttcttcttgaagagacttttcgattagtcctcatatatttatctactaaaatagagtgtttaccatgaacagtgtgttgcttcagactattacaaagacaactggggcaggtactctaatataaaggacaggtggtgtttctaaataattggctgctatggttctgtaaaaaccagttaattctatttttcaaggtttttggcaaagcacatcaatgttagactagttgaagtggaattgtataattcaattcgataattgatctcatgggctttccctggaggaaaggnnnnnnnnnnnnnnnnnnnnnnaagaacttgaaacttgtaaactgagatgtctgtagcttttttgcccatctgtagtgtatgtgaagatttcaaaacctgagagcactttttctttgtttagaattatgagaaaggcactagatgactttaggatttgcatttttccctttattgcctcatttcttgtgacgccttgttggggagggaaatctgtttattttttcctacaaataaaaagctaagattctatatcgc

SEQ ID NO: 62498 - DNA, 982 bp, Homo Sapiens
gcacgagggcggcccggcggacgtgggcaggagggctggaaaagccggcgctggagcgggaacgggagtagctgcctgggcgccaaaggccgcggcactcccacgcggaccccgaagtccgcaacccggggatgggcccgcggctgcgaggggatcttctctggatcaagcaatggtggtgaaaaatgtttcgcaagggcaaaaaacgacacagtagtagcagttcccaaagtagcgaaatcagtactaagagcaagtctgtggattctagccttgggggtctttcacgatccagcactgtggccagcctcgacacatattccaccaaaagctcaggacaaagcaacaataattcagatacctgtgcagaatttcgaataaaatatgttggtgccattgagaaactgaaactctccgagggaaaaggccttgaagggccattagacctgataaattatatagacgttgcccagcaagatggaaagttgcctttttgttcctccggaggaagaatttattatgggagtttccaagtatggcataaaagtatcaacatcagatcaatatgatgttttgcacaggcatgctctctacttaataatccggatggtgtgttacgatgacggtctgggggcgggaaaaagcttactggctctgaagaccacaaatgcaagcaatgaggaatacagcctgtgggtttatcagtgcaacagcctggaacaagcacaagccatttgcaaggttttatccaccgcttttgactctgtattaacatctgagaaaccctgaatcctgcaatcaagtagaagtcaacttcatctgaaagttcagctgttttcaaactgcaatgctgaaatgttatgcaaataatgaagttatcccttgctctagattttttgaagaaaatggattgtgtaaaatgctgatcatttgtttattaaaatgtgtcctattacacagtgaaaaaagggaaacctcgtgc

SEQ ID NO: 62499 - DNA, 1019 bp, Homo Sapiens
  misc_feature (975)..(988): n is a, c, g, or t
gcacgagggttttctctgttggtttcttcctcaagtttgcattgttttcttttgttaaaattagagatttctttttattttccagttatagtaatactagctgtcagcttaaaccctctgtaatagaacatggaaacagacacataaagacattagctgaaaaaatagagtgaaaatcaactattttttactcccgctaatttcaatcaatcgttttcaaaagcgcacgagattcactcattggatttatgcagtgccctgtctgtataaaaactcttaagcgttcctttatatcatattcttcagagccaacatttgtcctcaaagcaacgtttcccacctccttttactgagtactgaaaaagttttagcaaagtcacagattaggttgaatttcaaaatatatgtactttaaaaagttctgatttccaaatataataaagttaaaattaagtatatactttaggaagttaccaataacttccatcaaagcagagtaggatatatggtaacattaattttcggtcatttcaaatgaggtatatttcttattagggaaattaaagtccctatatttattatatattttttccttattaacagagtattaatctagtaaaaaataacccagcagtaaataataaagaaattactgaatgagaggataatgaatctgaatcatagcaggaatttgcaatattaattatggttagctatttttctctcattgatttttgtgccacttgaatggaacagaagcaagccttatgttttggaaggtctgcggtaaaatgctgtgactgtttactttcaattgcattgtgtgttgcctgtgactgctttcaaacgctagagggggcctctgatttaaagaaataaaaaggacttttctaaaatggatgtgtagtttattttgccttttgtaaagctcttttggctattgtaacttaacaaataaaatcataattgtgtgcnnnnnnnnnnnnnncctcgtgccgaattcctgcagcccgggggat

SEQ ID NO: 62500 - DNA, 720 bp, Homo Sapiens
cccccccactgggccatggagactgtggcacagtagactgtagtgtgaggctcgcgggggcagtggccatggaggccgtgctgaacgagctggtgtctgtggaggacctgctgaagtttgaaaagaaatttcagtctgagaaggcagcaggctcggtgtccaagagcacgcagtttgagtacgcctggtgcctggtgcggagcaagtacaatgatgacatccgtaaaggcatcgtgctgctcgaggagctgctgcccaaagggagcaaggaggaacagcgggattacgtcttttacctggccgtggggaactaccggctcaaggaatacgagaaggccttaaagtacgtccgcgggttgctgcagacagagccccagaacaaccaggccaaggaactggagcggctcattgacaaggccatgaagaaagatggactcgtgggcatggccatcgtgggaggcatggccctgggtgtggcgggactggccggactcatcggacttgctgtgtccaagtccaaatcctgaaggagacgcgggagcccacggagaacgctccaggagggcctgtccatcctcgctgtcctttccctgttctccccctgccccccgtctctatcctctgtggccttcagctaatttttgctcccctgagattcgtccttcagccccatcatgtgctttgggatgagtgtaaataaaacggggctgtggcttggga

SEQ ID NO: 62501 - DNA, 599 bp, Homo Sapiens
gcacgaggctcaggagatctgagtttgaatccttgctctctaggatgcaggtggcttgaagcagaatgccacacctgcaagttgattagaactgcctttcttcccaggcttgacataggtattaagtcaaaattacatgaaacccagtggtaaaaaagcctctgaaagctgtaacaccctcagtaataacaaaagggatttttatttcacagctaaagggaaaataggtggagaagttaaaaaataatgtctgatcctgttcctaagttccaaactatagccaacactctgatgctgctctttttcttgtaggaccaaccgtcccagtttgcctgggactttctcatttttacagagtcccaaatcctaggaaactggagcaactggtacaactggtcacctactcttgcccctctgtaaatcaagccaactgtgaccatccaatgtgtcatcttacagggaaaagttataaccactattcccctataacgtaatgctaatgattgtacttagtacatttttatacttttatgatattttactgattggaaatgtcatcctttattaaaaataaacatggttttccatagttgcctgcc

SEQ ID NO: 62502 - DNA, 665 bp, Homo Sapiens
gcacgaggggggacccggctgcggtggctgcgggactgacgagaaactactaaagttcctggggaagcaaagtagaatttcataagaacaaaatggatggagaggagaaaacctatggtggctgtgaaggacctgatgccatgtatgtcaaattgatatcatctgatggccatgaatttattgtaaaaagagaacatgcattaacatcaggcacgataaaagccatgttgagtggcccaggtcagtttgctgagaacgaaaccaatgaggtcaattttagagagataccttcacatgtgctatcgaaagtatgcatgtattttacgtacaaggttcgctacactaacagctccaccgagattcctgaattcccaattgcacctgaaattgcactggaactgctgatggctgcgaacttcttagattgttaaataaaataaattataataaactgttaactcttttcagtatttaatacctgtagttcagttagtaactttttcatatatagcatgttgcctgtatgcagttgaactatataaagttcattgcaaagcagattatcttgtttttttgcatagcaatcaaagttgaaatttgtttgctacatcaacaaattaaggacattttcacaaactgagaaataaacaaatatgccaattcgt

SEQ ID NO: 62503 - DNA, 853 bp, Homo Sapiens
aaagagccaagagattcttgagaagagagaaccgaaactcaatgaaaatattaaaaatgccatgctgattaaagggggaaatgcaaatgcaacagtgacaaaagtacttaaagatgtgtatgcactgaaaaaaccatacggtgtactatataaaaagaaaaatattacaagaccttttgaggatcagacatcactggaattcttttcaaagaagtcagattgttctttattcatgtttggctcccataataagaagcggccaaataatctagtaataggtcgtatgtatgactaccatgtgctggatatgattgaattaggtattgagaattttgtctctctaaaagacattaagaacagtaaatgtcctgagggaacaaaacccatgctgatatttgctggcgatgatttcgatgtaacagaagattatagaagactaaaaagtcttcttattgatttcttcagaggccccacagtatcaaatatccgcctggctggattagagtatgttctgcacttcactgcactgaatgggaagatttactttcgaagctataagttgctgttgaagaaatctggttgcagaacaccacggattgaattggaagagatgggaccctcattggatctggttctgaggaggacacacctggcatcggatgacctttataaattatctatgaaaatgccaaaagctctcaagccaaagaagaagaaaaatatttcccatgatacttttggtacaacttatggaaggattcatatgcagaagcaagacctaagcaaactacaaaccaggaaaatgaaggggttgaagaagcgacctgcagaaaggataacagaagaccacgag

SEQ ID NO: 62504 - DNA, 775 bp, Homo Sapiens
ggggacacctttttatgaggccagattgatttcgattctactggatgcattcaaagttaccagaagaagaaggactggagagaaaaccaagcttaatccttttaaatttgtggggctaaagaacttcccttgcactcccgaaagcctgtgtgatgtgctatctatggatttccccttttgaggtagatggacttctcttctaccacaaacagacccactacagccccggaagcactcccttggtgggctggctgcgcccctacatggtgtcagatgtccttggtgtagctgtgccggctggcccgctgaccaccaagccagactatgctgggcaccagctccagcagattatggagcacaagaagagccagaaggaaggcatgaaggagaaactcacacacaaggcctctgagaatgggcactatgaattggagcacctgtctactcccaagttgaagggttcttcccatagcccagaccaccctggatgcctcatggagaattaaagagagaagcctccttaaggagccacaggatggtacctggccccaaaaggaatcctggagaggaggacagtgacaacaggtgacttcattctttagagtgaactttccaaacccagtccagctggaaacagcttatctataatctgaaatgctggctcaaacagttatggggaggttcccagattgcgtagcattcagattgatttgagcagctcctactgtgataagtgtatcccagatccacaatgtaaatatatgtgatttgtaag

SEQ ID NO: 62505 - DNA, 1409 bp, Homo Sapiens
  misc_feature (762)..(771): n is a, c, g, or t
  misc_feature (1050)..(1059): n is a, c, g, or t
gcacgagggttacctttagtttgaggcaagtaaaaatttttgattaaaattagtttcttaaaattatgcccttgctttaccaaataatcaaattggctaaaaaataagggtatgtaactttgcattttgaagaacaaaccaataatttttcatgagccctactcgatcttctttaaagaagaccttcctaagagacaattagggatgagtttgattaatgggaaatagctctaggttagattattttaaattccatacaccaagtgatttaaccacagtggcagtggcagtttctgaaccgtcaagtatgaacatcacttaaaaattaaaagatgcttaataataaactcttaattttcattaagccaatctgtaattcagaagaaaagcatatgtctgccatgggactattgcagtgcgtctccatcagtgttaacacaggagagatatgttattttatgtgtatgtcttagtttgggatatgtggtagtaagaacatgtcaagagtgctttcttcaaacctgtcagctcaactgagaagacagttacttcattgcttattttttcccttgttttattgaaatctgtatctcatatccagtatctaacactttgtagagatacttacatataatgtaagtgcacacctacccagaggaatggataactgttaaagtgttaataatagctcgtcttagttgatttcagcataatttacattagggagacctaaaaagcaccttcaaagtattaaaagcaccnnnnnnnnnnccttttcctaaaaaagcaattaaaatggtcactgctaacatttattaaacttcatgttagttgatgaaacagctggagagaagctgccacatctcctagctaagcagtctgacttacctgttgggaaacaaagggatattgctctaagattgattaggatgattgtagctagagtcttgaattctatctgtatacggcagagaaactttatagagtgtagagaggtgagcgaaaggatgcaaaagcactttgagggctttataataatatgctgcttgnnnnnnnnnntgtgtagttgatactcagtgcatctccagacatagtaaggggttgctctgaccaatcaggtgatcattttttctatcacttcccaggttttatgcaaaaattttgttaaattctataatggtgatatgcatcttttaggaaagatatacatttttaaaaatctattttatgtaagaactgacagaggaatttgctttgtataatgcaggctggctttacaaaagcactgtagcaaatttactacaagtctaaaagtatacatatatgttaatagatatatgtgcaactagatatggacagcagttgtatttttttaaataaatatttttaacaaaatgaaaacctcgtgc

SEQ ID NO: 62506 - DNA, 1130 bp, Homo Sapiens
  misc_feature (598)..(626): n is a, c, g, or t
cccacgcgtccgggctcagtagggctgcacataatctccaaacaattctttattcagtgttttgcttgtgtttgcatgttgctatgatggacaggtccccctcctccattcttgccctctggagaagtggttcctgcagtgtagagatatgaacagggtatggtaggattggggaaaggggagagagaagcagtagatacactccttatcctccccaaattttaagctctatttctgtgccctagtcctagacacacattagactcagggagttttgtctgaagaccaggtcccactgccccctggctgaagagtctgctttaaatgggaaaacaacgtaggagcaggggtttttaggcactttcagtattctcaggtgttcttcgttctggcccttccagggtaattaggaaggcagaacaagacagatgagctcctgcctgctctgagacaagaagggtggggtctcattagctttgcaacaggaaacatcctgttttatggtagtggggtcaggaatgtaggaactggtatccattctgccaattccaccacccattcagtttgcttatccctacagaacagtgactgaggttcnnnnnnnnnnnnnnnnnnnnnnnnnnnnncaaatttccatgtattttctgccatttttcagggtctaagattggtcatacattcccaatttactctcagttccagtcaagctggttgctctgaaagtaacccagcttgttgctctaaaatacctcagtagcctgagtgttatactagagatttaaagggttaacaggatagggtggaaaagttagagactcctagaaatctctggtcaccgtgatcttcggcctcattataatacctgttctttggacagtctttttcctttggtgctctcttgcctttagctaccttctctaatatgtatgctaccatcactaataaagtgatgggaatgggtttgagagtcgtaatttatattaaaaagttgttggacttttaaatacattttttcaaataaaaaattaagcaaaatagttgcacagtaatcattgcaggtgtgtgttggattaagggatggatatagctaatgaagataactcctcgaaagtggccctcgtgccgaattc

SEQ ID NO: 62507 - DNA, 377 bp, Homo Sapiens
tggaaaccccacccggaagtgagcacccctccctccaactccctaccagctccagagtggtggtttccatgcacagatggccctaggggtgacctccagttttgcgtgtggaccgtaggcctctttctagttgaatgaccaaaattgtaaggcttttagtcccaccgacattagccaggctcgtagtgaggcctccagagcaggttgtgctgtcccctgcctctggaagcaatggggaatttggaatcttgtgtaagtgcccaaataagtctgagtgctttcctcttcttcaacactcaaccctcaatcccttagcactgattgattagagaggtcccccaaagaaaccactggttttgacccatgaagcattagaa

SEQ ID NO: 62508 - DNA, 1182 bp, Homo Sapiens
taataaccggttactgttagaaagtttaaaaggtggttttaatgtgaataccaaattctggtatatcgtgactaacgcttaagaatgcctgtctttgagaggaaggtgttataatattaatgaacagtgccaaatacactgtgcatatctgcaatttaatctttgaatgtatgttactggattagctccctcctcctgtgtgatggtaccatgcatagagtcaatcaaatccttgtgatgttttgtatggactttgacatatgtaaataatgtgtaaagccagtttttatgattaaggaatcaaatttattgaattttattattgaaagttgaaacttaacatgtatgaacaaaaaccaataaaagaatatactcttttcattgactatagtattatgtgaatgctacatttgttctgaacacttaggggctgcaaaaatgtaataagaaatgcatatgactagatagcaatagtgttttttttagatggtatgctcttgattgaaatatattctcacttttaccaggttaaacatttggaatcttataatgttacttgctttttgatagataatagtgaaataaattcagctttgccattgctggagttgtcaaaattccacagtaattaaaatttgaatttttaccgaatatgaaatttccaaattaaaaacgtatatgtgtactcttttaaaaaggaatttgatagttcttgtcaaatgagaaaatttaaaggtaagagttatggtttgtcttatgctgcatagactattcacctcctaacttgaaggtctaatcataagacaattgtttttttgtgcatagttttcatctaaaattaagtttaccaaaggcaaataactgcttactaggaacttcctttagcaaaaattactataaagttcaggacagtttgaaataaaacccaggaaacaagattaatgtgagcagttctccaagatcctaactggtgggacataaactatgatgcaatggataggaaaaggtagtgcaaaaagaatttcttaaggtttaaaaaatacacttttcattataggaaaaagaagattcagagaaacaaaggaatgtaaccttattgattacatttttggtgatcaccgagaattttttgtactatattttaaaaaatgtattctactgtaacaagttaatacctcgtgc

SEQ ID NO: 62509 - DNA, 238 bp, Homo Sapiens
cagagaattactatttactttattaacttacggatttattatataaatatatattcacctagcaacatatctctgccgtctctcctgctctcataatgaagacatagccgattctctgcccgggccccttgctgatgctcctccgggtctgcgtcgggcgtgggtctctggggaccctccagaggtggaggtgggctgatggcctggctgcctggtggttgatggttttgcctcgtgc

SEQ ID NO: 62510 - DNA, 718 bp, Homo Sapiens
gcacgaggcgccgcttcctatctcagcgccctgccgccgccgccgcggcccagcgagcggccctgatgcaggccatcaagtgtgtggtggtgggagacggagctgtaggtaaaacttgcctactgatcagttacacaaccaatgcatttcctggagaatatatccctactgtctttgacaattattctgccaatgttatggtagatggaaaaccggtgaatctgggcttatgggatacagctggacaagaagattatgacagattacgccccctatcctatccgcaaacagatgtgttcttaatttgcttttcccttgtgagtcctgcatcatttgaaaatgtccgtgcaaagtggtatcctgaggtgcggcaccactgtcccaacactcccatcatcctagtgggaactaaacttgatcttagggatgataaagacacgatcgagaaactgaaggagaagaagctgactcccatcacctatccgcagggtctagccatggctaaggagattggtgctgtaaaatacctggagtgctcggcgctcacacagcgaggcctcaagacagtgtttgacgaagcgatccgagcagtcctctgcccgcctcccgtgaagaagaggaagagaaaatgcctgctgttgtaaatgtctcagcccctcgttcttggtcctgtcccttggaacctttcctcgtgccgaattcctgcagcccgggggat

SEQ ID NO: 62511 - DNA, 1561 bp, Homo Sapiens
  misc_feature (1271)..(1290): n is a, c, g, or t
gcacgaggctttataccattgtttcaacttcaacctttatttttgtatatattttttcaactacttaaactgttcatgaataggcgtactttctgtatttaaaaatggcccctcaagcaccgttaatttacattccagttatttacatgataattcatgacattctgaaacttgcctgtatattatctgaaaaatggatttcttgaggaaaagatctgtttattgtatgtaaggaaaaattttacctgaaaacaaacaaacaaaccctaaaactcagcaccactaccatttccagaagcttttttagcaagtgaatattttttacataatggataataaatggtatttattcatcatgattttctaagtaatgcttatcagccccttcagtggtgttattctaacaaaatgaatacattacaaattattaagttagcttttcagagttttaatatagaagttactagcactgacacactgattttgaaatgtttcaaaatgagtagatacgattagatcctttaccttttaatatctagtttttccaaaaatgatagtaatatcttttgaagaactatgctttttcaaaagcaaaatcaactctgtataatagcacattctctactttttaaagatcagaaatgctagaattcttgacttttgtgtatgggtagtaaatctagctcactgaaaatcagagtgaaacgcctttacatttgtgcggatagagaagttaactctccctcatatgtcactgtgctaccataatccctacattttctgtctgttctagtctaagaatattgttatagatggaagttaggaccattagcccacagatgcgtgtattctctcagacataccggtgtagatgccatatttctgatgtcttcttaatgtctgtgaaagcaactggcatctacaataaatcacacttagaactggttagaggactccctcacttttgttgtccatgtggttcccttccgtggaccagccgtaataaagagccaaggtagtgatggtggccacgtgcctcgttgctatttttaaagtaatattcagatgtggttttaaatttagattatgtattccttttgaaacataagaaaaacatttaaacctatgctgaaaatacgataaaagaaaaacaactccaatatgctaaaagttaaatatggtatttaagaaaatagtcatgtatgcaattgagaaagtctataatttattttacagaaaagctggaagattatgactagatatggaaatannnnnnnnnnnnnnnnnnnnatatttcctccgacttacctctttttgaaaagagagtttttattaaatgaaccatcatgatattggctgaaaagttctacattctattattgtattgtaacacacatgtattgatgattttcattaagagtttcagattaactttgaaaaatattccacatggtaatcttataaattctgtttaattacatctgtaaatattatgtgtgtgatagtattcaataaagtaaaatcaagggggtccctcgtgccgaattcctgcagcccgggg

SEQ ID NO: 62512 - DNA, 628 bp, Homo Sapiens
taagtcaacttatttgtttttgccgggaaagtcgctacatggatcaatgggttccagtgattaatctccctgaacggtgatggcatctgaatgaaaataactgaaccaaattgcactgaagtttttgaaatacctttgtagttactcaagcagttactccctacactgatgcaaggattacagaaactgatgccaaggggctgagtgagttcaactacatgttctgggggcccggagatagatgactttgcagatggaaagaggtgaaaatgaagaaggaagctgtgttgaaacagaaaaataagtcaaaaggaacaaaaattacaaagaaccatgcaggaaggaaaactatgtattaatttagaatggttgagttacattaaaataaaccaaatatgttaaagtttaagtgtgcagccatagtttgggtatttttggtttatatgccctcaagtaaaagaaaagccgaaagggttaatcatatttgaaaaccatattttattgtattttgatgagatattaaattctcaaagttttattataaattctactaagttattttatgacatgaaaagttatttatgctataaattttttgaaacacaatacctacaataaaccctcgtgc

SEQ ID NO: 62513 - DNA, 769 bp, Homo Sapiens
ccgggctgcaggaattcggcacgaggaatacaggcaagctgtattcacggctggtctatgtcgagggggaccagctctccctgcagatccaggatactcccgggggcgtccagatccaagacagcctcccccaggtcgtcgattccctgtccaaatgcgtgcagtgggccgagggttttctgctggtctattccatcacagactatgacagctacttgtccatccgacccctttatcagcacatccggaaggtccaccctgactctaaagcccctgtcatcatcgtgggcaacaagggggaccttttgcatgcccggcaggtgcagacacaggacggtattcagctagccaatgagctgggcagcctgttccttgaaatttccactagcgaaaactacgaagatgtctgtgatgtgtttcagcatctctgcaaagaagtgagcaagatgcacggcctcagtggggaaagaagaagagcctccatcatccctcggccccgctctcccaacatgcaggacctgaagagacgcttcaagcaggctctgtctcccaaagtcaaagccccctctgcactggggtgaactatctcagacagatgcctctcctttttaatacgcatttgtgcagctaaaagactgggcttctcgctttttaatcacacattcagagtttatttttataaaaaaattgattttcaagtacatgtgtatttctgaaaattcaaacagtgattgcctagaagctggataaaattttgttttgttttatt

SEQ ID NO: 62514 - DNA, 1411 bp, Homo Sapiens
  misc_feature (502)..(510): n is a, c, g, or t
  misc_feature (636)..(644): n is a, c, g, or t
  misc_feature (974)..(982): n is a, c, g, or t
cgcacgaggtgatcatgctgctttccctggcagctttcagtgtcatcagtgtggtttcttacctcatcctggctcttctctctgtcaccatcagcttcaggatctacaagtccgtcatccaagctgtacagaagtcagaagaaggccatccattcaaagcctacctggacgtagacattattctgtcctcagaagctttccataattacatgaatgctggcatggtgcacatcaacagggccctgaaactcattattcgtctctttttggtagaagatctggttgactctttgaaggtgggtgtcttcatgtggctgatgacctatgttggtggtgtttttaacggaatcacctttctaattcttggtgaactggtcattttcagtgtcccgattgtctatgagaagtacaagacccagattgatcactatgttggcatcgcccgagatcagaccaagtcaattgttgaaaagatccaagcaaaactcccctggaatcgccnnnnnnnnnggcagaataagtacatggaaaccagaaatgcaacagttactaaaacaccatttaatagttataacgtcgttacttgtactatgaaggaaaatactccagtgtcagcttgagcctgcattccaagcnnnnnnnnnaatttggtgttttctcccctcctttccctttaaccctcagtatcaagcacaaaaattgatggactgataaaagaactatcttagaactcagaagaagaaggaatcaattcataggataagtcaataccttaatggtggtagagcctttacctgtagcttgaaaagggaaagattgaggtaagagagaaaatgaaagaacacctctgggtccttctgtccagttttcagcactagtcttactcagctatccattatagttttgcccttaagaagtcatgattaacttatgaaaaaattatttggggacaggagtgtgataccttccttggnnnnnnnnngcagccctcaaatcctattttcctgccccacaatgtgagcagctacccctgatactccttttctttaatgatttaactatcaacttgataaataacttataggtgatagtgataattcctgattccaagaatgccatttgataaaaaagaatagaaatggaaagtgggactgagagggagtcagcaggcatgctgcggtggcggtcactccctctgccactatccccagggaaggaaaggctccgccatttgggaaagtggtttttacgtcactggacaccggttttgagcattagtttgagaactcgttcccgaatgtgctttcctccctctcccctgcccacctcaagtttaataaataaggttgtacttttcttactataaaataaatgtctgtaactgctgtgcactgctgtaaacttgttagag

SEQ ID NO: 62515 - DNA, 1129 bp, Homo Sapiens
gaaaaaaagggtacattattcgatgagaaagcataaaattaagaggcttttctggaaatccaagaaaaagaaataaccattaatatgttcaatgataattttctagatcttcctcgtgtccaaagctatatattttctcctcaaaagcagctgctccaagaactaactagccctctttatctccctctagctgggacagactaattcccctccaccccccacctctcttctttcaataacactgtgtaggtgttaatggcctgggctctcaccaatgaagagaattgtcctttaagccagcaacccacaggcagtggcacccaaagcctcaccaacccaccccccaacccggcccatccccagggcagaagccacagagctggcattgtttccactgtctcaggaagaaggagccaaaagctgaccctcagcacaaatcaaagcccaatatggagagagaataactgcttctaggccgagagtaggcaagctgtgggcaaaaaaggggagtttttgcagccacctcatctttagaaacaaggggaaaactagacccttttccactattatggtctaccaggtactctactgctccaaggagatctgaaaatacaaaaggatctaaacaaataaggagaacttttcccaggctggagataagaatgacaaacagaaagatgggtgaatgtaataatgtgtaggaagatgatgctgggagcctcctttcttcacatggctgccagccccatagaggacaacacagtaagaaccaggacaaccactccagactggtatagctggggaatcttcaggccttttcctaggtcccacatcaagtgtcggatcccattccaggtatgatacatgagagggaagacaagtgcaaacttagctgtgtggatcagtgctggccccagacacagggacttcacaagttccaaataagactcaaagttcccagggagtaacagggccgacatgccaaaaagagagacccctgcactcaaagcaataccagtgccacggtggcagatggacatcgccatgggaagagaccaatttctgatacagagctgagggctaaagtgggctcggaggcaatgacgaccaacgtgtctcagcctcgtgc

SEQ ID NO: 62516 - DNA, 1120 bp, Homo Sapiens
  misc_feature (247)..(255): n is a, c, g, or t
  misc_feature (295)..(304): n is a, c, g, or t
gcacgagggttaattggtattcattcacaatgcagttgaagggggaaggctccactgcattctttggctaaggcctgaatgcttgctcatctgtaagatctatactcgaggttttgttttccttttaaaattctttagggagagagggatggtttctgaggggttctgaaagtatgattcaatgtgcaacatacaggtaggtcttcagcataagctgaaatatatgcatgtaaaaactttgacatcnnnnnnnnnaattttccactttcttcttaactttacttctctttttgtnnnnnnnnnnatcttacagaagttgaggccaagggagaatggtaggcacagaagaaacatggcaaactgctctgtgctttcaaaccaaagtgttccccccaaccccaaatttgtctaagcactggccagtctgttgtgggcattgttttctacaaccaaattctgggtttttttcttctttctttaaacatagaggtaccaccacaagggatgccctactctctcgcagctcttgaaagcatctgtttgagggaaaggtctctgggcaagcaagtggttatttggattgcttgcttccctttttccacctgggacattgtaatcataaaataacagtaaattccaaacctcaaaaactattatggcctgagcacagctgaaatctagcagagtttaactcttctgcctccatgtctgtcacttataattcaggttctgctgttggcttcagaacatgagcagaagaatcgttttatgctagttattgcattcatggttgaaactcaacttagggaaagggttccaatgtattaagcaatgggctgcttctccccaatcctccctaacaattcgttgtgtggacttctcatctaaaaggttagtggcttttgcttgggatcagtgctctctattgatgttcttgctggtctccagacacattcctgttgcattaagacttgaaagacttgtagatgtgtgatgttcaggcacaggatgctgaaagctatgttactattcttagtttgtaaattgtccttttgataccatcatcttgttttctttttgtaggtataaataaaaacactgttgacaataaacctcgtgc

SEQ ID NO: 62517 - DNA, 1492 bp, Homo Sapiens
gcacgaggatgaaattgtagatggaggggtgatcctagagagtgatccccagcaggtggtacaccgggtggcattaaggggtgaagatgtcccccttacggagcagaccgtgtctcaggtgctgcagtcagccaaagaacagatcaagtggtcactccttcggtgaagacctcactgttcctggctcttcatcctcttcaaaaaatttgcatgtctgctgtgaattttcatctagttccccaatcgatgctctcagggtcatctcggggatcacagggatccttaaatctccattctgtttgtggttgccccctcaacctcccctacacccttcctattctttttcattcttcttgcagttctgggagtaaagctcccagcatatttagataatagggcaggggaagcaccctctttctttctagactggattatgctcacatgctcccttgccctgacatttttgtaaattctgtgccctttgctgtagctacacttcagattaaagtaggagaaagaatgtgctgagtgttttcctccctttgcctctacctggccctcatcccaacagcccagcaaggggagagagaaagagaattcttttctatagaacgagtggggcggggatgggtagggatttatccaatcttaagccctaaccccacttagtgacctcagtgttttcttccattccttcttactgccctgtcctctgccttggaagaggctttgggaatagttcatagggaagggacaacatggaagaaacagcgatttaaattgtattgaacagggcatataaaatgcattctgtaccctgatctggcatatagcttcaaaactgcagtggcgagtgtccatctcttagttagctaccttaactgtccacccttactacctgtgggatcgttgcctggtttgtcttctctgtgtcctggagcaaagccagttcctaaaactaaaactccattctagtcttgggaagaaaagtttctactcagaactggggaaggagtggaacttatgacttgggcctctaggctgtctctgtcccctcagctccccgacatgcatttactctctgccgtgggtctgcagtcgctgcaacctaccctctctctgcctcagccttacacccaagcagtaggtctgtgctctccctgtctctaggtcgctgagagaggtgcttttcttcataaaacctttggggtttggatttccccaggaagatggagaatggaatactcactcttgggtctaatctttccccttgacccagaacttcctccccacaaaaatgcctttaaaaaccttcctgagacttaagcattctgccccacttactaactgccagttctccagcactgaggtggggcagataactgggcatatttaagggggcatctttgtgtaaaagatgcatggagtcaggagaaaaccaccttcataaactgctctgtgcaaagaggaataaaacattttttccaaactg

SEQ ID NO: 62518 - DNA, 369 bp, Homo Sapiens
tccacagtgctgctccccacacctagcctttgttctggaaaccccagagagggttgggcttgattcatttcagggaatgtagcccctgggccctggcttaagccgacactcctgacctttctgttcaccctgagggctgtcttgaagcccgctacccactctgaggttcttaggaggtaccatgcttcccactctggggcctgcccctgcctagcagtttcccagctcccaacagcctggggaagctttgcacagagtgacctgagaccaggtacaggaaacctgtagctcaatcagtgtttctttaactgcataagcaataagatcttaataaagttttttaggctgtagggtggttcctacaaccac

SEQ ID NO: 62519 - DNA, 1010 bp, Homo Sapiens
tttttggtgctttcaatctttttggactcaaaagtctaaaaaattttctgtgtgtttccaccttggtaaaaaagttatgccaataccttacacttgtttgggtacaatgttttgttccggaataggtccccaagcagaaatttaaggccagatttccataaccctataatggctggaaaaccggaatttcttctgaggtcagagataattttttaggtggggactgttcccagaccatccctagactttaacaaatatataatttgtcaaccctagttcagcaattaaatagggtgtgcccaagggaattttaatacttcaaaatggattaagagtgcattttaaaaatcacaagtgagaacttgatgtttgggcccccagccaaaacttaatggtcataaatgaatttttctacaaaatctcttaaatttggcgggttgccttgtcatatgtaatttcactattttccaaggaaatatatgggaagcaattatgaaactgagaatagttttatatagaattcttttatttactgataaggcattaacatttttattgaaatgcaatggaatatgtgccaaaacacgtgaaaagcttacataaagaaaggcatcagttgtcgtttggagaaaggtacccatttttttgatggtcctaagtgatatggtattactactagaatcccagattttttcaactgacttattttggtatattcaactacagctttttaaggataggactactttcatgtttagtaataccctgtattccccgttaattatcccttaagtcagattgtagaatttgcaagaaactaggtatagaaaaaatgtccaggcaacttttgtggttagctttataaatttagggtgcttataaaatgataaaatgaattctttaaataacctataggaatcatttgaatctgtaacatcagagactaaaactaaaagttttctttaatctgttgttttttaagcaataaactgaaagacctttacttccat

SEQ ID NO: 62520 - DNA, 743 bp, Homo Sapiens
aaatctgagtttttctaggggtgagagaaaactgtattgtgatgagctagattagttgtagttccagaataagaacaaaaattcagagttgtgtggtgcccatcattgagtaaatgaaccctaaaaatgaataagctaatgaactagttcatggaattatttctgatggtcttttgacctgatgctgccatactgcagtgttaccagctccccctagaaaacggaactgtttaaaaacacagcaagttacagaaaccattttattctacagccattggggtacttcagtttatgggatgtttttggaaacttctgctttgggagggatgaagatcattgataaatgttatttgctttctgagttttggggtcatttcattgcttatcaatgaagggcagacagaggagagaatatctcaagtcttttctgataaaaggcttgcttgagggagcttataacttgcacctagagggtttacccactttgtggatttgatttatccaccaaccacagcaaccaataatgtcaagattctaggagtttatgaaagaggctagtatgttttcattttgagtcagacattcttttctcattctcaaatctgttttaaatgctccaattttaaaaatgccaatgaaaattttataatgcttctgtagtaaccatatgcagtttactttgaatttaggaaaacagttttgtatgatgaaatattgtgcagaatctgtaaataaggtagctt

SEQ ID NO: 62521 - DNA, 794 bp, Homo Sapiens
cccccccaacaccaaaagcagggtttctcctccaaagtttgtatttggttcagagtctgttaaaagcatttttagtagtgaaaaatcaaaaccatttgcattcggcaacagttcagccactgggtctttgtttggatttagttttaatgcacctttgaaaagtaacaatagtgaaactagttcagtagcccagagtggatctgaaagcaaagtggaacctaaaaaatgtgaactgtcaaagaactctgatatcgaacagtcttcagatagcaaagtcaaaaatctctttgcttcctttccaacggaagaatcttcaatcaactacacatttatggagacaaatttgaagatgaaaattttgatgtgaaacatactggtcctggtttactatccatggccaatcaaggccagaataccaataattctcaatttgttataacactgaagaaagcagaacatttggactttaagcatgtagtatttgggtttgttaaggatggcatggatactgtgaaaaagattgaatcatttggttctcccaaagggtctgtttgtcgaagaataactatcacagaatgtggacagatataaaatcattgttgttcatagaaaatttcatctgtataagcagttggattgaagcttagctattacaatttgatagttatgttcagcttttgaaaatggacgtttccgatttacaaatgtaaaattgcagcttatagctgttgtcactttttaatgtgttataattgaccttgcatggtgtgaaataaaagtttaaacactggtgt

SEQ ID NO: 62522 - DNA, 1227 bp, Homo Sapiens
gcacgaggcgaccccgggagggtggcggagaggagcggacgcttccgttcggtgtccgcgcatcctccccgagctgccgagcgtccgctgggtcgatgctgggttgggtgacccccgagtggagcgatgcgaaggtgcttcctgttttccccaccaccttcggcgttttgaagaggccctgctaaggcttggagtctggatcggacgccagtgggagctgcagggtgggacgcttgagggcttgaccctgcctagatcctccttaccaagaaagggctgaaaagagagggcatctggcatgctttttgccacttctgtttctaggttatgtacttcatggaatatctgggcattgcttagaaacctgtgtcataaattggctttgggcaagaggctttgagttggaagaaaaggtggaaagaaagtgcttgggggcggagttcagggatttgacgggattgccagcgcttccaggccgtgtcatccaagaccagtgtggttgtgggcacattagcttggagacagtggcagcctcttgggactaacatctttctggatgttgtttgctgccagttcttgagtattgtttcttatttggcacagaggagaattctctcaacaaacgttttcgactgtttattgagtcccttaaaaaactgtccatttaataaacatttgtgatctgtgatttgcattgaacgagatgctggaagtatgaggataaataggaaatgatcacctttctcaaggagctctcctgcagttttcacttcaataacttggacacgcctgaaagggttgtcccacacgaaaagagagaaaaggataatgaggttcttttgatgctgtagtttttcctgggaagactaggaaggactctgaatttcaaaagaggtgatttctggcatgagcatctcttccatcctccctccctccacaagctacagtgatgcatgtagcagacacggcacctacagagtacatggtccaagccaataaagctcaacaaaacccaagcaaagatggagcttatggcccttaccctttggaaatatccccagattggtttagattgaacctgaatttgaataaagagaagcaaaatgtagggggaagaaggattataaaatattgggattgatattggtatcagtgatttgaagttgatttccaagctattctgttcagtcagaggctttcttagcctttaacgggagaagagaaata

SEQ ID NO: 62523 - DNA, 509 bp, Homo Sapiens
tcaaggctgttcaaggtttatttggttttcttctcagccaagggaggggacccgcagggcaggcgccggccccgtcagttccactcggttgtcaaaagacaaaccgggtctgtgttctcctggttggttagtgggttttgccagctccttggttggtgggtccgtggtgaaggaattgaaccgaattttctggaaactgttgatgtctgcaagtgagtgccgatcccctcctccattctcgatcttttcaagcgaagtctctgggcttagataagagcgatgaggcgctattttctttcatgcccgactccaggcgcccaggcccgcctgtagtggctccatctccagacaagcaacccggtcaatcccttccagcttggcccaacttcttactggacttggagggagggggagctggtgaggaggaagccgagggtcgtggaggctctacttggccctcctttcccttcaccccttgactttgtctccctttgtcgatagcctcgtgc

SEQ ID NO: 62524 - DNA, 1009 bp, Homo Sapiens
aaagtcaagcaatgggaagaataacaagattatatagtaatcagtttcatgacactaaaagtcatatagtcatagggttttttcatctttcatatctttgcctaaattcatttgctacagtgcaggaaccaaaacttgttcatctcatgattccctacatctgacataaggaaagtaagtgctcagaaaaatgtgcaggtcaataagttgcaaaagttggggctgcaattaatgctaacataagagctaaatgcttgattagaaatgatctcaaaaccttttagaatttccaaaatcttcatattactgaaactgtcggaatatatgggtcctgaaattcagaagatgatagtcactcttcccatatttataggctattaaggcaagggatatcttaaacatcatattactttatttagatttctactactccaattattaatgttatgtatttctcattgttttacttcttcatggtattatgaagactatatagatgattcaaccaagcctgcaaatctccctcttgtggaattccactggacccaatctgttttccatttccattgcaatactactaaagccatacaatatcaagcaccctccctctaggtccagggactatcacagaagaagcaggcatgtaagattttaaggactggtttcgaggggtcgagtgtaggaaaacagcctgttgcattgtaagagtgatgtcatcttgaagagcagctggcatgatgactgctgtttgactcctgcataccaagatattttgcagcaatgtctttaaacagtgccggtagtacagataacccctcataaagatgcttatctaacctccccagtgttcaggtgtttcacaagaaagtttgagatatgactagctacacgttttgccaaaaatgcttgttatataaagggtacttttgggagggtgagtgccgccatttagtggctgctagaaacattgcttctgtttgtaagttcctattaaatgtttctttttgag

SEQ ID NO: 62525 - DNA, 829 bp, Homo Sapiens
  misc_feature (335)..(493): n is a, c, g, or t
gaccaggaccaaaccatgcagaggtcaggggccacattcaccttttcagagtgactcaatcaaatttgtagtttgtaaaagtattttaacagctctgcggcaaagtgcaaatgaaaagtcttgatggcatggactggagcggggacagtggggatggagaaaggggaatggattgtggatgtgtttagaaggtagattcgatgtgaaggatgaatctggcttgaccttctgggtggctgatgggccatttactgagatggggcagcctggaagaggaacagaagcagggtcggggtggagggagaatactaaacttagcttgagacattttgcannnnnnnnnnnnnnnnnnnnnnnnnnnnnnnnnnnnnnnnnnnnnnnnnnnnnnnnnnnnnnnnnnnnnnnnnnnnnnnnnnnnnnnnnnnnnnnnnnnnnnnnnnnnnnnnnnnnnnnnnnnnnnnnnnnnnnnnnnnnnnnnnnnnnnnnnnnnnnncacctcccaataatcaacagcaaaattataggtctaacaatgttttatagacacccctccatttatgtgatgggtttgcatcctgataaacccatcataagttgaaaatatgatcataagttgaaaatatgatcataagtcaaaaatgtatttaatatacctaacctaccaaacatcatagcttagcctagcctgccttaaacatgctcagaacacttacattagcctacagtgggcaaaactatccaacacaaaatctatattgtaataaagttataaagaattttgaataaaaattcaatatttgaagtacaaaaaaagggggggacctcgtgc

SEQ ID NO: 62526 - DNA, 730 bp, Homo Sapiens
aaatgtgtaactcagtattactgaaaaggtacccacattttgaatagtagtatcactcttaggtcagacagccatcggaattctcccacaccaagtgcatgtcagttgtggagaaaacatagcaaaaagagccgtacgctcttttacagatactaatgtcaagagttaaacctcctcaggttcaacctgtgataaaagactagtgcttcccagtacttgcatggggttcactatttatagttttcttgggagtatcacaggaaaatcacaattacaccactttagaccctatgtgtagcaggtcacaacttacccttgtgtgtttagatgtgtatgaaatacctgtatacgttagtgaaagctgtttactgtaacggggaaaaccagattctttgcatttgggccctttactgattgttaaaggagttcctgtcacctgctccccccacccccgcatgcgtctgtccacttggctaacttttaatatgtgtatttttacattatgtatattcttaactggactgtcttgtttagactgtatacatcatatccgacattattgtaactaccgtgtgatcagtaagattcctgtaagaaatactgctttttaagaaaaaaaataacatgctgaggggtgacctatatcccatgtgagtggtcactttatttataggatctttaaaacatttttaatgaactaagttgaataaaggcacaattaaaaactgtc

SEQ ID NO: 62527 - DNA, 912 bp, Homo Sapiens
gcacgagggcttcatgtgctattcccccaaattctgctttctctattttcttttttatttaacctataattatactttctagtatattctgagtctatcttctaagccaccttacatttttcctggaacaagggagggaataaatagttgcctccactaaatcaggaaaaaataaaaatatcccaggggagctgtgattatgccaagagctctaaacagaagtttgagaaggtaaaaattaagttgtagtatctgagttgtttttattttcttcctttggggtttatgaaggtattcataagaactttaatttcaggggaaaaaatgcctgatttgctatttttgacatttcctcgtctcttaagaagtcagttaaatatgttttcatagtttatattcctgtttcatagattactgtgaaacatgtatttaaacctatgaattataaaatagtatttagattctagcgtgagttaaatagattagtcatatatcttttagatttgtggatttgacatgtaaattatgtgttgtgtataagtaagttagttactaaacatatggcatggttattgataaacttgttgctatttttttccaaatgctatcagtgtttgtggacttttaaaaattagtttgaattttggaatgttctgtgataaaatataatttcaactattttgtacatttaaatatgccatgttgtatatgtctgtatttaaaaatgttgtaaatatctgcattttaagaattatgaaagattttcctcaaaaatgacagaactctccatacttaattgtgacacattataagatatctgattttaagcttttggattttgttctaaaaattaagtttaaacatgctgaaaattccataaaaataaaattttgaaaataaagtgcctcgtgc

SEQ ID NO: 62528 - DNA, 540 bp, Homo Sapiens
gagtagggtttccctctctctcctctggattctactccgtttctggtttattatctcttcctactgcaaatgaccttcctcgatgtagtcagagaagttgactgccagcagtggcaggccaatactccatgctggggtaccactgtcaaaccaaatcccagcacaaagaaagaaaatgtttctctgatggcttccatgtatgatgtcttagagaaggattgtgattggtcagtgtgggccacatgtctgcccgtgaaccagtctcaagctctagggcaatggagtgccaggactggccaatccttggttatgtctccacacttgtagccaaagcagatgaagtctgtcaccagaaaagtggtaaagaattcggctgagctatcccagttcactacagcaacagttcccaaattgacctgaagataaacatcccctggacccttgttaaaaaacaattatttggctcccagcttagacctccataataagaatttatataggagaaggatggtaatttgtatatttagcaagtaccgcagg

SEQ ID NO: 62529 - DNA, 959 bp, Homo Sapiens
  misc_feature (395)..(411): n is a, c, g, or t
  misc_feature (739)..(761): n is a, c, g, or t
  misc_feature (837)..(851): n is a, c, g, or t
acaagagagatgaaaacgtttgattattttctcagtgtatttttgtaaaaaatatataaagggggtgttaatcggtgtaaatcgctgtttggatttcctgattttataacagggcggctggttaatatctcacacagtttaaaaaatcagcccctaatttctccatgtttacacttcaatctgcaggcttcttaaagtgacagtatcccttaacctgccaccagtgtccaccctccggcccccgtcttgtaaaaaggggaggagaattagccaaacactgtaagcttttaagaaaaacaaagttttaaacgaaatactgctctgtccagaggctttaaaactggtgcaattacagcaaaaagggattctgtagctttaacttgtaaaccacatcnnnnnnnnnnnnnnnnnataagcaaaaacgtgccgtttaaaccactggatctatctaaatgccgatttgagttcgcgacactatgtactgcgtttttcattcttgtatttgactatttaatcctttctacttgtcgctaaatataattgttttagtcttatggcatgatgatagcatatgtgttcaggtttatagctgttgtgtttaaaaattgaaaaaagtggaaaacatctttgtacatttaagtctgtattataataagcaaaaagattgtgtgtatgtatgtttaatataacatgacaggcactaggacgtctgcctttttaaggcagttccgttaagggnnnnnnnnnnnnnnnnnnnnnnngccatccctcctgggcaatatgccgggtggaatatttgttttaaaattcaaggccacaaaaacaatgtttgggggnnnnnnnnnnnnnnntcatcccagttaatcatgtcaagttccctccctgtcagattgttgatatatcccttctgtaaataactttttttgggaaggaaaaaaaatcagcgggaatggacccct

SEQ ID NO: 62530 - DNA, 903 bp, Homo Sapiens
ttttgattttgggggattacaccctgggtaaagcaaaaatgaagaaccaagcaacttctactgcagctccgggataggaccgaggtcactgggaccacattcccactccgcaagaccttcctcaacggaagccgtcccttgttgctagcaagctggctgggtgattaagaggctgaactgcatgaatctgctaaatctcattatttctccttaatatgttacttatctactttttatttcctttcattcactagtcatttgagactgacagctttgcaggtagcagtagtgtgtgctgctattgtggaatatacgtgtgtagagtttttgattagtttaacagtgcactggtgaagaggacatgttagagcaacataagtaaactacttgaaaatagttgtatatattacctaacttctagtgtagtactggttctaacaagtaacaagcaagttttaaaattttaatgttttggctttcattacttcatcttaattatagctttgtatgttactcttatttaatataatctctattgtattgatttcttctgtatttaccttttggattttgtaaaacagaagtttaagaccacaagttagaagaaaggtcacatatttcaaacacaactagatggggctctgaaagatttgtatctctgtgcttgaacttgaatggccttaaacctgtttcagctttaacagtagaattttacttgggcaatatttgcccattctggtgtaacttatgtgactctagtgcttaacagctgccgttgaagctaatattcagttctgtagagttagaataccttttgttgttgaagatgtgaatgaagtatgcatgtgcattaactgttgaattcacttttgtgccatttttgtaaatacagtagttttgcac

SEQ ID NO: 62531 - DNA, 860 bp, Homo Sapiens
gacccatcatgtatacctggaggggaccctgctcaagcccaacatggtgaccccgggccatgcctgtcccatcaagtataccccagaggagattgccatggcaactgtcactgccctgcgtcgcactgtgcccccagctgtcccaggagtgaccttcctgtctgggggtcagagcgaagaagaggcatcattcaacctcaatgccatcaaccgctgcccccttccccgaccctgggcgcttaccttctcctatgggcgtgccctgcaagcctctgcactcaatgcctggcgagggcaacgggacaatgctggggctgccactgaggagttcatcaagcgggctgaggtgaatgggcttgcagcccagggcaagtatgaaggcagtggagaagatggtggagcagcagcacagtcactctacattgccaaccatgcctactgagtatccactccataccacagcccttggcccagccatctgcacccacttttgcttgtagtcatggccagggccaaatagctatgcagagcagagatgccttcacctggcaccaacttgtcttcctttctctcttcccttcccctctctcattgctgcacctgggaccataggatgggaggatagggagcccctcatgactgagggcagaagaaattgctagaagtcagaacaggatggctgggtctccccctacctcttccagctcccacaattttcccatgatgaggtagcttctccctgggctctccttcttgcctgccctgtctcctgggatcagagggtagtacagaagccctgactcatgccttgagtacataccatacagcaaataaatggtagcaaaacaaaaacctcgtgc

SEQ ID NO: 62532 - DNA, 642 bp, Homo Sapiens
gaattcccggcacgaggcagattgctgagtacctccactggctgctaaccaacatcccgggtaaccgggtggctgaaggacaggtgacgtgtccctacctcccccccttccctgcccgaggctccggcatccaccgtcttgccttcctgctcttcaagcaggaccagccgattgacttctctgaggacgcacgcccctcaccctgctatcagctggcccagcggaccttccgcacttttgatttctacaagaaacaccaagaaaccatgactccagccggcttgtccttcttccagtgccgctgggatgactccgtcacctacatcttccaccagcttctggacatgcgggagccggtgtttgagttcgtgcggccgcccccttaccaccccaagcagaagcgcttcccccaccggcagcccctgcgctacctggaccggtacagggacagtcatgagcccacctatggcatctactaaggagccagagtgtgcgcatttcagagcatgggattgatcggcagcaagagtaaagacacagctccagaggcccccactgtgggggtctgggccctgccttaggcagcccccctctttggccccctcctgtcaggcccagggcttggagtgaaagtgactttca

SEQ ID NO: 62533 - DNA, 1587 bp, Homo Sapiens
  misc_feature (992)..(1042): n is a, c, g, or t
cgctactgctgccggtgtttgcgtgtggcagggagccaggcctggcgagcggggtgtgtcgcgatgccggagctggcagtgcagaaggtggtggtccaccccctggtgctgctcagtgtggtggatcatttcaaccgaatcggcaaggttggaaaccagaagcgtgttgttggtgtgcttttggggtcatggcaaaagaaagtacttgatgtatcgaacagttttgcagttccttttgatgaagatgacaaagacgattctgtatggtttttagaccatgattatttggaaaacatgtatggaatgtttaagaaagtcaatgccagggaaagaatagttggctggtaccacacaggccctaaactacacaagaatgacattgccatcaacgaactcatgaaaagatactgtcctaattccggattggtcatcattgatgtgaagccgaaggacctagggctgcctacagaagcgtacatttcagtggaagaagtccatgatgatggaactccaacctcgaaaacatttgaacacgtgaccagtgaaattggagcagaggaagctgaggaagttggagttgaacacttgttacgagatatcaaagacacgacggtgggcactctgtcccagcggatcacaaaccaggtccatggtttgaagggactgaactccaagctttctggatatcaggagctacctggaaaaagtcgccacaggcaagctgcccatcaaccaccagatcatctaccagctgcaggacgtcttcaacctgctgccagatgtcagcctgcaggagttcgtcaaggccttttacctgaagaccaatgaccagatggtggtagtgtacttggcctcgctgatccgttccgtggtcgccctgcacaacctcatcaacaacaagattgccaaccgggatgcagagaagaaagaagggcaggagaaagaagagagcaaaaaggataggaaagaggacaaggagaaagataaagatnnnnnnnnnnnnnnnnnnnnnnnnnnnnnnnnnnnnnnnnnnnnnnnnnnnatgtattaaatagcttttttaatttgtaaattaaaatcttacaaactaaatcagtgtgctgctagagggttctttttcacttgacatgcttattagaaagctgacccaacaagagctctctgcctccggtcactcttgctgtggtgctacgtggaagtgaatggagactgatctcaaatctgaactgcagctttcgctgctgtgagttggggatatgatagtcagctcaggcttcagattgtatgagaaaaatgaagagaagtcaacaaatattttggtactcttcattcatttatctctaaaaccaggagttgaattttcctcatcttgaaagactcttggggtctgtttctggtattttacaaaattgctaagtggaatgcatgaattgcattatgttctctggtaacacgtagagttcagacccttctgaactctgttgataataccacaccatgttctggacccatagctctggcatcctcaggggttgtgatccagctccatatattgtttaccttcaaagatacaattaaacctcgtgc

SEQ ID NO: 62534 - DNA, 1124 bp, Homo Sapiens
  misc_feature (285)..(310): n is a, c, g, or t
  misc_feature (1038)..(1070): n is a, c, g, or t
gcacgaggctccccgcccagctcatgcccttttttgcctggacatgtgctatttttattcacttatatatcaattacttgtaagggttaaactttcaaacaggaagtatattgggacaaaagggctcttggggattagatatccctttaatctgtgaccattgggcaaaaaattttcctgcagcaaaagtctgaggctgttgggaccatttttgcagctttaatccttagcctcttttgactgtatatttgtgtttaaaatgcagagctcaactgaatatttccnnnnnnnnnnnnnnnnnnnnnnnnnnaagaagtaggttgttttcctgaaccgtaaacttgtatcattttaacttgcacaaaggaagtctgttcttggtattgctcttgcacttgggttttttgttattgttttgtgtggattttttaaagcttttctgttcaccctcctgccaggaaaatcccagaaagcttaatgataccccaaaatgattacacccagggaggaaaaaaaggagcgctttctagggtcagaatcgtggagagaatactcagaaatgaacctctttaaagccttgcaggaatgagtcactcttacttaatgaaatgttaaagccaattaaaaagcatgctgtgatgcccagcttccctttccacagggtgcatgcgtctcctgctggtgaatcacatgcggcaagaggcaactggctccacagcctgggatgctgccgtaccaagaggaaagaagcagcaaaatgcctttacgttgttctaaacccccgacgcataaagtgtagaggagggatggccaagggtgggtggtagaaagtgtgttcaggctgacactggcaatgagtacagataatttcactttcctcttccaggggcaaaggctgatggcctctacctttgtatccaggagaaactgcagagcagccctgtgactttacaaaatatgctacctcaaagtgctaccgataaacctttctaattgtaagtgcccttactaagggcacatgtcttaatcaaagttagnnnnnnnnnnnnnnnnnnnnnnnnnnnnnnnnngtatattgatgaatgagatcttacctattaaatatattattggaaacctcgtgc

SEQ ID NO: 62535 - DNA, 2188 bp, Homo Sapiens
  misc_feature (171)..(183): n is a, c, g, or t
  misc_feature (613)..(647): n is a, c, g, or t
ccagtttttaaaaggaaaatttatttaacaagtttcacttagtacaatacatctaaatggaaatcacaatacaaggaaagatttaaaccaaagcctcaaattttcatacaaacgacacgaccaaacttctaaagtattggtattacatcttaaaattgtcccgtatccttnnnnnnnnnnnnngtgtacactcacgtgccttacaggatattaaaccaaaaagctagaattaacaaagccaaatgttttcactttgaatcgtaaacacagctcctatatttgagttttacagaaaggcatgtttctcaacatgcatccgaagttttcaatgtatttgtggtataaaagcaacatttaacataagtgaaactgcattaacctaaatacgcttactgcttaggtacactcctacaacataactaacttgaggaaagctaaaaattgttttaacagttatggtcaatactgaactttgttattatgtcctaaatgaatgtttcagtgttcaaaattactgagcttgaagttttaaaataatctcaacttccactttacagtaagcatgaatcacaagcctgtaatgcaaaactgttaaacttaactcgttttcttnnnnnnnnnnnnnnnnnnnnnnnnnnnnnnnnnnnctgaccaagagtgatcagaatcaattatatttccccatttacccaatcatactggatatactaaacatccctcccattctattcaactcccacaaatgtacagcttttatatctggagtagctatttagtgctccttctctacctaagcaaggtttgactgatagtcactggagttttcctgcagaacttggtcatatccactcatactgctctgaccaccataaccacctccataaccaccactcagctgctggctagcaggacctccataactagactggttggataagcccatccctcccatcatttggctaccataagcgccaccacttgcccctgctgtagaattcaaaaaaagttctacatagctgtgatcgtaagcacccccacttgttcctgcagtagaatttaagaagagctccacatatctgtgttgcatattagctttgtcttttgccatagctgccacagcatcttcatgagtagcaaattcaacatctgcctcaccggtaactctgccatcgggtccaatttcaatatgtactctcatgggattaagaggtgagaagaaattataaatatcattctcagtggctctgtaaggtaaccccctcatgtgtacacagtgccctgtggtgctctggaaactggacccaccatctccgtatctatgatcagacattcctgaaaaacagtaattgaggtctcttccaaatctatcagacccaaagccatatccatcattatagccaccatagtcatcatagcctccataccctccaccataggcaccacgcctcatcctttcaaacccagctcctctgccaatgctattataccctctgccagcccccggcctatcatagggacctggccgctgcatagccatgagctttcgagggggatcatagtgggttcgaacttcagctcggctactcttgaagatctcaatgtacctgtgccctattctttccttgtgtttctttaaggccttctcagctatctcctgtgaagcaaactgcacaaaggcttcccctgtgcttcgcccctgaaagtccactggcagtgtcatcccatttggcacaatttccaaccctgaaaagaactgaacaatctcttccttgctacagccaaatgggagtcctctaagccggacgaagccatcgttggcagtatcagggctattcggacctgtatgcttcaacacccaatccatttcaacactgttagacttgaatacttcaacgtatctgtgtcccatggtttctctgtccttcttcaaagccaatttcacttcctcttcagattcaagttcaacaaatgcttcaccacttggtctgccttctctggtgtagatgaaacgaatacctgatgtgccattttggatcttgcaatcagagaagaagcgcatcacttcatcggctgagcaggaccagggtaggcccctgaccttcaccacgaacccctccctgccttccgtgctcagcatcatggtgattgttgggctcttggtggcaagtttggctcaatgcaattttgg

SEQ ID NO: 62536 - DNA, 757 bp, Homo Sapiens
  misc_feature (186)..(206): n is a, c, g, or t
attttttaaatttctatgaaggatccatcttgtatatttacatgcttagaggggtgaaaattattttggaaattgagtttgaagcactctcgcacacacagtgattccctcctcccgtcactccacgcagctggcagagagcacagtgatcaccagcgttagtggtggaggaggacacttggatannnnnnnnnnnnnnnnnnnnnggcttaacagttttagaatacattgtacttatacaccttattaatgatcagctatatactatttatatacaagtgataatacagatttgtaacattagttttaaaaagggaaagttttgttctgtatattttgttaccttttacagaataaaagaattacatatgaaaaaccctctaaaccatggcacttgatgtgatgtggcaggagggcagtggtggagctggacctgcctgctgcagtcacgtgtaaacaggattattattagtgttttatgcatgtaatggactatgcacacttttaattttgtcagattcacacatgccactatgagctttcagactccagctgtgaagagactctgtttgcttgtgtttgtttgtttgcagtctctctctgccatggccttggcaggctgctggaaggcagcttgtggaggccgttggttccgcccactcattccttctcgtgcactgctttctccttcacagctaagatgccatgtgcaggtggattccatgccgcagacatgaaataaaagctttgcaaaggc

SEQ ID NO: 62537 - DNA, 1372 bp, Homo Sapiens
  misc_feature (1266)..(1310): n is a, c, g, or t
gcacgaggcaattattcaaaagggccaatatttcccaatttaatctgaggtcataataaaacaagcaacaaaacagtgtttgggatttcagtttctcacccttatcatcaagactcactgcctcccatcatcaatatttattgagcatttacagtgtactaggcacaatagaacatacagaaaacattgtccctgctcttgaggagcttacattctaaaagaaaaaatacaccttttttaaaatggcatttttgtttggtgttttctgcaaagtactgaggaaatattttgtaaagtgagctttgggtataacttagccccatcattatttagagaatagaggaggaagaaagaggaaggattttaaaggcagacaatgacagaccattcaggataggtagggttttaaagggagataaacacagtctcatcaactaaggagagatttgctgcagtaaataggatgagggaaatagtctgtgggatgcaagcaaaggaagcagggtgccttagacactgagtggagccagaaagatcatgcggcctttttccaagtacatggccaccaagtaagaatggttggtgacaagacagaaggctaaaacaggaaggtaatcttgtgcacctgacaaatagaaagaataaaggatcaaaattgaaggcaggctataagagtatcaagaaattcttaaaaaccaaaaagtgatttggaagcacaaaacttacagttaatgctacccaatgtcatgatgggccaagaacattgtggcttcctaagttagaaaatgccatatgccaaaattttaaatggaacacactacatttttttctaatcaatccccccctctcccagaaaaaataggaactcatttttttcagggtggggaggaagagaggggatcatgggacatggaaacagtagttatattagtagtatttttgttatgataaattttgtgtttaaacttggtaagagcccattagctgccaagagggaataaggaataaatttcaaaaaatgtacaatttcctttagagaagtttcagaaccaagactaatttacatgaaaagctgtagagaaagtagttgaaaagtccattcataaaacttttattccacttacatgaatttaatacacgtgttcttaacaattatgcttggattgttcatgaaaatttcataagacattaaacaaagctagccatcatctcaagttatttccctgttaactatttttacagcacatgcatgttaggcaagtatcnnnnnnnnnnnnnnnnnnnnnnnnnnnnnnnnnnnnnnnnnnnnngttaaatacatgggtttttgttttactgctgtgcttgatatacatgaagtaatgcctcgtgc

SEQ ID NO: 62538 - DNA, 795 bp, Homo Sapiens
tataaaagctgattggttggatagcattagaccacaaaaagaaggagactcagaaaggagattaacaagtggttgaataacctaagtgatggccagcggactgtgacaggtattatagctgcaaatgtccttgtattctgtttatggagagtaccttctctgcagcggacaatgatcagatatttcacatcgaatccagcctcaagtgttatttccaattttgtcagttacctgggtaaagttgccacaggaagatatggaccatcacttggtgcatctggtgccatcatgacagtcctcgcagctgtctgcactaagatcccagaagggaggcttgccattattttccttccgatgttcacgttcacagcagggaatgccctgaaagccattatcgccatggatacagcaggaatgatcctgggatggaaattttttgatcatgcggcacatcttgggggagctctttttggaatatggtatgttacttacggtcatgaactgatttggaagaacagggagccgctagtgaaaatctggcatgaaataaggactaatggccccaaaaaaggaggtggctctaagtaaaactgggattggacagtagtggtgcatctggtccttgccgcctgagagccccaggagacatcggctagagtgaccatggctatgctcccgtctggaagatgccagcatctggcctcccactgttttcagctgtgtcccccagtccgtgtctttttagaatgtgaatgatgataaagttgtgaaataaaggtttctatgctagtttgt

SEQ ID NO: 62539 - DNA, 1405 bp, Homo Sapiens
  misc_feature (256)..(268): n is a, c, g, or t
  misc_feature (310)..(319): n is a, c, g, or t
  misc_feature (697)..(727): n is a, c, g, or t
cagcagaaaattgagttgcagcttgcccttgtccagactattttctgcttgcgtttttgaaacaggaggtgcaggtaccacccaattatctatggcagcatgcatgtataggccgaactattatcagctctgatgtttcagagagaagacctcagaaaccgaaagaaaaccaccaccctcatattgtgtctgaagtttcacgtgtgtttatgaaatttaatgggaaatggatcacacgatttctttaagggaattnnnnnnnnnnnnngaattacggcttttacagcaacaatacgattatcttataggnnnnnnnnnntcattgtaaagtatcaagacaatacgagtaaatgaaaaggctgttaaagtagatgacatcatgtgatagcctgttcctaatcccctagaattgtaatgtgtgggatataaattagtttttattattctcttaaaaatcaaagatgatctctatcactttgccacctgtttgatgtgcagtggaaactggttaagccagttgttcatacttcgtttacaaatataaagatagctgtttaggatattttgttacatttttgtaaatttttgaaatgctagtaatgtgttttcaccagcaagtatttgttgcaaacttaatgtcattttccttaagatggttacagctatgtaacctgtattattctggacggacttattnnnnnnnnnnnnnnnnnnnnnnnnnnnnnnncttgagttctatttaccttgcacattttttgttgttacagtgaaaaaaatggtccaagaaaatgtttgccatttttgcattgtttcgtttttaactggaacatttagaaagaaggaaatgaatgtgcattttattaattccttaggggcacaaggaggacaataatagctgatcttttgaaatttgaaaaacgtctttagatgaccaagcaaaaagactttaaaaaatggtaatgaaaatggaatgcagctactgcagctaataaaaaattttagatagcaattgttacaaccatatgcctttatagctagacattagaattatgatagcatgagtttatacattctattatttttcctccctttctcatgtttttataaataggtaataaaaaatgttttgcctgccaattgaatgatttcgtagctgaagtagaaacatttaggtttctgtagcattaaattgtgaagacaactggagtggtacttactgaagaaactctctgtatgtcctagaataagaagcaatgatgtgctgcttctgatttttcttgcattttaaattctcagccaacctacagccatgatctttagcacagtgatatcaccatgacttcacagacatggtctagaatctgtacccttacccacatatgaagaataaaattgattaaaggtt

SEQ ID NO: 62540 - DNA, 839 bp, Homo Sapiens
ttcctgcaccaggaacatgtttgcttttatcccttctctcagtgtgtcgttcccatcttagtaccattgtagtgataaacatctgcattttgagaagcattttacccatttatgttttaaacattcaagaactgctgacgtactgtggatgtagagtataaaacctgaaaaatgcagatgtggaaggaataataggtatcttgtgctttaatactttatggcaggatggtactataagcaaatgaattaaacagctatgtaaatcataaagagaaactaaaaatgaaccaaagtgaaaggataacttccaggcagtatctttctattgtaacctgttatttaaggaaatactagtgatttcttctaaataggatgtaaaacttctttcaaattactcttcctcagtcctgcctgccaagaactcaagtgtaactgtgataaaataacctttcccaggtatattggcaggtatgtgggtaatctcagaatacacaggggacatagatatgatatgacaactggtaatggtggattcatttacatggtttacacttctatgaccaggccttaagggaaggtcagttttttaaaaaaccaagtagtgtcttcctacctatctccagatacaggtcaaaaaaagaaaggtgtttgggcttccgttttgtttctgctcagtaatatagtcaagcaagtttgttccaagtgacccattgagctgtgtatgcatttttgtttatttcaataaaatatatttgtattatttgtccttcatactatccatccataccacactatcttctgtatcaggtagtctaatagaaatatacctgttttgttct

SEQ ID NO: 62541 - DNA, 935 bp, Homo Sapiens
cctttcaagtgcctgtctgtgcctgggagaacaggagcaggaggcgtcgtgcggtccaccgcgcagtgcatggcgattccaggcgctgaacaccacccctggacccctgggccctgcatctgactcccagctgcagagtcagaagctgagtccaggcaactgcttggccactcccgatcgctcctccctggacacccggttaccaaagtcagcaaagaagatgcggtaatcgccgcctgatctccacatggtgaacacaacactcccaccaacacctccttgactggtcggtcttcagcaccgggggtgggcaggcaggtgttctgtgttgacgagaattgcacaggctaaacacaaacacggaaccagagtgagaacacctcactcacggcagcccaggctgctccctaccaggtgacggagcgcgccggggctgtgggtgccaggggctgagtgctagggactcgtcatgagtggggatccccacgttcctgtcactgctgtcaaacagaaggtaaacagtcttatgaatgtatttccttaggaaaacttgtaaaaacttttattaggatatctatttaatactgaactttggcctactttgtgatagactataaacaaattgaggaaatcactatttctcacttctgtattttctcaaaaataattttgttacagagttcaatatactgtgtaccattgatcttctattgtgaaagcaaagaatttcatcaaaatattttaaattatgagtgaaaattgtgtatgttaattttgcagctataatattaatcaaattttgtgtaattctaatcacaaaatgacgtgccttaagtgcccctccagctgtgggttggcagtgtccagacagggagggcccatcaccgaaatcctgaacgattactagaccaattctattaaaaacatttcaaggc

SEQ ID NO: 62542 - DNA, 1008 bp, Homo Sapiens
agtgattggggcagatgtgagagggcacggcctcatctgtgaggggcagccagtgacgtcacggctggctgtcatctgtggaacgtcttcttgtcacatggggatcagcaaagacccgatttttgtaccaggcgtctgggggccttatttctcagccatggtacctgggttctggctgaatgaaggtggtcagagcgttactggaaaattgatagaccacatggtacaaggccatgctgcttttccagaactacaagtaaaggccacagccagatgccagagtatatatgcatatttgaacagtcacctggatctgattaagaaggctcagcctgtgggtttccttactgttgatttacatgtttggccagatttccatggcaaccggtctcccttagcagatctgacactaaagggcatggtcaccggattgaaactgtctcaggaccttgatgatcttgccattctctacctggccacagttcaagccattgctttggggactcgcttcattatagaagccatggaggcagcagggcactcaatcagtactcttttcctatgtggaggcctcagcaagaatcccctttttgtgcaaatgcatgcggacattactggcatgcctgtggtcctgtcgcaagaggtggagtccgttcttgtgggtgctgctgttctgggtgcctgtgcctcaggggatttcgcttctgtacaggaagcaatggcaaaaatgagcaaagttgggaaagttgtgttcccgagactacaggataaaaaatactatgataagaaataccaagtattcctgaagctggttgaacaccagaaggagtatttggcgatcatgaatgatgactgaacagggcttgcaggtgctgatgccagaagcttctgtgccattgcattaaagacttctgtcatttgatccatgttcaagacccttgaggtattgtttcatcatttctgtattgtctttcaataaagaaaacaaacatgtgcaacccctcgtgc

SEQ ID NO: 62543 - DNA, 1281 bp, Homo Sapiens
  misc_feature (312)..(321): n is a, c, g, or t
  misc_feature (561)..(569): n is a, c, g, or t
gcacgaggcttaagtccctgctaaaacattccattgttaaaatttgcactttgaaggtaagctttctaggcctgaccctccaggtgtcaatggacttgtgctactatatttttttattcttggtatcagtttaaaattcagacaaggcccacagaataagattttccatgcatttgcaaatacgtatattctttttccatccacttgcacaatatcattaccatcactttttcatcattcctcagctactactcacattcatttaatggtttctgtaaacatttttaagacagttgggatgtcacttaacannnnnnnnnngagctaaagtcagggaatcaagccatgcttaatatttaacaatcacttatatgtgtgtcgaagagtttgttttgtttgtcatgtattggtacaagcagatacagtataaactcacaaacacagatttgaaaataatgcacatatggtgttcaaatttgaacctttctcatggatttttgtggtgtgggccaatatggtgtttacattatataattcctgctgtggcaagtaaagcacacnnnnnnnnnctcctaaaatgtttttccctgtgtatcctattatggatactggttttgttaattatgattctttattttctctcctttttttaggatatagcagtaatgctattactgaaatgaatttcctttttctgaaatgtaatcattgatgcttgaatgatagaattttagtactgtaaacaggctttagtcattaatgtgagagacttagaaaaaatgcttagagtggactattaaatgtgcctaaatgaattttgcagtaactggtattcttgggttttcctacttaatacacagtaattcagaacttgtattctattatgagtttagcagtcttttggagtgaccagcaactttgatgtttgcactaagattttatttggaatgcaagagaggttgaaagaggattcagtagtacacatacaactaatttatttgaactatatgttgaagacatctaccagtttctccaaatgccttttttaaaactcatcacagaagattggtgaaaatgctgagtatgacacttttcttcttgcatgcatgtcagctacataaacagttttgtacaatgaaaattactaatttgtttgacattccatgttaaactacggtcatgttcagcttcattgcatgtaatgtagacctagtccatcagatcatgtgttctggagagtgttctttattcaataaagttttaatttagtatacctcgtgc

SEQ ID NO: 62544 - DNA, 841 bp, Homo Sapiens
ttggaccttttcccagaacactcgggtgcctcgcctgcccgaatttgctgactgggctcaggaacagggagatgctcctgccattttatttgacaaagagttctgcgagtggatgatccagcaaatagggccaaaacttgatgggaaaatcccggtgtccagagggtttcctatcgctgaagtgttcacgctgaagcccctggagtttggcaagcccaacactttggtctgttttgtcagtaatctcttcccacccatgctgacagtgaactggcagcatcattccatccctgtggaaggatttgggcctacttttgtctcagctgtcgatggactcagcttccaggccttttcttacttaaacttcacaccagaaccttctgacattttctcctgcattgtgactcacgaaattgaccgctacacagcaattgcctattgggtaccccggaacgcactgccctcagatctgctggagaatgtgctgtgtggcgtggcctttggcctgggtgtgctgggcatcatcgtgggcattgttctcatcatctacttccggaagccttgctcaggtgactgattcttccagaccagagtttgatgccagcagcttcggccatccaaacagaggatgctcagatttctcacatcctgcccaggatctcctcttagggtagaagaagtctctgggacatccctggggtgtgtgtgtagatttcccacctggggactctgctgtccctgggcttgcatcccagggatcccagagtggcctgcctatcacaaccacatcccttccccccacaaggcaataaatctcatttctttaaaaaaaacctcgtgc

SEQ ID NO: 62545 - DNA, 627 bp, Homo Sapiens
  misc_feature (142)..(153): n is a, c, g, or t
aaaccagggagcagcaactattgagatggtttctgtgttcagtgaaaaattttatttcattgagacaattttttctttatccacagtaattttttgacactgtcatcatgaaactacccttaggaaaataagattacctgcnnnnnnnnnnnngaaatgagttatggaataggaacagttatgtgatgattttgaaactttaacttagagcttcattactttaagaatggaaaacaacctttgagtttgatttcccaaagtttcataaagcccctaagctcatgattttcatcaactctttgcccacatagtcatttacctccacagccgtttgttgtcatagaaggggtggtggtgtttggatttgatttttttcaacttgcagtgagaaataggataggtgacaaaaccttacttgttttcttaagacaattcagtgcttgagcatctctgtcagaaatggaatgaaatactgttagccaattagaattattttatgtattgttattgtgttttgctgatttttatatgaaaatataattattcattcttgatctctggaagcaatcattattatgaggatcattttactttggaaacactttcataataaagataagtattaag

SEQ ID NO: 62546 - DNA, 1194 bp, Homo Sapiens
  misc_feature (151)..(167): n is a, c, g, or t
  misc_feature (305)..(314): n is a, c, g, or t
  misc_feature (966)..(981): n is a, c, g, or t
gcacgaggcggcttcctatgagaaacaccagaagcattactttccacttctacttacagtaattgcaagaggagacctcacattcaggactggcctagtgaacgtaatccatgctttaaactggccattaaacagtcccacatggttggannnnnnnnnnnnnnnnngagttgtgctttcacaaaaccttgtcaaagacctcatgcaatatcactttgaaagttattttctgtttactacacaaacattgtaatataactgttaatactatttatatatttgaaaggtataaaaggtaggagttnnnnnnnnnncctctatgtgtagatattaactcagaacttacaatatacagggagaagacatgttgcaatacaagctaattctagctgctcagtaacctctggagtttttaaagggacattttcctgtactttttcaaataatgatgtttaaaaattatcttgacataagcgtcatatacctttgcaaaaggatggttgtttgcagttagccctggccccatccttcctatttctgtagtatgctgcagctttaatcagaaagtccatggttgctgcttcctgatctccgagttactctttccaaattgtcttcttacactgttgctgaaggtcactctgtacacgtaatggaaactgattttgccaagctcttacaaggtggttcatctatcgatggcatccgcatttggtatcttttacacttcaaccaaaaatttattaggtatttttcaatgctaagtcttgccttttattttttaatttcactgccaagtttgcagtggttctaagtgaatctgtgggcattttagcctgtggtcttgccagatctttgcgaattacatgcatatatgtctattattcaatatctgtcatataatatctatttggaagaagaaactttctcttgtagtgcctcttgacaaagcacaatttcccgccnnnnnnnnnnnnnnnngtgaaatgaaaaaaacaaattgtgttttattgcggtatcaacaatgtgaataaggattaacatattgtaaatgttcttttttccatgtaaatcaactatctttgttatcactaagtgataattaatttttaacttatgtgcattgttaggctgttagaattttttggttgttaaaataaacgcattcaataaatatgactttgtttgtcagtt

SEQ ID NO: 62547 - DNA, 662 bp, Homo Sapiens
cgaagatggcggaggtgcaggtcctggtgcttgatggtcgaggccatctcctgggccgcctggcggccatcgtggctaaacaggtactgctgggccggaaggtggtggtcgtacgctgtgaaggcatcaacatttctggcaatttctacagaaacaagttgaagtacctggctttcctccgcaagcggatgaacaccaacccttcccgaggcccctaccacttccgggcccccagccgcatcttctggcggaccgtgcgaggtatgctgccccacaaaaccaagcgaggccaggccgctctggaccgtctcaaggtgtttgacggcatcccaccgccctacgacaagaaaaagcggatggtggttcctgctgccctcaaggtcgtgcgtctgaagcctacaagaaagtttgcctatctggggcgcctggctcacgaggttggctggaagtaccaggcagtgacagccaccctggaggagaagaggaaagagaaagccaagatccactaccggaagaagaaacagctcatgaggctacggaaacaggccgagaagaacgtggagaagaaaattgacaaatacacagaggtcctcaagacccacggactcctggtctgagcccaataaagactgttaattcctcgtgccgaattcctgcagccc

SEQ ID NO: 62548 - DNA, 1309 bp, Homo Sapiens
  misc_feature (619)..(628): n is a, c, g, or t
tgacagaatgagactgcatctcaaaaaataataatgaaactttccaaaacaaagtgccaggaccagctgggttcactgatgtgtttttgagatacttaaggtagaaatgataccaagtctctaccatctctttcagaaaataaaagcagagataacacttcccaactcattttgtgaggccagtattaccctaatagcaaaaccaggcaaagatattacaagaaaggaaaactacagatcaatatttccattgaacacagatgcagaaatcctcaaaatattagcaaatcaggaatgcaaggcttgttcaacatttgatattcagtgtaatccattgcatgcattagcagctcaaagatgaaatacgatcatatcaataggtacagaaaaagcatttgacaaaatccaatatccattcatgttaaaacctctcaacacagaaggaatacaggagaacttactcaagttggtaaagaacatactacaaaaaaccctacagctaacattatccttgatgtttccaactagacactttcctactaagatcaggaacatggcaaggaacaccacaccactgcttttcagcattgtactggaagtgctatataatgcagtgttnnnnnnnnnngaaataaaatgcacatagatttgaaaggatgaaatacaactttgttcacaagtaacatgattgtctttgtagagaattctaaataacaaaaaccctgctgacattaataagcaattacagcaggattgcaggatacagtcctcaggtagatgataaaaaggaattggacatcaagtcattaaaagacacggagaaaccctaaatgcttattgttaagtgaaaaccaatctgaaaaggctttctattttgtatgattgcaattatcatgacattttgggagaggcaaaactattgagccagtgaaaggaccagtggttgctgagagttgaggggaaaggagggatggcaggtagagaggtgatttttaaggcagtgaaagtactctctagggtactgtaatttgtcaaaacgcagagaatggaaaacagtgaacggaaaacacagagtaaaccctaatgtcaactctggacttcagttaataataatgtatcactgttggctcattaattgtaacaaatgaaccataatgatgcaagatgttaatgattggggagcctgtggaagatgggaggggaaagggttatatgagaattctctatactttttgctcaactttctgtaaccctaaagctactctaaaaaatgaagtgtatcaagtaaataaataaccaaccctcgtgc

SEQ ID NO: 62549 - DNA, 509 bp, Homo Sapiens
  misc_feature (64)..(80): n is a, c, g, or t
gcgccttcgtgctggtcctgtacgacgagctcaagaaggtgatctaagggccgcggcctcctcnnnnnnnnnnnnnnnnncaggggaaccaagagaaccacgtagaatcctcaaccgtgcggaccatcaaccttcgagaaattccagttgtctttttcccagccgcatcctgcctgtagatggccggggaaggctctagaaaaggggcgcattgcgatccaaccatcggcagccgattccgtgtcttgatcacggggtgggagggaaccgtggcgtccctgcgtggggcccatgggtgagacactccagtactgagacctagagtccagatgcttgtaggagccaagtcgtgttctaagtatttatttaaaacaaaagaatcacgttttcccatttgtacttcagcgctagcccctgttttgcacagccgagtactggcgagtatgttctatgttgggcctcctgctgcaaaacaataaacagaggacgcagaggtcctcctgcctggc

SEQ ID NO: 62550 - DNA, 1176 bp, Homo Sapiens
  misc_feature (181)..(189): n is a, c, g, or t
gcacgagggttttagagagaaaatgttcatctgtgcagaggatgcattttcttccattaattctggaaaaaacgttcacagttatatatatggtattttgcaaaaggactattaatagaaccttttgagatgaattaatgtaagaatattttttaaataggcttactgtcaaattgcaacnnnnnnnnnagatacagagtggaaaacagtgctaagtcatttggcacctccttacaaatatttttcatggtcacatttattaaatgttactacatttctgaatttttgaaaaatgtattttatcattaaatggcattattttaaagggtgaaaaactgacacagtcaattcagaaaatggactgaagtctgaataaggtcattgcatttaaaaagcatataactgtacttgactgatgagggaggtgttactttcattgtatataggtcttatttcataaacagatatcctgtatcaaataaaagtatttgttatatatttgaagttatgcatggaaaggagtgtgtttaaattgttacaaacaataatgcgtcattaaaggccatgctgatcttgcataactataagtactatgaatgaatttggttggttttggtgttgtacagctcacatgtttacacactcagtgccctaatttcccctgagggaatcgctttttaagtgatccttacagtggtgttttatgttactttattacagagctccttggttttttacttctgcacttaaatttttttaaataacatgatgatggtacattttcctctattgtctagctaagggctttcggtccaccagtaaataagatcaaatgctcttaaatgttcctgttaccatcctaatgtaaatactggatttttctgtcatttagcaccatgctgcttctgtctgtcttaatgctggcattaagatcatgagccctttttctccagtagtacaggctttgaaaactacttctattaagttattgatgcaatttgatattttttcataatctatatttaaacaaaattacatcattgcatcatcttttctaaattcatctccattaaaacttgccttaagctaccagattgcttttgccaccattggccatactgtgtgtttgtttgtttaatttactttcacaataaacttctgggtagtacctcgtgc

SEQ ID NO: 62551 - DNA, 1130 bp, Homo Sapiens
  misc_feature (1035)..(1058): n is a, c, g, or t
gtatagatgataataatagaaagcacagtttactaacatggtaaaccaacggagttcaagtcaagtcagttaataccctaagaatagatttttatttcttattctgaaaacttgctacacagggacttatctaacccatagtgtgctctgttgctgacttgattcaagttgcagcgtgttttgcgctgactctaaggtgcggaaatcctcacacctggcaaaggagaattcaaactgaactttttgaatataaggcaaaaacttcaagataagggaatatgattgatgattggtacgaaaaatgtcaaaatgtgttcccctaatacacgacaaaatagagtgacttctggacataaatctgccatttattaaaccattcactacaacaaataaataggtataaaagtggaattggaatttttatacttatttgttgtagtgaatggtttaataaaaatagaaatcactggtaatttccaccccaaactaaactatttcccttcttttaaaaaaatacacaaccaagattttaatgtaaaatattttgctttaattgtattttatgccttgattaatgaaacatggaaatattgattttcagttttggtcacctgaggaacctatctttgtttgcttttggaaaagcccattttctaaacagatacaatattgccacaacaatgtgcagaaacctttttgataataaaaaattgttctttgcctctaagtggatatttgcaattattttctctctcctaactagactgtaaaaagggctgctttagatcctgtagcttactccagttattagttattaacaaacacccaagtctcgaagatatttttaattaaaaaagaaggcatattcagagttctttttaaataaatgttgtttacttttataggcatctttaaacttctggattttggtatgccatttaaaaatacttccagatacacatggaaattagtaatactgcagccgtatccttgcaaacacatctgtcagtgtcaaaggtttcaaggtttttcttnnnnnnnnnnnnnnnnnnnnnnnncacctatactgcccaaatgggaggattagatacatggttagaaatccctcaggaaaagtgttttcctcgtgc

SEQ ID NO: 62552 - DNA, 934 bp, Homo Sapiens
cctttgcccaggtaaacattgattcatcttcacgtgggctggtatcagtccacatactatggctcattcgttaccccgggcactcctggactctcagtttagttaccagcatgccatgaagaatctgtcgttctcatttatgatcccataaaaactgcccaaggatctctctcactaaaggcatacagactgactcctaaactgatggaagtttgtaaagaaaaggattttcccctgaagcattgaaaaaagcaaatatcacctttgagtacatgtttgaagaagtgccgattgtaattaaaaattcacatctgatcaatgtcctaatgtgggaacttgaaaagaagtcagctgttgcagataaacatgaattgctcagccttgccagcagcaatcatttggggaagaatctacagttgctgatggacagagtggatgaaatgagccaagatatagttaaatacaacacatacatgaggaatactagtaaacaacagcagcagaaacatcagtatcagcagcgtcgccagcaggagaatatgcagcgccagagccgaggagaacccccgctccctgaggaggacctgtccaaactcttcaaaccaccacagccgcctgccaggatggactcgctgctcattgcaggccagataaacacttactgccagaacatcaaggagttcactgcccaaaacttaggcaagctcttcatggcccaggctcttcaagaatacaacaactaagaaaaggaagtttccagaaaagaagttaacatgaactcttgaagtcacaccagggcaactcttggaagaaatatatttgcatattgaaaagcacagaggatttctttagtgtcattgccgattttggctataacagtgtctttctagccataataaaataaaaccctcgtgccgaattcctgcagcccggg

SEQ ID NO: 62553 - DNA, 1289 bp, Homo Sapiens
  misc_feature (929)..(938): n is a, c, g, or t
cccctaaaaaaatcccccgggctgcaggaattcggcacgaggagaccttgtctctaaaaataataatagtaataaaaataacgttttatgactatttattgcaaggtcagatttacagattgttataaattgttgagaaatttttgtgattagaatatgaaggaaaaagctttgttggtaaaagtgacatgttaaggggctatgaagtaaatatgctgcagttaattgtgctaagttaaaatacagtttagttatttgctttaaaataaactcttctttttttctttaaagtatactacctcaaaactcattatgttgtcagagccctagagctggctagtgtaacactgactatgagtaggtgggcccaccacttgagttgaggtgatttcatggtgtctttccaggctcttgatagggtgtcactgcatgcaagccatgaatctgttttgagaatcctctccattttcccaaataaaaacctatcccaacagtgactatatcactcagcattggatctaaatataaaagtggtgctttcagtgtttttggcagatagtgttccataacctttccatcagaagggatttagacaccttagaggtccgtgctacatcttcacagttcctccgaataaccttaggtggtagtgttacttgcctttgacacctgtgcatatgttttaatgactagatccaaactgtgttgttcttaaatcaaaaattggataatttttaatatttatgtattaatcacacagtgtgctctctgaagttctcttaagccttcagtttatactcttaattttctttctgagctggggaactgactttgcactttggttacacagaacattggtttccaatttagtttaactgaaatttgctgctgatatgttgagtttgttctttaaaaaatatttcatatannnnnnnnnncctccttagaagaacagacctaactagcgaatgtatgaatgaaaatgcatttatttcagagccgacatgaagagtttagtttttttactttttaaactgggaataagagtatgccagctgcattagatgtaactaatcatatttaaatatatttccctttgactttagaccttttgaagtttgtataaacttgttttgaaatacagtctccacttacgaatgtcataacaaaatacttttttgcatgataaaaaattactttgattacaaaaggcatattttttcatggtttttgcaatgagaggaagtgtaatgattattttaatatttttattaaaactgtatattttt

SEQ ID NO: 62554 - DNA, 1103 bp, Homo Sapiens
gcacgaggcagacctctaaagagacgagcttgtgggtgtggacctgaacacaggtgagccaatggtggcagcagaagtaggcgtatgggataactattgtgtaaagaaacagcttcttcactcctgcactgtgattgccaccaacattctcttggttgatgagatcatgcgagctggaatgtcttctctgaaaggttgaattgaagcttcctctgtatctgaatcttgaagactgcaaagtgatcctgaggattacagctgtggaatttttgtccaagcttcaaataattttgaaagaaattttcccatatgaaaaaaggagagaacactggcatctgttgaaatttggaagttctgaaattatagtatttttaaaaattgcactgaagtgtatacacataaagcaggtcttttatccagtgaacaggatgttttgctttagcagcagtgacataaaattccatgttagataagcatatgttacttaccttgttattaaatatttcttgaaaagcaaattttaatggtttaattttatgtggacgtatgttaaattatccaactaccctattgttaagcatttggttttaaaatttttatgctaatataaatgctcaagtaatttaaaatattgaaagcatccctgttggtataaatttctgagtaaatgcattggatcagttggactttgaacgcctttgaaatggctttgctaaaatgctcccgccacaaagttgtaggaaatgggaagaggagtcaactagaggcaagggagttgagagagctgcaactgtaaagggcaagaacaggcagaggtaaaaagatgatggaaggtgtggtgactaagggccacggttattgggtgaaatttgagattgtaggccaactgtattttcaagcttttgaacttaggcaaaatattcatcgcaaagtctctagcgtcatatttttctcacccaaattacgtttccacgagattatttatatatagttggtctatctctgcagtccttgaaggtgaagttgtgtgttactaggctgtgttttgggatgtcagcagtggcctgaagtgagttgtgcaataaatgttaagttgaaacctc

SEQ ID NO: 62555 - DNA, 913 bp, Homo Sapiens
  misc_feature (67)..(79): n is a, c, g, or t
attcgatttaatttctcaaaagatactctgttatccagaagattaaaatgcctacattgagtgcttnnnnnnnnnnnnncaactgtgatgatgtgagcagaatggcaagtaagttaagcatttttgatcctgtaatcatggtatcattacaatgaaaggaattcacaaactactgccagaggaagtttgttttttaatttaagagggaaatataacctataaatttgtttcttccaagcttagctcttaaatttggagactcaaagttaaacatcctcaacagagttttatttataattttgaattgtcaatttgtattttgctactgatctgtgatcaaccattttaactttcatctctagggatgtttaacatttataattgcaaaataaaccaactataaaaaaagaaactaagagagaattggtactttaattacttgtgtgtttgcaaataggctccattttccatgttgagtagattataaccttattaactatgcataggcctaagaaaggtggcaatgaactgtgcatgtaaattttaaatgggtactttgtgcaattcgttaaaagaagatactctatgaatatgattctatatattgaaatcagaaaacctaccaaacaaaaacatcagaagctgctgccataatgactattttctactgtaggctgctttggaaataattcccatatccttgctttgtaagttggtaatatcactatgcatttctacacattttataaatttgatttatgcagattttgatacactgtatgtttctgtagaaattgtataaatattcaaaattttattaggataaatttgagaaacttacgtatatcttaattctgggttgcttgttttttaggtgacaaaaataaaatattgtattttaattcaaaaaaga

SEQ ID NO: 62556 - DNA, 832 bp, Homo Sapiens
  misc_feature (541)..(572): n is a, c, g, or t
ccaaataatagaattgctccctaccagctgaacagggaggagtctgtgcagtttctgacacttgttgttgaacatggctaaatacaatgggtatcgctgagactaagttgtagaaattaacaaatgtgctgcttggttaaaatggctacactcatctgactcattctttattctattttagttggtttgtatcttgcctaaggtgcgtagtccaactcttggtattaccctcctaatagtcatactagtagtcatactccctggtgtagtgtattctctaaaagctttaaatgtctgcatgcagccagccatcaaatagtgaatggtctctctttggctggaattacaaaactcagagaaatgtgtcatcaggagaacatcataacccatgaaggataaaagccccaaatggtggtaactgataatagcactaatgctttaagatttggtcacactctcacctaggtgagcgcattgagccagtggtgctaaatgctacatactccaactgaaatgttaaggaagaagatagatccaattnnnnnnnnnnnnnnnnnnnnnnnnnnnnnnnngaacacaggagattccagtctacttgagttagcataatacagaagtcccctctactttaacttttacaaaaaagtaacctgaactaatctgatgttaaccaatgtatttatttctgtggttctgtttccttgttccaatttgacaaaacccactgttcttgtattgtattgcccagggggagctatcactgtacttgtagagtggtgctgctttaattcataaatcacaaataaaagccaattagctctataactaaaaa

SEQ ID NO: 62557 - DNA, 726 bp, Homo Sapiens
gcacgagggccgagcgatgggcatctctcgggacaactggcacaagcgccgcaaaaccgggggcaagagaaagccctaccacaagaagcggaagtatgagttggggcgcccagctgccaacaccaagattggcccccgccgcatccacacagtccgtgtgcggggaggtaacaagaaataccgtgccctgaggttggacgtggggaatttctcctggggctcagagtgttgtactcgtaaaacaaggatcatcgatgttgtctacaatgcatctaataacgagctggttcgtaccaagaccctggtgaagaattgcatcgtgctcatcgacagcacaccgtaccgacagtggtacgagtcccactatgcgctgcccctgggccgcaagaagggagccaagctgactcctgaggaagaagagattttaaacaaaaaacgatctaaaaaaattcagaagaaatatgatgaaaggaaaaagaatgccaaaatcagcagtctcctggaggagcagttccagcagggcaagcttcttgcgtgcatcgcttcaaggccgggacagtgtggccgagcagatggctatgtgctagagggcaaagagttggagttctatcttaggaaaatcaaggcccgcaaaggcaaataaatccttgttttgtcttcacccatgtaataaaggtgtttattgttttgttggccaccctcgtgccgaattcctgcagcccgggg

SEQ ID NO: 62558 - DNA, 1512 bp, Homo Sapiens
  misc_feature (969)..(983): n is a, c, g, or t
gcacgagggcagcgagagacaacaagaagggacgggtcacaccccggcacatcctgctggctgtggccaatgatgaagagctgaatcagctgctaaaaggagtcaccatagccagtgggggtgtgttacccaacatccaccccgagttgctagcgaagaagcggggatccaaaggaaagttggaagccatcatcacaccacccccagccaaaaaggccaagtctccatcccagaagaagcctgtatctaaaaaagcaggaggcaagaaaggggcccggaaatccaagaagaagcagggtgaagtcagtaaggcagccagcgccgacagcacaaccgagggcacacctgccgacggcttcacagtcctctccaccaagagcctcttccttggccagaagttgcaagttgtacaggctgacattgcctcgatcgacagtgatgctgtcgttcacccgacaaacactgacttctacatcggtggtgaagtaggaaacacgctggagaagaaaggtggcaaggagtttgtggaagctgtcctggaactccggaaaaagaacgggcccttggaagtagctggagctgctgtcagcgcaggccatggcctgcctgccaagtttgtgatccactgtaatagtccagtttggggtgcagacaagtgtgaagaacttctggaaaagacagtgaaaaactgcttggccctggctgatgataagaagctgaaatccattgcatttccatccatcggcagcggcaggaacggttttccaaagcagacagcagctcagctgattctgaaggccatctccagttacttcgtgtctacaatgtcctcttccatcaaaacggtgtacttcgtgctttttgacagcgagagtataggcatctatgtgcaggaaatggccaagctggacgccaactaggctgagcaatgacagaaccagctgcaccatgtaccccaccttcagtttnnnnnnnnnnnnnnntccccttcactcctactgggaggtgggacccctttcattttcagttttgctcatctagggaaaataaggctttggtttccagtttaattgtttttgaccttctaaaatgtttttatgttagcactgatagttggcattactgttgttaagcactgtgttccagaccgtgtctgacttagtgtaacctaggagattttatagttttattttaatgaaaccctgattgacgcacagcagtggggagaacagcgtcttttacctgtcaccgaagccaggaagccccgtttgtaagcgtgtgttgtggtgctttattgtacatcctccagtggcgttctttttactctaatgttcttttggtttcccccctcagaagaatcatgaatttgcaacagacctaatttttggttactttttgtcttattgatggatttgaaaatgaaagatttaataaggcaaagcagaatctgttgtccttaattatatttgcaatttggaatttgtgtgagttgatttagtaaaatcctcgtgc

SEQ ID NO: 62559 - DNA, 786 bp, Homo Sapiens
ggttttcccagtcaggacgttgtaaacggcgggccagtgagcgcggtaatacgacccacttatagggggatgtggtaacgggcccccccctacaagacgctacttcccctatcatagaagagcttatcacctttcatgatcacgccctcataatcattttccttatctgcttcctagtcctgtatgcccttttcctaacactcacaacaaaactaactaatactaacatctcagacgctcaggaaatagaaaccgtctgaactatcctgcccgccatcatcctagtcctcatcgccctcccatccctacgcatcctttacataacagacgaggtcaacgatccctcccttaccatcaaatcaattggccaccaatggtactgaacctacgagtacaccgactacggcggactaatcttcaactcctacatacttcccccattattcctagaaccaggcgacctgcgactccttgacgttgacaatcgagtagtactcccgattgaagcccccattcgtataataattacatcacaagacgtcttgcactcatgagctgtccccacattaggcttaaaaacagatgcaattcccggacgtctaaaccaaaccactttcaccgctacacgaccgggggtatactacggtcaatgctctgaaatctgtggagcaaaccacagtttcatgcccatcgtcctagaattaattcccctaaaaatctttgaaatagggcccgtatttaccctatagcaccccctctaccccctctagagccaaaacctcgtgc

SEQ ID NO: 62560 - DNA, 1059 bp, Homo Sapiens
  misc_feature (345)..(355): n is a, c, g, or t
aattgcaagcatatttcttttaatgactccagtaaaattaagcatcaagtaaacaagtggaaagtgacctacacttttaacttgtctcactagtgcctaaatgtagtaaaggctgcttaagttttgtatgtagttggattttttggagtccgaaggtatccatctgcagaaattgaggcccaaattgaatttggattcaagtggattctaaatactttgcttatcttgaagagagaagcttcataaggaataaacaagttgaatagagaaaacactgattgataataggcattttagtggtctttttaatgttttctgctgtgaaacatttcaagatttattgannnnnnnnnnncactttccccatcacactcacacgcacgctcacactttttatttgccataatgaaccgtccagcccctgtggagatctcctatgagaacatgcgttttctgataactcacaaccctaccaatgctactctcaacaagttcacagaggaacttaagaagtatggagtgacgactttggttcgagtttgtgatgctacatatgataaagctccagttgaaaaagaaggaatccacgttctagattggccatttgatgatggagctccaccccctaatcagatagtagatgattggttaaacctgttaaaaaccaaatttcgtgaagagccaggttgctgtgttgcagtgcattgtgttgcaggattgggaagggcacctgtgctggttgcacttgctttgattgaatgtggaatgaagtacgaagatgcagttcagtttataagacaaaaaagaaggggagcgttcaattccaaacagctgctttatttggagaaataccgacctaagagaggattacgcttcagagataccaatgggcattgctgtgttcagtagaaggaaatgtaaacgaaggctgacttgattgtgccatttagagggaactcttggtacctggaaatgtgaatttggaatattacctgtgtcatcaaagtagtgagggattcagtactcctcaaccactctcctaatgattggaacaaaagc

SEQ ID NO: 62561 - DNA, 1404 bp, Homo Sapiens
cccccgggctgcaggaattcggcacgaggcgaggttatcaagtgcaaggctgcagttgcttgggaggctggaaagcctctctccatagaggagatagaggtggcacccccaaaggctcatgaagttcgaatcaagatcattgccactgcggtttgccacaccgatgcctataccctgagtggagctgatcctgagggttgttttccagtgatcttgggacatgaaggtgctggaattgtggaaagtgttggtgagggagttactaagctgaaggcgggtgacactgtcatcccactttacatcccacagtgtggagaatgcaaattttgtctaaatcctaaaactaacctttgccagaagataagagtcactcaagggaaaggattaatgccagatggtaccagcagatttacttgcaaaggaaagacaattttgcattacatgggaaccagcacattttctgaatacacagttgtggctgatatctctgttgctaaaatagatcctttagcacctttggataaagtctgccttctaggttgtggcatttcaaccggttatggtgctgctgtgaacactgccaagttggagcctggctctgtttgtgccgtctttggtctgggaggagtcggattggcagttatcatgggctgtaaagtggctggtgcttcccggatcattggtgtggacatcaataaagataaatttgcaagggccaaagagtttggagccactgaatgtattaacccctcaggattttagtaaacccatccaggaagtgctcattgagatgaccgatggaggagtggactattccttgaatgtattggtaatgtgaaggtcatgagagcagcacttgaggcatgtcacaagggctggggcgtcagcgtcgtggttggagtagctgcttcaggtgaagaaattgccactcgtccattccagctggtaacaggtcgcacatggaaaggcactgcctttggaggatggaagagtgtagaaagtgtcccaaagttggtgtctgaatatatgtccaaaaagataaaagttgatgaatttgtgactcacaatctgtcttttgatgaaatcaacaaagcctttgaactgatgcattctggaaagagcattcgaactgttgtaaagatttaattcaaaagagaaaaataatgtccatcctgtcgtgatgtgataggagcagcttaacaggcagggagaagcgcctccaacctcacagcctcgtagagcttcacagctactccagaaaatagggttatgtgtgtcattcatgaatctctataatcaaggacaaggataattcagtcatgaacctgttttctggatgctcctccacataaataattgctagtttattaaggaatattttaacataataaaagtaatttttac

SEQ ID NO: 62562 - DNA, 904 bp, Homo Sapiens
ccacgcgtccgcacgacgctgcaccaggcaccatggcggtggcaagaacaagcgccttacgaaaggcggcaaaaagggagccaagaagaaagtggttgatccattttctaagaaagattggtatgatgtgaaagcacctgctatgttcaatataagaaatattggaaagacgctcgtcaccaggacccaaggaaccaaaattgcatctgatggtctcaagggtcgtgtgtttgaagtgagtcttgctgatttgcagaatgatgaagttgcatttagaaaattcaagctgattactgaagatgttcagggtaaaaactgcctgactaacttccatggcatggatcttacccgtgacaaaatgtgttccatggtcaaaaaatggcagacaatgattgaagctcacgttgatgtcaagactaccgatggttacttgcttcgtctgttctgtgttggttttactaaaaaacgcaacaatcagatacggaagacctcttatgctcagcaccaacaggtccgccaaatccggaagaagatgatggaaatcatgacccgagaggtgcagacaaatgacttgaaagaagtggtcaataaattgattccagacagcattggaaaagacatagaaaaggcttgccaatctatttatcctctccatgatgtcttcgttagaaaagtaaaaatgctgaagaagcccaagtttgaattgggaaagctcatggagcttcatggtgaaggcagtagttctggaaaagccactggggacgagacaggtgctaaagttgaacgagctgatggatatgaaccaccagtccaagaatctgtttaaagttcagacttcaaatagtggcaaataaaaagtgctatttgtgaaaacctcgtgccgaattcctgcagcccgggggat

SEQ ID NO: 62563 - DNA, 1482 bp, Homo Sapiens
  misc_feature (1357)..(1369): n is a, c, g, or t
gcacgagggttttgtttttaccatgactttcccttttcactctcccactgcgtggcttcccctggactcatttgtccaatgagggcttgcaagctggagccttgtttttccagcagcagatttgggaagaaagccaggcagagcgaggcctgggactcactcacagtaaccctttcaccaaaaggcccagggcggaagggagtggactctgccggcaggagctgagaaatcctctgagtagcgggaagtgcggtacagtctgggcattctgatgtttgtgattgtttttctcacggtgatgaaaaagtatgtgctataagtagaggagcgctaactcctgacttgagctaattatgaaaatgcagccctccctgatctgagacgttgggaggcaagaataaagtgaaaaagtatatgtaatcccaacatctaattttagtcttagaaactcaaactattaataagtggaaaaagtttaatgatatgcatgtaatgcctttgccatattcctctccttcttagatcacatattcctattttcctgaaaattctgcttttgagaatgctttctgtcccgtaattgtgtatgtctttctttccagctccatgatgcgttatctgggtctggaaacccaaaccctcaaggatggcctggcgcatgggggaaccagcctgctgggggcagggggctacccaggggcttcctatcctgggggcctaccccgggcaggcacccccaggggcttatcctggacaggcacctccaggcgcctaccctggagcacctggagcttatcccggagcacctgcacctggagtctacccagggccacccagcggccctggggcctacccatcttctggacagccaagtgccaccggagcctaccctgccactggcccctatggcgcccctgctgggccactgattgtgccttataacctgcctttgcctgggggagtggtgcctcgcatgctgataacaattctgggcacggtgaagcccaatgcaaacagaattgctttagatttccaaagagggaatgatgttgccttccactttaacccacgcttcaatgagaacaacaggagagtcattgtttgcaatacaaagctggataataactggggaagggaagaaagacagtcggttttcccatttgaaagtgggaaaccattcaaaatacaagtactggttgaacctgaccacttcaaggttgcagtgaatgatgctcacttgttgcagtacaatcatcgggttaaaaaactcaatgaaatcagcaaactgggaatttctggtgacatagacctcaccagtgcttcatataccatgatataatctgaaaggggcagattnnnnnnnnnnnnngaatctaaaccttacatgtgtaaaggtttcatgttcactgtgagtgaaaatttttacattcatcaatatccctcttgtaagtcatctacttaataaatattacagcctcgtgc

SEQ ID NO: 62564 - DNA, 1372 bp, Homo Sapiens
gcacaaggcaaaaagcagctaggctaaaggagaaatatgaaaaggatattgctgcatatcgggccaagggcaaaagtgaagcaggaaagaagggccctggcaggccaacaggctcaaagaagaagaacgaaccagaatatgaagaggaggaggaggaaaaagaaaatgaacatgaggaggaagaggatgaggatgaaaaacaaatggttatcctttaatgatgcgtgtggaatgtgtgtgtgtgctcaggcatgattttgctaagattttgattcagttttacttctggactatgttcataatcaagcctgaactgatttctgcataattgataagattctctgtgaaaaaggaacttttaatgatggctttctggatttttttgatggactactgtggagttcccattgataatccctgatgttgaatgtcaactaatccactcaggaaggttattattgatgagactggtaatttgatacagactattgatgtgccagatagcactactgctgctgctccagagaataatcctattatctagcaaatgtaatagcagccacaggcaccacaagtaagaagaattcaagccaagatgacctttttcccacaagtgatactccaagagcaaaagtattgaaaatagaagaagtcagtgatacttcatccctgcaacctcaagccagtttgaagcaggatgtatgtcagtcttacagcgagaaaatgcccatagagatagaacaaaaacctgctcagtttgccacaactgttcttcctccaattcctgcaaactcgttccagctcgaatctgatttcagacaattgaaaagttctccagatatgttgtatcagtatttaaagcaaattgaaccatctttgtatcctaagttgtttcagaaaaatctggatccagatgtattcaaccagatcgttaaaattctgcatgacttttacattgagaaagaaaagccattactcatctttgaaatcttacaaagactttctgaactaaaaaggtttgatatggcagtgatgtttatgtcagaaacagagaaaaagattgcacgtgcattatttaatcacatagacaagtcaggattgaaggatagttctgtcgaagaactcaagaaaagatacggtggttgatttccatttttgctgaaataattgtttttgactttcatatgtaaattttttctactgaaagtgttttgctttttaagaaaatgaaattatatagcaggaaaggactatctttgaacataagttaattaactataaggtgaattgtgatttaactagtgagaattgtattcaagtgaactctgtttttctgaaaataaaaatataaacaatgagatacacctcgtgc

SEQ ID NO: 62565 - DNA, 1053 bp, Homo Sapiens
ggctgcaggaattcggcacgagggctacctccagtattactgctaagagacattcttcatccaccaatgttgtacatgtatgaaaatggtgtactgtatactttaacatgccccatactttgtattggagagtacaataatgtaaatcctaaaagcaccactattttagcataataaaagaaagtccaaagagctcctatatagactactccagataacttcgcttctttgatacttgtagcttattgtaattttttttaagaaattcaaggtcattattattgtacaaaataagcgctttgattaacacagctatatagtttttttaatttttaaaaaacctgtggagacggtgatcttgtctttaaaacatgatagtcctttcagtataatgtcttagattaaagacgttgcctttaatatctgttgggaaggaaatgtccagacttttcaaatctcttattatatgtttcctttttttgtttacatagggaacaatgtttatagtcgtgtgtacagtgggggtctacaacaagaagtgtatattttcaaacaattttttaatgatttaacaatttttgtaaatcattttcaggcttctgcagctgtagattctcactgtgaatcccttgcttgctcatgcataagtgtatttgcaataccaaatatacaggtttagtatttttgcctgttagtgattgtttcacatgtgtaacgttttggttgagatgttaaatggtggacgagtactgtggatgtgaatgtgggaagtaattttaatcatatgtaattggtcacaaggcctaatttgcagtaactattgctgttttatttaacaatgccttgttgctttgtatgcattaatgtttggatgtaaagattgtgtgtctatccaacagggagccacagtatttaaattgaccaacctaatgttacaactactttgaggtggccaaatgtaaactaaaagccttaattaaagtggtgcaattttgtataacttagcatcagtagttcaataaatttggattgccatgcaagggcttgcattat

SEQ ID NO: 62566 - DNA, 855 bp, Homo Sapiens
acatttataattgcaaatatatttattacaattacagattagttatgttatatacacaaatataattttaactataaaatcccaactagttacatttaaatattgatctgtagaagccaattagagtcttctagtcccctaactttaccttccttaaattatacaaaaataaaatctgatagtttgatttcaagttaaagatgaagaagtgttacatttcatcactcagaaatggaacttttacctgtctgtacaaagccttttacatgctacattgacacttaaagcaccattaacaagactttaaatgtataaaatgtttaattaaaacctccaaagattttctctttaagattacgggggtttaactttgttctaactagaattgggatgaaacaagaattttgcttttttctccttcagtccaactttaaaatagtcctttctgtccttcttatcaccttctgatcacttcttccaaggaggctagtatatggaagaactcttaatcaagctttcactcatttggtagtgaggttagaatcccatggggaacaattttccaaaatccaatgaaagatgtctcattattttcaaatacacagaggtgctaggtttaagaaacaggaaacacaacgttaagtctcggaaataaaatgtttcagcctggttttaaaagaatgcctgtatgttgtcaaaaggcttttttcaaggcaaatgacgcctgctttccaaccgacattgctgttgcttgaaactagcctgttttcatgttattagaccatcctgtaaatgtgctccctatgattacctaaagtggaggtgcacaaaacacacagaatcccagcctcgtgc

SEQ ID NO: 62567 - DNA, 843 bp, Homo Sapiens
gcacgaggctagagttctgaaaatgaatatttaaatagtttcaggaataaaaagtacaaaagaagactggttaaaatttgttgctacaaagaaaaggacacagaaagacagccaagagagagataatgttaattcaagactctcgaagagaagcttcagtgcagatggatttgagatgctacaaaacccagtaaaagattcaaaagaaatgtttcaaacctacaaacagatgtacctggagaagagaagcagaagccttggtagcagtcctgtaaaataattacaagatgtggttttgtaattgccactgggaaatttctttccttttctgttcaaaatatttcgctgaaactaatgagaaatgccatgataaagatttctcagagtttggttcccactttcattgtatttcattgaaagtgcttaattaaaatggcttgagaactttgggtagccatgtgtaagaaatggatggtattcaccggggaaacaaggtatttgaatttctactttattgaaccagatttaccattattttaaaaggaatgcttatacaaatcaatttgaaattctacccatcttgagggaggaccgttcctcagttaaggacttgtttatttaaatgggactgtaaatatgttttggtttctaagctatattagcaaaatttatttttcaaaaatgcccactgtgatgtgaatgtcaaaatatattcttaagtgttttataactaattgtaaactttttttcagaagtcttattttatacttgtgaaactgaacacaattttgggacaacgtttaaacattacttttcatacttgaaataaacatttatttttta

SEQ ID NO: 62568 - DNA, 1009 bp, Homo Sapiens
gcaccggcaggcggattcattccacttaaaacctgaaaacattggaccacacaaagttttactgatttcaggtaaaaacaataattgaagatgtccagcaaaacagcaagccccaacaatatagcccaggcaaggagaactgtgcagcagttaagattagaagcctccattgaaagaataaaggttttgaaggcatcagcggacctcatgtcctactgtgaggaacatgccaggagtgaccctttgctgataggaataccaacttcagaaaaccctttcaaggataaaaaaacttgcatcattttatagtggaatagagaaacagctcctcgcctcttcccaacaacgcaaattatgagcagctccttgaagagatttaccttcagcttatttggtaaccactgctaataactaaaatgttctcagcttggaataatggactctgaagtctctattttccaagttgtcctttctcttaaaataccctttactgatttaatacagaataacaatcttattttccacttggtaactatggctttatgttgggctactgtttaaggaaagttgatctgggcctttttaaaaacataattatatactttagaaatacaagggattccgatatgtcaggacctaaatggcctaagcacctgtcaaattaaaattccaaaattcattgaaatcctaaagccttgatattatattctttataaggcgtgtgccagcctgtatagtatataagagagaggggtgtttgtgtgtatatatatatgcctttgtgtatacacttatcaaagctattttcttatgaaaacgtccctctctccataccatcagtttctcagttccagaagttatacctttattttgagctgtgtataggtagaataaaaaattcctttcatatcgttattgtacaaaaagtaaagagtatcctaaagattgtattcattgtaatcaagtaatgcaatcatctctcctctcttgaaatcttggtgcctcgtgc

SEQ ID NO: 62569 - DNA, 640 bp, Homo Sapiens
gcacgaggattggccaaggggaatgatgatgccatgtagatcctgtttgacttttttatggctgtatttgtaaaccgctacacacccttgtctgttcttgatgcagttgctatttaggatgagttaagtgcctggggagtccctcaaaaggttaaagggattcccatcattggaatcttatcaccagataggcaagtttatgaccaaacaagagagtactggctttatcctctaacctcatattttctcccacttggcaagtcctttgtggcatttattcatcagtcagggtgtccgattggtcctaaaacttccaaaggctgcttgtcatagaagccattgcatctataaagcaacggctcgtgttaaatggtatctcctttctgaggctcctactaaaagtcatttgttacctaaacttatgtgcttaacaggcaatgcttctcagaccacaaagcagaaagaagaagaaaagctcctgactaaatcagggctgggcttagacagagttgatctgtagaatatctttaaaggagagatgtcaactttctgcactattcccagcctctgctcctccctgtctaccctctcccctccctctttctaagggccctcgtgccgaattcctgcagcccggggg

SEQ ID NO: 62570 - DNA, 879 bp, Homo Sapiens
aaaaaagaagtttgaggagctcattgacttcaaccacgacggcatcgtgacgccggaggagctggagagctacatggaccccatgaacgagtacaccgcgctgaacgaggccaagcagatgatcgctgtcgccgacgagaaccagaaccaccacctggagcccgaggaggtgctcaagtacagcgagttcttcacgggcagcaagctggtggactacgcgcgcagcgtgcacgaggagttttgagcgcccggccgcgccccgcgccgccccccacgcaccaccggggcggcctcgcgggtgactccgggctccgtggctgtcccggaccccacctcttccctgccgcccgccaccggccgaccgaccgcggctgccccagttgatgagcggcgtgtcccctctgcagcgcgcaccccggcggggctttggctgtgacgcggtcggggcgcggggctgggctgtggccccgcggcgccgcctcctccctggtccctcgaaatcgtggcatctcacttttgagaacgaaatctcgcttcagtcactctgccgaaggcgctgacggcatcgcggccggaacctctgggcccggcccctcccagggccgccgctccgtgggaaaaaacagctcctccatttccttgaaaactgaacgattattaaaaatagattaaacttcgctggaaatgagtagccaggaagttcaggggagggtgccgggtccttcccgggcctggcgtgtcggagccacccaggtcccgcagctgccgctgagaaaatgcaaatatttgttgtgacaagaatcacatacatttactttaaatatagttgccttttttggtcaaaaaaagagggaaacctcgtgccgaattcctgcagcc

SEQ ID NO: 62571 - DNA, 1401 bp, Homo Sapiens
  misc_feature (226)..(234): n is a, c, g, or t
gcacgaggccccaccggaactcaagcaagtgcaagtctaagccccagattgctgctctgaaagaggagacagaagaagaggtgcaagatacaaggctttagagagcagcataaatgttgacatgggacatttgctcatggaattggagctcgtgggacagtcacctcatggaattggagctcgtggaacagttacctctgcctcagaaaacaaggatgaattaagnnnnnnnnnaaaaaagaaacatttggtaaggggaattgaggacactgatatgggtcttgataaatggcttcctggcaatagtcaaattgtgtgaaaggtacttcaaatccttgaagatttaccacttgtgttttgcaagccagattttcctgaaaacccttgccatgtgctagtaattggaaaggcagctctaaatgtcaatcagcctagttgatcagcttattgtctagtgaaactcgttaatttgtagtgttggagaagaactgaaatcatacttcttagggttatgattaagtaatgataactggaaacttcagcggtttatataagcttgtattcctttttctctcctctccccatgatgtttagaaacacaactatattgtttgctaagcattccaactatctcatttccaagcaagtattagaataccacaggatggttcccttgatgaagaagtgacaagctcacagacctttgaactagagtttagctggaaaagtatgttagtgcaaattgtcacaggacagcccttctttccacagaagctccaggtagagggtgtgtaagtagataggccatgggcactgtgggtagacacacatgaagtccaagcatttagatgtataggttgatggtggtagttttcaaggctagatgtatgtacttcatgcgtctacactaagagagaatgagaggcacactgaagaagcccaatttgggagccaaattttttctttaggaaatatttattttaataatgtttcaaacatatataacaatgctgtattttaaaagaatgattatgaattacatttgtataaaataatttttatatttgaaatattgactttttatggcactagtatttttatgaaatattatgttaaaactgggacaggggagaacctagggtgatattaaccaggggccatgaatcaccttttggtttggagggaaaccttgggggtgatgcagttgttgcccacagctgtatgattcccagccagcacagccttttagatgcagttttgaagaagatggtaccacccgtttgactgtttccatcaagggtacactgccttttcaactccaaactgaattttaagaagactgcattatatttatttctgtaagaaaatatcacttgtcaataaaatccctacatttgtggg

SEQ ID NO: 62572 - DNA, 1083 bp, Homo Sapiens
gcacgaggattacttatcattagtttattataaaagagaaatatggaaattatttacatgacgaaagatttcagaacttcagtggaatgggcagcatcatgttgatgccatttcaatagtgacttatttcagtctacgtactttccaagaatgtcaccatctctaaataggaaataatcctgcaagtgaaaaaaaccattagttaagacaactaattgcaaatatctgacttctttttagaattattaagtttacacaccttgtcatctagaactactttggtgcctccatattctgggagaagaactttatctccaactttcacgctaactggttgaatctctccacccttaaaaaaggaaggatgtttattagcaaagatatctagttcacccaacataaacagttaacttttaaatcactacaactaatgaaacatggtcactcaaatccaattatattaaaaatatatttcgtggctaagtgatacgactcatactagaattacagatcttcactcaaaaataccactgtagttacactttgaaataatacacagtggcttaaactaaaacctgactccaacgtaaaagttcaagaaaatattctggaaaagctaactttagttaactaaagctaactttataactgttaaatattaacataacttatcaactatatgaaataaacctgcaacagtagccagcacccagaaaatgccatatacaaatggtcatattttccttctttcaacatacaaaaatttaaagtttttttggatttagaacatactcttgtgattgttttgttccctccaaagaacagatttggggaaagggactgcagctaagtgtccactccccaaagtcttcctattcctaactccatgacagctcctcagtagagctttcctcctcagaagcaactagaacaatgcagttaacattatttggccccaacggcgtttactgtgtattttggctgagatctttagaagcccgaggcctaaacaattaactgaggaacatctaaaacagaggtgtgcaatcttttggcttccctgggccacacgggacctcgtgc

SEQ ID NO: 62573 - DNA, 828 bp, Homo Sapiens
  misc_feature (265)..(319): n is a, c, g, or t
ccatgtttggggaagaagctgaacggcacgcacccccgaggatgtgattcgcaacgcccttgcctgcttcgacgaggaaagcctcaggtttcatcccatgaggaccacctccgggagctgctcaccaccatgggtgaccgcttcacagatgaggaagtggacgagatgtaccgggaggcacccatgataagaaaggcaacttcaaatacgtggagttcacccgcatcctcaaacatggcgccaaggataaagacgactaggccannnnnnnnnnnnnnnnnnnnnnnnnnnnnnnnnnnnnnnnnnnnnnnnnnnnnnntccataccagctccctgcccatgaccctcgctcagggatccccctttgaggggttagggtcccagttcccagtggaagaaacaggccaggagaagtgcgtgccgagctgaggcagatgttcccacagtgaccccagagccctgggctatagtctctgacccctccaaggaaagaccaccttctggggacatgggctggagggcaggacctagaggcaccaagggaaggccccattccggggctgttccccgaggaggaagggaaggggctctgtgtgccccccaggaggaagaggccctgagtcctgggatcagacaccccttcacgtgtatccccacacaaatgcaagctcaccaaggtcccctctcagtccccttccctacaccctgaccggccactgctgcacacccacccagagcacgccacccgccatgggagtgtgctcaggagtcgcgggcagcgtggacatctgtcccagagggggcagaatctccaatagagcctcgtgc

SEQ ID NO: 62574 - DNA, 1175 bp, Homo Sapiens
ccccgggctgcaggggcacgtggcagcgcgcctggccctgggcttggaggcgccggcgccctggatccgccggccgtggtcgccgagtcggtgtcgtccttgaccatcgccgacgcgttcattgcagccggcgagagctcagctccgaccccgccgcgccccgcgcttcccaggaggttcatctgctccttccctgactgcagcgccaattacagcaaagcctggaagcttgacgcgcacctgtgcaagcacacaggagaaaagccgtttgtttgtgcagccaatggctgtgatcaaaaattcaacacaaaatcaaacttgaagaaacattttgaacgcaaacatgaaaatcaacaaaaacaatatatatgcagttttgaagactgtaagaagacctttaagaaacatcagcagctgaaaatccatcagtgccagcataccaatgaacctctattcaagtgtacccaggaaggatgtgggaaacactttgcatcacccagcaagctgaaacgacatgccaaggcccacgagggctatgtatgtcaaaaaggatgttcctttgtggcaaaaacatggacggaacttctgaaacatgtgagagaaacccataaagaggaaatactatgtgaagtatgccggaaaacatttaaacgcaaagattaccttaagcaacacatgaaaactcatgccccagaaagggatgtatgtcgctgtccaagagaaggctgtggaagaacctatacaactgtgtttaatctccaaagccatatcctctccttccatgaggaaagccgcccttttgtgtgtgaacatgctggctgtggcaaaacatttgcaatgaaacaaagtctcactaggcatgctgttgtacatgatcctgacaagaagaaaatgaagctcaaagtcaaaaaatctcgtgaaaaacggagtttggcctctcatctcagtggatatatccctcccaaaaggaaacaagggcaaggcttatctttgtgtcaaaacggagagtcacccaactgtgtggaagacaagatgctctcgacagttgcagtacttacccttggctaagaactgcactgctttgtttaaaggactgcagaccaaggagcgagctttctctcagagcatgcttttctttattaaaattactgatgcagaacaaaaaaacctcgtgc

SEQ ID NO: 62575 - DNA, 583 bp, Homo Sapiens
  misc_feature (74)..(90): n is a, c, g, or t
cccccgggctgcaggaattcggcacgaggagtcctccggggtgggtgggtgggcagggaggggctggggcaggnnnnnnnnnnnnnnnnnttgtgggttggccaggaggttcccccgaccaggttggggagacttggggccagcgcttcgggtctggtaaatatgtatgatgtgttgtgcttttttaaccaaggaggggccagtggattcccacagcacaaccggtcccttccatgccctgggatgcctcaccacacccaggtctcttcctttgctctgaggtcccttcaaggcctccccaatccaggccaaagccccatgtgccttgtccaggaactgcctgggccatgcgaggggccagcagagggcgccaccaccacctgacggctggggacccacccagcccctctcccctctctgctccagactcacttgccattgccaggagatggccccaacaagcaccccgcttttgcagcagaggagctgagttggcagaccgggcccccctgaaccgcaccccatcccaccagccccggccttgctttgtctggcctcacgtgtctcagattttctaagaacc

SEQ ID NO: 62576 - DNA, 846 bp, Homo Sapiens
caagtatatgccagtattcatgtggtttttccaggtagcttctccaccagatgtggcttctggaaaacctagcagaggctaaacaaagtcccaggtccagagatagactggtccagagacagatgtgatcctaggtccagagatacactgtgaccatgggatggatggactctaggagccagtctttgggaggccgaggtccctgagctgatggggtagtgttgtctgtttcaggtctcccggggcctcagtgccagcaccatggacctctcttcaagcagctgacattcaacccggcccccaggtctgctgggtccccccacccccacagccctcacagcattccccattgctcctggctcttccccacccctaggtgggacagtgaaggggagcagtttaaccagaagattgctgctgcccttagggtctcagctccctcctcaggaatccctcttaggaaggaccctcaggacaccctctctgcaccctgtggtcctctagagtagctagctctgaggccccaaggtgggtacaaagcaggtatggccctcagagatgcagcctgctgctggcttttcagtcagagggttgggggctggccagccaagctgccttgccctggccgctcttactccctccctctgctgtctcacttcaggtccatgtatttcacttttcttaaataaaagaatcaggtaacctttctgtgacttgagtcctgattgaagagggtatgaagcagggcttgtgttggggcccttcacagaaggtgaggggcagtgatggatggagcagcaggaggagtgttgattcttggatctctcctctcttcctccctcgtgc

SEQ ID NO: 62577 - DNA, 1216 bp, Homo Sapiens
  misc_feature (1115)..(1136): n is a, c, g, or t
cttgagtgccattcatgcattcattcactcaacaaaaattttttgagcacctactatgtggcccctaggaaggaagaaaaacccttttaactgggtaaatcatttctatcttgacttattgccaggatcggctgatatttcaacagaagctttaacttgatcagaagggctaaaatatgaaaatatattgcctaggtcttcctctccagtaaaaaagatgtatacattcagacattgttatggcctttaaaataataaaggaacaataaaaggctcattaatcccacacgtgttattgagcatctgtagcatcctactgacaccatgttcatatcgctttttttaaaaccttagtatatacatgtataagtgaaatgcttccttaagtgtcaactgaacagattttaaaatagtctacgttttttaccgtaggttttttttctcacattccagccattttcttggtttgtaagttagcatgaaaatggaaatcatgattgaactaaaagcccatccgtccatctcttcgatatccaggtgcatcatgggcttcatcagcaaggagcgagagcgtgccctgttgaaggaccagcagccggggaccttcctgctgcggttcagtgagagctcccgggaaggggccatcacattcacatgggtggagcggtcccagaacggaggcgaacctgacttccatgcggttgaaccctacacgaagaaagaactttctgctgttactttcccgacatcattcgcaattacaaagtcatgggtgctgaaaatattcctgagaatcccctgaagtatctgtatccaaatattgacaaagaccatgcctttggaaagtattactccaggccaaaagaagccccagagccaatggaacttggtggccctaaaggaactggatatatcaagactgagttgatttttgtgtctgaagtgtaagtgaacaccgaagaatgacatgtttacaaacctcaaaccagccttgctcctgggtggggcctgttgaagatgcttgtattttacttttcccttgtaaatgctattcccatcacagctgaacttgttgagatccccgggttactgcctatcagccttttatttctttnnnnnnnnnnnnnnnnnnnnnnccaaatttgtatttaaggtatataaattttcccaaaactgataccctttgaaaaagtataaataaaaagagcaaaagatg

SEQ ID NO: 62578 - DNA, 545 bp, Homo Sapiens
tgggggttgcgtcgctctctggtaaaggcgtgcaggtgttggccgcggcctctgagctgggatgagccgtgctcccggtggaagcaagggagcccagccggagccatggccagtacagtggtagcagttggactgaccattgctgctgcaggatttgcaggccgttacgttttgcaagccatgaagcatatggagcctcaagtaaaacaagtttttcaaagcctaccaaaatctgccttcagtggtggctattatagaggtgggtttgaacccaaaatgacaaaacgggaagcagcattaatactaggtgtaagccctactgccaataaagggaaaataagagatgctcatcgacgaattatgcttttaaatcatcctgacaaaggaggatctccttatatagcagccaaaatcaatgaagctaaagatttactagaaggtcaagctaaaaaatgaagtaaatgtatgatgaattttaagttcgtattagtttatgtatatgagtactaagtttttataataaaatgcctcagagccctcgtgct

SEQ ID NO: 62579 - DNA, 1215 bp, Homo Sapiens
  misc_feature (132)..(140): n is a, c, g, or t
gcacgaggagaaggaattggaacgtgaagaattatggaaaaaattagaggagctaaagctaaagaaagctctagaaaaacagaatagtgcttacaacatgcacagtattctcagcaatacaagtgccgaatnnnnnnnnngcctcccacctctgccggataggcagagttttgtatgcttttttgaaatatgtaaaaattacaaaacaaacctcatcagtataatataattaaaaggccaattttttctggcaactgtaaatggaaaaatatatggactaaacgtagccctgtgctgtatcatggccatattatattgtaacctttgtctaatcattggatttattgtgtcacttctgaagtttcacagaaatgaatgaattttatcatctatgatatgagtgagataattatgggagtggtaagaattatgacttgaattcttctttgattgtgttgcacatagatacggtagtctgctctgtatatttttcccttttataatgtgcttttcacactgctgcaaaccttagttacatcctaggaaaaaatacttcctaaaataaaactaaggtatcatccttacccttctctttgtctcacccagaaatatgatggggggaattacctgccctaacccctccctcaataaatacattactgtactctggaatttaggcaaaaccttaaatctccaggctttttaaagcacaaaatataaataaaagctgggaaagtaaaccaaaattcttcagattgttcctcatgaatatcccccttcctctgcaattctccagagtggtaacagatgggtagaggcagctcaggtgaattacccagcttgcctctcaattcattcctcctcttcctctcaaaggctgaaggcagggcctttccagtcctcacaacctgtccttcacctagtccctcctgacccagggatggaggctttgagtcccacagtgtggtgatacagagcactagttgtcactgcctggctttatttaaaggaactgcagtaggcttcctctgtagagctctgaaaaggttgactatatagaggtcttgtatgtttttacttggtcaagtatttctcacatcttttgttatcagagtaccattccaatctcttaacttgcagttgtgtggaaaactgttttgtaatgaaagatcttcattgggggattgagcagcatttaataaagtctatgtttgt

SEQ ID NO: 62580 - DNA, 500 bp, Homo Sapiens
gcacgaggcgtatttctgctggccagagacgtcgcgtccctggctgggcattcagtcacccccaggaaaggaggtgtgcctagattgatcggtataaggctcactctcccgccccccaaagtggttgatcgttggaacgagaaaagggccatgttcggagtgtatgacaacatcgggatcctgggaaactttgaaaagcaccccaaagaactgatcagggggcccatatggcttcgaggttggaaagggaatgaattgcaacgttgtatccgaaagaggaaaatggttggaagtagaatgttcgctgatgacctgcacaaccttaataaacgcatccgctatctctacaaacactttaaccgacatgggaagtttcgatagaagagaaagctgagaacttcggaaaaggctcatctgtcaccctggagaagggaaactgtacttttccctgtgaggaaacggctttgtattttctctgtaataaaatggggcttctttgg

SEQ ID NO: 62581 - DNA, 517 bp, Homo Sapiens
ccacgcgtccggactagttctcccaaagtgctgggattacaggcgtgagccactgcgcccggccacattcagttcttatcaaagaaataacccagacttaatcttgaatgatacgattatgcccaatattaagtaaaaaatataagaaaaggttatcttaaatagatcttaggcaaaataccagctgatgaaggcatctgatgccttcatctgttcagtcatctccaaaaacagtaaaaataaccactttttgttgggcaatatgaaatttttaaaggagtagaataccaaatgatagaaacagactgcctgaattgagaattttgatttcttaaagtgtgtttctttctaaattgctgttccttaatttgattaatttaattcatgtattatgattaaatctgaggcagatgagcttacaagtattgaaataattactaattaatcacaaatgtgaagttatgcatgatgtaaaaaatacaaacattctaattaaaggctttgcaacacaaaaaaa

SEQ ID NO: 62582 - DNA, 777 bp, Homo Sapiens
  misc_feature (158)..(166): n is a, c, g, or t
  misc_feature (209)..(239): n is a, c, g, or t
ccacgcgtccgcttttttaactgaaagctgaatccttccatttcttctgcacatctacttgcttaaattgtgggcaaaagagaaaaagaaggattgatcagagcattgtgcaatacagtttcattaactccttccctcgctcccccaaaaatttgaannnnnnnnncaacactcttacacctgttatggaaaatgtcaacctttgtaannnnnnnnnnnnnnnnnnnnnnnnnnnnnnnccataaacatttgcaccacttgtggcttttgaatatcttccacagagggaagtttaaaacccaaacttccaaaggtttaaactacctcaaaacactttcccatgagtgtgatccacattgttaggtgctgacctagacagagatgaactgaggtccttgttttgttttgttcataatacaaaggtgctaattaatagtatttcagatacttgaagaatgttgatggtgctagaagaatttgagaagaaatactcctgtattgagttgtatcgtgtggtgtattttttaaaaaatttgatttagcattcatattttccatcttattcccaattaaaagtatgcagattatttgcccaaagttgtcctcttcttcagattcagcatttgttctttgccagtctcattttcatcttcttccatggttccacagaagctttgtttcttgggcaagcagaaaaattaaattgtacctattttgtatatgtgagatgtttaaataaattgtgaaaaaaatgaaataaagcatgtttggttttcc

SEQ ID NO: 62583 - DNA, 1263 bp, Homo Sapiens
  misc_feature (184)..(211): n is a, c, g, or t
gcacgaggaagaagccttttatgttagatgaggaaggggatacccaaacagaggaaacccagccttcaaaaacaaaagaagtggagccagagccaactgaggacaaggatttggaagctgatgaagaggacactaggaaaaaagatgcttctgatgatctagatgacttgaacttctttaatcnnnnnnnnnnnnnnnnnnnnnnnnnnnngatatttgatattgatgaagctgaagaaggtgtaaaggatcttaagattgaaagtgatgttcaagaaccaactgaaccagaggatgaccttgacattatgcttggcaataaaaagaagaaaaagaagaatgttaagttcccagatgaggatgaaatactagagaaagatgaagctctagaagatgaagacaacaaaaaagatgatggtatctcattcagtaatcagacaggccctgcttgggcaggctcagaaagagactacacatacgaggagctgctgaatcgagtgttcaacatcatgagggaaaagaatccagatatggttgctggggagaaaaggaaatttgtcatgaaacctccacaagtcgtccgagtaggaaccaagaaaacttcttttgtcaactttacagatatctgtaaactattacatcgtcagcccaaacatctccttgcatttttgttggctgaattgggtacaagtggttctatagatggtaataaccaacttgtaatcaaaggaagattccaacagaaacagatagaaaatgtcttgagaagatatatcaaggaatatgtcacttgtcacacatgccgatcaccggacacaatcctgcagaaggacacacgactctatttcctacagtgcgaaacttgtcattctagatgttctgttgccagtatcaaaaccggcttccaggctgtcacgggcaagcgagcacagctccgtgccaaagctaactaatttgctaatcactgattttgcaaagcttgttgtggagatgtggctggacaggtttgccatcagagtggatataccgttgtattaaaaacaagataaaaaagctgccaagatttttggcgagtggttggtctgaagtccttgcaagacgctgatgctcaagctgttgacatactcattgcctactttaacacctgtcagagaaacgtgatatggggtaaggaggtgcttttttaaaatcgttcatagacttctgtaaaatgcaagataaattaaagttattataacagtgaaaaaaacctgcagcccgggg

SEQ ID NO: 62584 - DNA, 838 bp, Homo Sapiens
gtccgccgattcctcctctttggtcgcggcgtccttgggctggggtcagaaaaaggctacaaacttcctagcacatgagaagatctggttcgacaagttcaaatatgacgacgcagaaaggagattctaggagcagatgaacgggcctgtggcaggtgcctcccgccaggagaacggcgccagcgtgatcctccgtgacattgcgagagccagagagaacatccagaaatccctggctggaagctcaggcccggctgaacgtgctggagaagagctcgcctggccaccgggccacggccccacagacccagcacgtatctcccatgcgccaagtggagcccccagccaagaagccagccacaccagcagaggatgacgaggatgatgacattgacctgtttggcagtgacaatgaggaggaggacaaggaggcggcacagctgcgggaggagcggctacggcagtacgcggagaagaaggccaagaagcctgcactggtggccaagtcctccatcctgctggatgtcaagccttgggatgatgagacggacatggctcagctggaggcctgtgtgcgctctatccagctggacgggctggtctggggggcttccaagctggtgcccgtgggctacggtatccggaagctacagattcagtgtgtggtggaggacgacaaggtggggacagacttgctggaggaggagatcaccaagtttgaggagcacgtgcagagtgtcgatatcgcagctttcaacaagatctgaagcctgagtgtgtgtacgtgcgcgcgtgcgtgaggccctgccacgattaaagactgagaccggcctcgtgc

SEQ ID NO: 62585 - DNA, 966 bp, Homo Sapiens
accttcttcgaccccgccggaggaggagaccccattctataccaacacctattctgatttttcggtcaccctgaagtttatattcttatcctaccaggcttcggaataatctcccatattgtaacttactactccggaaaaaaagaaccatttggatacataggtatggtctgagctatgatatcaattggcttcctagggtttatcgtgtgagcacaccatatatttacagtaggaatagacgtagacacacgagcatatttcacctccgctaccataatcatcgctatccccaccggcgtcaaagtatttagctgactcgccacactccacggaagcaatatgaaatgatctgctgcagtgctctgagccctaggattcatctttcttttcaccgtaggtggcctgactggcattgtattagcaaactcatcactagacatcgtactacacgacacgtactacgttgtagcccacttccactatgtcctatcaataggagctgtatttgccatcataggaggcttcattcactgatttcccctattctcaggctacaccctagaccaaacctacgccaaaatccatttcactatcatattcatcggcgtaaatctaactttcttcccacaacactttctcggcctatccggaatgccccgacgttactcggactaccccgatgcatacaccacatgaaacatcctatcatctgtaggctcattcatttctctaacagcagtaatattaataattttcatgatttgagaagccttcgcttcgaagcgaaaagtcctaatagtagaagaaccctccataaacctggagtgactatatggatgccccccaccctaccacacattcgaagaacccgtatacataaaatctagacaaaaaaggaaggaatcgaaccccccaaagctggtttcaagccaaccccatggcctccatgacttttcctcgtgc

SEQ ID NO: 62586 - DNA, 1910 bp, Homo Sapiens
  misc_feature (693)..(705): n is a, c, g, or t
  misc_feature (772)..(782): n is a, c, g, or t
  misc_feature (901)..(909): n is a, c, g, or t
  misc_feature (1194)..(1203): n is a, c, g, or t
  misc_feature (1803)..(1824): n is a, c, g, or t
gcacgaggcttgatcttatatctgagtctcccatcaaaggacgtgcacagccttatgatcccaatttttacgatgaaacctatgattatggtggttttacaatgatgtttgatgaccgtcgcggacgcccagtgggatttcccatgcggggaagaggtggttttgacagaatgcctcctggtcggggtgggcgtcccatgcctccatctagaagagattatgatgatatgagccctcgtcgagacctcatggcctatgacagaagagggagacctggagaccgttacgacggcatggttggtttcagtgctgatgaaacttgggactctgcaatagatacatggagcccatcagaatggcagatggcttatgaaccacagggtggctccggatatgattattcctatgcagggggtcgtggctcatatggtgatcttggtggacctattattactacacaagtaactattcccaaagatttggctggatctattattggcaaaggtggtcagcggattaaacaaatccgtcatgagtcgggagcttcgatcaaaattgatgagcctttagaaggatccgaagatcggatcattaccattacaggaacacaggaccagatacagaatgcacagtatttgctgcagaacagtgtgaagcagtatgcagatgttgaaggattctaatgcaagatannnnnnnnnnnnnatagtgtgaagcagtattctggaaagtttttttaagactagtgaagaactgaaggagtcctgcatcnnnnnnnnnnnatctgcttctgtttaaaaagccaacattcctttgcttcataggtgttctgcatttgaggtgtagtgaaatctttgctgttcaccagatgtaatgttttagttccttacaaacagggttnnnnnnnnnaagggcgtgcaaaaactaacattgaaattttgaaacagcagcagagtgagtggattttatttttcgttattgttggtggtttaaaaaattccccccatgtaattattgtgaacaccttgctttgtggtcactgtaacatttggggggtgggacagggaggaaaagtaacaatagtccacatgtccctggcatctgttcagagcagtgtgcagaatgtaatgctcttttgtaagaaacgttttatgatttttaaaataaatttagtgaaccatttttggtggtcannnnnnnnnnaagacagtcattttaaaatggtggctgaatttcccaacccacccccaaactaaacactaagtttaattttcagctcctctgttggacatataagtgcatctcttgttggacataggcaaaataacttggcaaacttagttctggtgatttcttgatggtttggaagtctattgctgggaagaaattccatcatacatattcatgcttataataagctggggattttttgtttgtttttgcaaatgcttgcccctacttttcaacaattttctatgttagttgtgaagaactaaggtggggagcagtactacaagttgagtaatggtatgagtatataccagaattctgattggcagcaagttttattaatcagaataacacttggttatggaagtgactaatgctgaaaaaattgattatttttattagataatttctcacctatagacttaaactgtcaatttgctctagtgtcttattagttaaactttgtaaaatatatatatacttgtttttccattgtatgcaaattgaaagaaaaagatgtaccatttctctgttgtatgttggattatgtaggaaatgtttgtgtacaattcnnnnnnnnnnnnnnnnnnnnnngttcctgtggatgttttgtgtagtatcttggcatttgtattgatagttaaaattcacttccaaataaataaaacaccccctcgtgc

SEQ ID NO: 62587 - DNA, 1634 bp, Homo Sapiens
  misc_feature (174)..(194): n is a, c, g, or t
gcacgagggtaaggtcctattatcacacacttcaaacacggtagatcagaaacccactatgatactcgcttcctgtctgtttgctaaggaatataaaatggctagaaagtttaatttgaaacctttgcctccatttggaatagtagacaccagttaagagggtgtcagatgccnnnnnnnnnnnnnnnnnnnnnggctggtccctgttgattggtcaaaaaacagctcagctaaaaggggaagttgtctgggtggttgctttttttctgacgtctgttcctcaggctggaagaaatgagcagaaaacaagggatgagtactttttaaagtatgtgcatgttacgtaatacctgtttctgggcaatgctgcttcttctgactcaacaaatggggagagcaaattgaaaatgcgtaaattggaaggcaagttctgaaattaaacgttgtactttggcctgatgttctgacctttaaggaagcaagagtttgtaaacttccaaatatttactattctgaactgccgtgtaaacctgacgtattcccaagtcaacataccagtataccaataggatgtgaataatgtgtgtgttgagtttaaaaccatagcagttttgctctggcaagtaatgaaagcgttctcgcttcctgagtgtgagctccagcagactgcagagtggccagtccacagttgtagcctgacttcagtgagttctgatgtgtgctttttgcaaatacatgttctcagaacagtgagatcatccagcagtggcctggactgcactcacataaaaatcatgagacagccatggctacttgtttctgtaatacatgcatgtgtgttttttaaaacctatgataggcctctgattctgcagctgcaacttttatggaatgttttccttctccacatctcatgtgatgctcttattacaggacacagcattgttggttttgccatgtactattttacctatgacccgtggattggcaagttattgtatcttgaggacttcttcgtgatgagtgattatagaggctttggcataggatcagaaattctgaagaatctaagccaggttgcaatgaggtgtcgctgcagcagcatgcacttcttggtagcagaatggaatgaaccatccatcaacttctataaaagaagaggtgcttctgatctgtccagtgaagagggttggagactgttcaagatcgacaaggagtacttgctaaaaatggcaacagaggagtgaggagtgctgctgtagatgacaacctccattctattttagaataaattcccaacttctcttgctttctatgctgtttgtagtgaaataatagaatgagcacccattccaaagctttattaccagtggcgttgttgcatgtttgaaatgaggtctgtttaaagtggcaatctcagatgcagtttggagagtcagatctttctccttgaatatctttcgataaacaacaaggtggtgtgatcttaatatatttgaaaaaaacttcattctcgtgagtcatttaaatgtgtacaatgtacacactggtacttagagtttctgtttgattcttttttaataaactactctttgatttaagaaaaacctcgtgccgaattcctgcagcccggg

SEQ ID NO: 62588 - DNA, 951 bp, Homo Sapiens
gcacgaggcttcgctaacgcctcccggctctcgtcagcctcccgccggccgtctccttaacaccgaacaccatgccttcaattaagttgcagagttctgatggagagatatttgaagttgatgtggaaattgccaaacaatctgtgactattaagaccatgttggaagatttgggaatggatgatgaaggagatgatgacccagttcctctaccaaatgtgaatgcagcaatattaaaaaaggtcattcagtggtgcacccaccacaaggatgaccctcctcctcctgaagatgatgagaacaaagaaaagcgaacagatgatatccctgtttgggaccaagaattcctgaaagttgaccaaggaacactttttgaactcattctggctgcaaactacttagacatcaaaggtttgcttgatgttacatgcaagactgttgccaatatgatcaaggggaaaactcctgaggagattcgcaagaccttcaatatcaaaaatgactttactgaagaggaggaagcccaggtacgcaaagagaaccagtggtgtgaagagaagtgaaatgttgtgcctgacactgtaacactgtaaggattgttccaaatactagttgcactgctctgtttataattgttaatattagacaaacagtagacaaatgcagcagcaagtcaattgtattagcagaatattgtcctcattgcatgtgtagtttgagcacagatcccaaaccttacggccaagtttcttctagtatgatggaaagtttcttttttctttgctctgaataaaactgaactgtgggttctctataagtggcattttgggctttccctcttttttgtaaagcaatgtctgcctagtttattgtccagttaactttagtgaccttttaaaagttggcattgtaaataaaacaacttgcaaaaaagttttctggaatagaaaa

SEQ ID NO: 62589 - DNA, 848 bp, Homo Sapiens
cccctcacctgtcaaccccaccacaggcatggtcataaggaaagggttaaaaaaagtaaaaggaattgggcaaatcttaccccgcctgtttcccaaaaacatcacctctagcatcaccagtattagaggcaccgcctgcccagtgacacatgtttaacggccgcggtaccctaaccgtgcaaaggtagcataatcacttgttccttaaatagggacctgtatgaatggctccacgagggttcagctgtctcttacttttaaccagtgaaattgacctgcccgtgaagaggcgggcatgacacagcaagacgagaagaccctatggagctttaatttattaatgcaaacagtacctaacaaacccacaggtcctaaactaccaaacctgcattaaaaatttcggttggggcgacctcggagcagaacccaacctccgagcagtacatgctaagacttcaccagtcaaagcgaactactatactcaattgatccaataacttgaccaacggaacaagttaccctagggataacagcgcaatcctattctagagtccatatcaacaatagggtttacgacctcgatgttggatcaggacatcccgatggtgcagccgctattaaaggttcgtttgttcaacgattaaagtcctacgtgatctgagttcagaccggagtaatccaggtcggtttctatttacttcaaattcctccctgtacgaaaggacaagagaaataaggcctacttcacaaagcgccttcccccgtaaatgatatcatctcaacttagtattatacccacacccacccaagaacagggtttgttaagatggcagagcccggcctcgtgc

SEQ ID NO: 62590 - DNA, 1048 bp, Homo Sapiens
  misc_feature (425)..(497): n is a, c, g, or t
ggaattttcccacaaagttaggggtgagatgtgttttcattttgaaacagggtccccttttaaagaatgcaactccaccgtccaaggggaaaaaccgctttatcaagcccatggcccctacgtaccataacccttaatcaaattttttgatcgaggggcgtaaggcctattcgaacctataaggagccccgcatttgactcaccgggaaacccgccaacggcggaaagaaagaaggaaccaaaggaaacggcttaggagctggcaaattagcggtcacctgccgctaaccccacaccgcgcggttatgcggcgtaccaggcgcgtccatcgctttcagatgcgcactttagaaagagatcgtgcgggcctcttcttattcccagctgcgaaaggagtatgcttgcaaagcgataagttgttaacnnnnnnnnnnnnnnnnnnnnnnnnnnnnnnnnnnnnnnnnnnnnnnnnnnnnnnnnnnnnnnnnnnnnnnnnnggttacggcccccccctccacgaaggatcaactgtctcttacttttaaccagtgaaatagacctggccgggaagaggcgggcataacacagcaagacgagaagaccctaacccacaggtcttaaattaccaaacctgcattaaaaatttcggttggggggacctcggagcagaacccaacctccgagcagtacatgttaagacttcaccagtcaaagcgaactactatactcaattgatccaataacttgaccaacggaacaagttaccctagggataacagcgcaatcctattctagagtccatatcaacaatagggtttacgacctcgatgttggatcaggacatcccgatggtgcagccgctattaaaggttcgtttgttcaacgattaaagtcctacgtgatctgagttcagaccggagtaatccaggtcggtttctatctacttcaaattcctccctgtacgaaaggacaagagaaataaggcctacttcacaaagcgccttcccccgtaaatgatatcatcctcgtgccgaattcctgcagcccg

SEQ ID NO: 62591 - DNA, 707 bp, Homo Sapiens
  misc_feature (649)..(667): n is a, c, g, or t
gcacgaggtttttttcaaaaaattttcctctttatttaaacataaaacgcatttacaacatgcaagttaacttaaaattaaacggtgtcttcccaaaccaagtatttgtgaatgtatcttcaagcactgaaaataaaccaacatattccacaggtagactcagactctcttctgtcacctcatgtcaaatggagttaagcacaaactgagagttacgcacagtagttttcttaagttaggcaaataatttaattaatcgccatgaataaatattctctttatttcattgagtttctcttctgaaccatctatcaatgccattcagaggaacgttaatatatccagtcaaaaagacactgcaaattgaaatgtgtcaatatcctagatgatcagaaattttcatttttaagagtaagtgctgtgtttaatgacctaccatagcaaaaagcagttcactgaaaacaaatttatgaaattcttggtacactttatgaaagtctgaaattataaatagaaaagaaccatcaagatactttttaaaaacctaacattgtatattctgaaccacatgctaattaaaattcgttgttcattacacagcaccaatacccatgatacatcttacaagaacaaaactaacatatttggnnnnnnnnnnnnnnnnnnnttctgcttcatttacgaatgttgccaagggagcctcgtgc

SEQ ID NO: 62592 - DNA, 1743 bp, Homo Sapiens
  misc_feature (395)..(412): n is a, c, g, or t
  misc_feature (681)..(726): n is a, c, g, or t
ccgggctgcaggaattcggcacgaggatttcattgagtttctcttctgaaccatctatcaatgccattcagaggaacgttaatatatccagtcaaaaagacactgcaaattgaaatgtgtcaatatcctagatgatcagaaattttcatttttaagagtaagtgctgtgtttaatgacctaccatagcaaaaagcagttcactgaaaacaaatttatgaaattcttggtacactttatgaaagtctgaaattataaatagaaaagaaccatcaagatactttttaaaaacctaacattgtatattctgaaccacatgctaattaaaattcgttgttcattacacagcaccaatacccatgatacatcttacaagaacaaaactaacatatttggnnnnnnnnnnnnnnnnnnttctgcttcatttacgaatgttgccaaaggaggcaagttttcaactgaaaacaaaacataaaggtctatgtggatgcagccaaatgtttctccatttagaaaatcatcataaaaggtggcagcactttttttgcttgttaactatattacttataactggctgcaccaacatttcatctcaatttttggagtgtttcttctgatcaatcctaaaagcaacacaatcattttagaggttgcagactacaacagcaaagatttttgactannnnnnnnnnnnnnnnnnnnnnnnnnnnnnnnnnnnnnnnnnnnnncaaaagtggaaattacaatagttacggaaatagaaaaataagccaattatgatctgagtcttctgactatggctccaaatttaatacaaatatctgtgtataaaacttttgcaaaaagttaattctgccagcaagatcctaacacagaactttccaagtttctctgctaaccttaaatccccattctctgtgaatttctgctaacacagttgcagtcaccgcccccctaccactgatgaagcaaatagtgaaatctctttccctattacttttacagtttcctaaaataagctgttgacttactttaatcatctgaggaaaaagtggcaaaaatacgtatacacttagtactgattacaaaattatcggctatggccaagaaaataatttatctaatgattattagtgacttgcaaacaatttactatttctagactaaagaaataaattagtgtacaaattagtgtagcaggttaaaaacacctcagggatttcagaccaaaattgacctatatatatttttaattcatcatatatctgtcctgtttcttcatttttctcaatttccacacgctataaatttaggtcggccaataaagtactaaccgtataaaattatgtttaatcctataatatcttaattcattttactaatattaaagatgacaaattattacctgtccaatacttatattagctagcaggctcaccagaataaagcagagtattttaattccatcaagacttgttgagtacagaatcaggaaaaagagaaatataattccttttccaaactcccttaaactaagatctgcttttgatactttaaaatatttctattcaaaataactcggcaacaggcatttcatgagataacaagtagccttgctcagtctcaaatgcctattaggcatttgtaacgtttcagtgctcaaacagtagttttcaggagcaaacttcagaaacaatacaagtaattttaaccgtgacctcgtgccgaattcctgcagcccgggg

SEQ ID NO: 62593 - DNA, 953 bp, Homo Sapiens
gcacgaggcccagaagaaccttcaagaggccaaagaacagtttgagagacagactgcagttctgcagcaacaggtcacagtgaatactgaagaattaaaaggaactgaggttcaactaacggagctgagacgcacctcccagagccttgagatagaactccagtcccatctcagcatgaaagagtctttggagcacactctagaggagaccaaggcccgttacagcagccagttagccaacctccagtcgctgttgagctctctggaggcccaactgatgcagattcggagtaacatggaacgccagaacaacgaataccatatccttcttgacataaagactcgacttgaacaggaaattgctacttaccgccgccttctggaaggagaagacgtaaaaactacagaatatcagttaagcaccctggaagagagagatataaagaaaaccaggaagattaagacagtcgtgcaagaagtagtggatggcaaggtcgtgtcatctgaagtcaaagaggtggaagaaaatatctaaatagctaccagaaggagatgctgctgaggttttgaaagaaatttggctataatcttatctttgctccctgcaagaaatcagccataagaaagcactattaatactctgcagtgattagaaggggtggggtggcgggaatcctatttatcagactctgtaattgaatataaatgttttactcagaggagctgcaaattgcctgcaaaaatgaaatccagtgagcactagaatatttaaaacatcattactgccatctttatcatgaagcacatcaattacaagctgtagaccacctaatatcaatttgtaggtaatgttcctgaaaattgcaatacatttcaattatactaaacctcacaaagtagaggaatccatgtaaattgcaaataaaccactttctaattttaaaacctcgtgc

SEQ ID NO: 62594 - DNA, 839 bp, Homo Sapiens
cccctgtagtcagtacagtggcatgcagcgcctcgggacgaccccccagccgtttttgagggtgctggagcccggggcatccgcatctccaactccagacacacggtgaaactatgggagcgatctcacaggcggcggggacctgtttgtgggcaatgagaaaatggccatgcagaacctaaatgaccgtctagcgagctacctagaaaaggtgcggaccctggagcagtccaactccaaacttgaagtgcaaatcaagcagtggtacgaaaccaacgccccgagggctggtcgcgactacagtgcatatcagttaagcaccctggaagagagagatataaagaaaaccaggaagattaagacagtcgtgcaagaagtagtggatggcaaggtcgtgtcatctgaagtcaaagaggtggaagaaaatatttaaatagctaccagaaggagatgctgctgaggttttgaaagaaatttggctataatcttatctttgctccctgcaagaaatcagccataagaaagcactattaatactctgcagtgattagaaggggtggggtggcgggaatcctatttatcagactctgtaattgaatataaatgttttactcagaggagctgcaaattgcctgcaaaaatgaaatccagtgagcactagaatatttaaaacatcattactgccatctttatcatgaagcacatcaattacaagctgtagaccacctaatatcaatttgtaggtaatgttcctgaaaattgcaatacatttcaattatactaaacctcacaaagtagaggaatccatgtaaattgcaaataaaccactttctaatttt

SEQ ID NO: 62595 - DNA, 642 bp, Homo Sapiens
cgcggcgtgagaagccatgagcagcaaagtctctcgcgacaccctgtacgaggcggtgcgggaagtcctgcacgggaaccagcgcaagcgccgcaagttcctggagacggtggagttgcagatcagcttgaagaactatgatccccagaaggacaagcgcttctcgggcaccgtcaggcttaagtccactccccgccctaagttctctgtgtgtgtcctgggggaccagcagcactgtgacgaggctaaggccgtggatatcccccacatggacatcgaggcgctgaaaaaactcaacaagaataaaaaactggtcaagaagctggccaagaagtatgatgcgtttttggcctcagagtctctgatcaagcagattccacgaatcctcggcccaggtttaaataaggcaggaaagttcccttccctgctcacacacaacgaaaacatggtggccaaagtggatgaggtgaagtccacaatcaagttccaaatgaagaaggtgttatgtctggctgtagctgttggtcacgtgaagatgacagacgatgagcttgtgtataacattcacctggctgtcaacttcttggtgtcattgctcaagaaaaactggcagaatgtcaaattctattaccagcctcgtgc

SEQ ID NO: 62596 - DNA, 1035 bp, Homo Sapiens
aaaatgtttaagcttttatttacacatccccttctctcagtttcccaggttatatgaacattacagcaatagaaaggggttatcatcacagcatccccttgcaaattccagtttacaggtaacttggtcaggggaaaaatatgggtcaacgaagtaagatctcagctctcccataagctattgctctcttcttctctttcccccttctcttaatgttagctgcctgttacagagagggatcatcaagactgtgtggacatgctagctgaattgacagggtgggttccagtgtcctgtgaagaaccagcaaggatgctttttataattccaaccattggcttcacatcactgaggtaacaagacttaatgttaagggtaaagacaccacgccaccctagtcagtgacatgtactccactttccaggaagacctgggccaaatgaccaagctttgcaaaagaaacctgggaagagcgttggaaaaagcagactctgagttggcttgagtctcctcgtgcatagaagcattcactcatccatgcagatggcaacaaggcaggacactcagaaagcataagatcaaggtactgctcttatctgcacctttcattcaagctcccctcaagtgctccaaaagaacagagctttgggtattgcttcattaagaacacagtaactgcagtttaaaagccattgcattctttagggtcagtttattataacttatcctaccagaaagaatcacagtttaaggccatttatcatgtgcactatgtagtaaacaaaaccttgtccccagctccaccaagccactcccaagggtggactgtgaatgtgacacttccagactcaccagagattagaaaaaacatttctattagggtcttaacctagcccctttggtttcctccctagaaaagagctgcttagaaaacagatgtcactggaaatgacaaaaggaacaacagtattttctatacattaaaagcaaagggatcattggctagcactagcatttattctgtgtgcctcgtgc

SEQ ID NO: 62597 - DNA, 501 bp, Homo Sapiens
gcacgaggctggctcctgtggaggcctgctgggaacgggacttctaaaaggaactatgtctggaaggctgtggtccaaggccatttttgctggctataagcggggtctccggaaccaaagggagcacacagctcttcttaaaattgaaggtgtttacgcccgagatgaaacagaattctatttgggcaagagatgcgcttatgtatataaagcaaagaacaacacagtcactcctggcggcaaaccaaacaaaaccagagtcatctggggaaaagtaactcgggcccatggaaacagtggcatggttcgtgccaaattccgaagcaatcttcctgctaaggccattggacacagaatccgagtgatgctgtacccctcaaggatttaaactaacgaaaaatcaataaataaatgtggatttgtgctcttgtatttttaagtggattaaaaaacttactacctttaaaaaggaaacctcgtgccgaattcctgcagcccggg

SEQ ID NO: 62598 - DNA, 938 bp, Homo Sapiens
  misc_feature (406)..(434): n is a, c, g, or t
  misc_feature (465)..(509): n is a, c, g, or t
  misc_feature (609)..(622): n is a, c, g, or t
  misc_feature (694)..(730): n is a, c, g, or t
gcacgagggaaagttatctcttcccaggagaggctagaagtagcttttctgtcttttggccagtgccgagtggaatgcctggtttgggggaggaggagggactgggttcagctgtggtgctttgttgtaaaaggcagcctggcctttgctactgaggagaaagatggagcctgggtctcaagcccaccttcgctgtacctttgccacatggtactgtatgcttgccagctagaaggagggtcagggattttttacagtctgagaatgagtgtgtgtgagtgaggcggtatccacattctcaacttcaagtcattgcagtttctttttcccagaaaacaaggggttagatgttgcatttcataaaactaaccgaagttctgtctactgatgcagcacaagagatgtnnnnnnnnnnnnnnnnnnnnnnnnnnnnncacacacacagaggaaagacgctctttaggnnnnnnnnnnnnnnnnnnnnnnnnnnnnnnnnnnnnnnnnnnnnnactctagggaaaacactgacgaatggtcagagctcctatcctgatcttttcatcaaggcgcctttcctaataatatggttcaactgtgaatgtagaagtnnnnnnnnnnnnnnagaaaaagaaaactctggcgttagaggatatagaaaaatataagtacaattgttacaaataacgcagacttnnnnnnnnnnnnnnnnnnnnnnnnnnnnnnnnnnnnnttaaatgatcagaattggcagcacaaagaaaacgccctctcctgacttgtattgtggcagtctgaacgcccccagaaaattgtgccaaagagtttagaaaaataaatatccaataaaagtaaacacatacccccaaaacagcaaacttcaggtaactattttggattgcaaccaggataaattaaatgttcaaacaatctgataaaat

SEQ ID NO: 62599 - DNA, 286 bp, Homo Sapiens
acgtttctgcaccagttgtcagctggtgtctggagggaagagggcagaggagggtcatgtcccttcagctggggtgaggggcccagtgagctccacgtggctttttccccaagggagccagagggaaggattgggtgagaaaaccatggagaggggacctgcgaaggacaaacagggaggaagtgagcggtttgatccagcctgctaatcacggtgttctggctctcttatttagcccgcgcttaagggacagatacatcacatcctaagtctggggtcctcaccg

SEQ ID NO: 62600 - DNA, 521 bp, Homo Sapiens
ctgggttgtttctctggggctttagtgagggacctttgccctctggtttttcttgcctcctggtttagggagcatctcacacttgttagtatctggttgttgggccagccgtgcctcctctagatctggagccaggccaggcaggggccacgtgtgggccagtcagccactacaagatttttgctaagctttgggctgttggcagcatcttggacctcatgcctgggcctgaatgaggctctttccttaagtgtttttccaagtttgtgttttatttatggagtgacttatcccttccattcagagcagccccacccagccagcccttcagcctttgggctcctgttgcttaaaggcagagccgcctggttggtctccaccctgtgcattgggagcccagcccccatgctgacgggtatttttcctcataaagtttataaccagttatttatatgaatctttgttatgtccatttgtttgtattgcgtattttgattataaaataaagtatcttttcggac

SEQ ID NO: 62601 - DNA, 1045 bp, Homo Sapiens
aatgaaaagatgaaaataccttttacagatgtatacattggaggagctcctccagaaatcttacaatccagggccctcagagcacaccttcccctagatatcaacctcagaggatgcatgaagggcttccagttccaaaagaaggacttcaatttactggagcagacagaaaccctgggagttggttatggatgcccagaagactcacttatatctcgcagagcatatttcaatggacagagcttcattgcttcaattcagaaaatatctttctttgatggctttgaaggaggttttaatttccgaacattacaaccaaatgggttactattctattatgcttcagggtcagacgtgttctccatctcactggataatggtactgtcatcatggatgtaaagggaatcaaagttcagtcagtagataagcagtacaatgatgggctgtcccacttcgtcattagctctgtctcacccacaagatatgaactgatagtagataaaagcagagtggggagtaagaatcctaccaaagggaaaatagaacagacacaagcaagtgaaaagaagttttacttcggtggctcaccaatcagtgctcagtatgctaatttcactggctgcataagtaatgcctactttaccagggtggatagagatgtggaggttgaagatttccaacggtatactgaaaaggtccacacttctctttatgagtgtcccattgagtcttcaccattgtttctcctccataaaaaaggaaaaaatttatccaagcctaaagcaagtcagaataaaaagggagggaaaagtaaagatgcaccttcatgggatcctgttgctctgaaactcccagagcggaatactccaagaaactctcattgccacctttccaacagccctagagcaatagagcacgcctatcaatatggaggtacagcctacaacctccaagagtttgtacacttaaaaggagattttggtgccaaatctcagttttaacattcgtctgagaactcgacccagtgtgtagtcctgctagagt

SEQ ID NO: 62602 - DNA, 319 bp, Homo Sapiens
tttatttacttctcggtcaccgctttcgggggacagataaacaccacagatgcccatcaaaggggcgcacgggtctggaggcgcagctcaggtttttgcgttggtcaccctgccctccgcacgtggagagggcaggcataaagcaccttgaaaggaaggtgctgtcaatgctatccgacgacctgtcgccgggcaccgcagcatcctcgctcgctccgatgggacgagggacgccggccccagggtaacaggaggcgcctcgccggccgcgcgctggatgctgtgatccaggtccggagccgggttccgccgcggccgc

SEQ ID NO: 62603 - DNA, 490 bp, Homo Sapiens
ttcgcggacgtggccgtgtacttctccccggaggagtggggctgtctgcggcccgcgcagagggctctgtaccgggacgtgatgcaggagacctacggccacctgggcgcgctcggattcccaggccccaaaccagccctcatctcttggatggaacaggagagtgaggcttggagccccgccgcccaggatcctgagaaggggggaaagactgggaggagctcggagaggagatgtcccaaacaggaaggaagaggaaccggaggaagtcccaagagccaaagggcctagaaaggctcctgtgaaggagagtcctgaagtgctggtggaacgcaaccctgacccagctattagcgtggccccggcacgggcacagccacccaaaaatgctgcctgggacccgaccacaggagcacagcccccggctcccatacccagcatggatgctcaggccggccagcggcgccacgtgtgcacggactgcggccgc

SEQ ID NO: 62604 - DNA, 355 bp, Homo Sapiens
aattatgccacccacagcaccgacctcatctggggttttggggagacaagggttccagtgccaaagtttgctgttttgtggtccaacaagaggtgccatgaatttgttactttttcttgtccgggtgcgtataagggacccgacactgatgaccccaggagcaagcacaagttcaaaatccacagcttacggaagccccaccttctgcgatcactgtgggtcactgctctatggacttatccatcaagggatgaaatgtgacacctgcgatatgaacgttcacaagcaatgcgtcatcaatgtccccagcctctgcggaatagcgatcacgctgagctgtggtgcagaactagac

SEQ ID NO: 62605 - DNA, 599 bp, Homo Sapiens
ggccctcagtcccaggtttttgtgtggtgtagtgatggacaggagcttcgtccagggagagctggtgacggcttccaaggccatcattgaaaaggagtaccagccccacgtcattgtgagcaccacgggccccaaccccttcaccacactcacagaccgtgagctggaggagtaccgcagggaggtggagaggaagcagaagggctctgaagagaatctggacgaggctagagaacagaaagaaaagagtcctccagaccagcctgcggtcccccacccgcctcccagcactcccatcaagctggaggaagaccttgtgccggagccgactactggcgatgacagtgatgctgccacctttaagccaactctccccgatcgtgtcccctgatgaaccttcagaagcactcggcttcccaatgttagagaaggaggaggaagcccatagacccccaagccccactgaggcccctattgaggccagccccgagccagccccagacccagccccggtggctgaagaggctgccccctcagctgtcgaggagggggccgccgcggaccctggcagcgatgggtctccaggcaagtccccgtcc

SEQ ID NO: 62606 - DNA, 723 bp, Homo Sapiens
  misc_feature (93)..(93): n is a, c, g, or t
cacaagagcccaggcactctatgttttgcggggatgtgcgcatggcccgggacgtgcccacacctgaaagcagctggtggctgccaagctganattgaatgagagccaggtcgaggactatttctttcagctcaagagccagaagcgctatcacgaagatatctttggtgctgtatttccttacgaggcgaagaaggacagtgtgtcggtgcagctcatcagcctggagatgtcagcgctctgagggcctacaggaggggttaaagctgccggcacagaacttaaggatggagccagctctgcattatctgaggtcacagggcctggggagatggaggaaagtgatatcccccagcctcaagtcttatttcctcaacgttgctccccatcaagccctttacttgacctcctaacaagtagcaccctggattgatcggagcctcctctctcaaactggggcctccctggtcccttggagacaaaatcttaaatgccaggcctggcaagtgggtgaaagatggaacttgctgctgagtgcaccacttcaagtgaccaccaggaggtgctatcgcaccactgtgtatttaactgccttgtgtacagttatttatgcctctgtatttaaaaaactaacacccagtctgttccccatggccacttgggtcttccctgtatgattccttgatggagatatttacatgaattgcattttactttaatcac

SEQ ID NO: 62607 - DNA, 838 bp, Homo Sapiens
gctgctactgtgcgccgcgggccacctgtaccccggagaggtgtgtcccggcatggatatccggaacaacctcactaggttgcatgagctggagaattgctctgtcatcgaaggacacttgcagatactcttgatgttcaaaacgaggcccgaagatttccgagacctcagtttccccaaactcatcatgatcactgattacttgctgctcttccgggtctatgggctcgagagcctgaaggacctgttccccaacctcacggtcatccggggatcacgactgttctttaactacgcgctggtcatcttcgagatggttcacctcatggaactcggcctctacaacctgatgaacatcacccggggttctgtccgcatcgagaagaacaatgagctctgttacttggccactatcgactggtcccgtatcctggattccgtggaggataattacatcgtgttgaacaaagatgacaacgaggagtgtggagacatctgtccgggtaccgcgaagggcaagaccaactgccccgccaccgtcatcaacgggcagtttgtcgaacgatgttggactcatagtcactgccagaaagtttgcccgaccatctgtaagtcacacgggctgcacccgccgaaggcctctgttgccacagcgagtgccctggcaactgttctcagcccgacgaccccaccaagtgcgtggcctgccgcaacttctacctggacaggtaagtgtgtgagacctggcccgccccgtactaccacttccaggacttgcgctgtgtgaacttagcttcttgcaggactgcacatcaatgcaagaactccggaggcaggg

SEQ ID NO: 62608 - DNA, 554 bp, Homo Sapiens
atgggactggcaggaggtggctggggttacgctgtcttttctaacattcagcattggctcaggggccaggtcagggctcacagactgttgctataaggggctgggtggctttcttccccacagctactcagcctaatgccattgcagagcacatgtagccatggacaacacaaggggcgtatccgtgttccaggacagccatattgacaggaataggcaggaggccagatttggtcctcaggctgtaatttcttggccccttgtctagggagaggtaaacgaggggaggagagatcagtcaaggatgacgtgagggtttgctgggagcaccaggaatcctggagaaggtagtggcaagagggtgcagcaagctcagctgggcggggatcaagtctgaggacttaatgtctcctctgatctccagacccataagggagatgctgagtagacaactggggcttatgggtctggagttcagaggagagatcgggaaggtgtccatttggagtcatccccgccccagatgtgtgaaggctgctcaatgatttaaggtt

SEQ ID NO: 62609 - DNA, 978 bp, Homo Sapiens
  misc_feature (799)..(799): n is a, c, g, or t
  misc_feature (870)..(887): n is a, c, g, or t
  misc_feature (889)..(889): n is a, c, g, or t
  misc_feature (892)..(892): n is a, c, g, or t
  misc_feature (894)..(897): n is a, c, g, or t
gctaagaagatcagtatctgtagatatgcctaggcctttaaataactcacaaatgaataatccagttggacttcctcagcatttttcaccacagagcttgccagttcagcagcacaacatacgtgggccaagcatatattgaactgagacatagggctcctgacggaaggcaacggctgcctttcagtgctccacctggcagcgttgtagaggcatcttctaatctgagacatggaaacttcattcccccggccagactttccgggccctagacactacagaccccatgcgacgacctccccagggtctacctaatcagctacctgtgcacccagattttggaacaaagttgccaccatcttcaacaagagcaaggtcattctgtccattcatcttctatggtcatgaggactctgaaccatccactaggtggtgaattttcagaagctccttttgtcaacatctgtaccgtctgaaacaacgtctgataatttacagataaccacccagccttctgatggtcttagaggaaaaacttgattctgatgacccttctgtgaaggaactggatgttaaagaccttgagggggttgaagtcaaagacttagatgatgaagatcttgaaaacttaaatttagatacagaggatggcaaggtagttgaattggatactttagataatttggaaactaatgatcccaacctggatgaccctcttaaggtcaggagagtttgatatcattgcatatacagaatccagaacttgacatgggagattagaaaagcatggtttaatganggaactagacctttccaattggatgataagtttagaataatccgagggtgggatcctggttgaacccggannnnnnnnnnnnnnnnnnanaanannnnaaaaacattgtcgggccggccttcgggccccttcggaaaaagcttttctaaagaaccaattctcttttgggcgcccggggg

SEQ ID NO: 62610 - DNA, 1227 bp, Homo Sapiens
  misc_feature (459)..(459): n is a, c, g, or t
  misc_feature (461)..(461): n is a, c, g, or t
  misc_feature (463)..(464): n is a, c, g, or t
  misc_feature (468)..(468): n is a, c, g, or t
  misc_feature (476)..(477): n is a, c, g, or t
  misc_feature (497)..(605): n is a, c, g, or t
  misc_feature (619)..(619): n is a, c, g, or t
  misc_feature (810)..(810): n is a, c, g, or t
  misc_feature (969)..(969): n is a, c, g, or t
  misc_feature (1049)..(1049): n is a, c, g, or t
  misc_feature (1142)..(1142): n is a, c, g, or t
ctctggatgcaaagtcaagacccaggagcagttgtacttggaaaaagctgaccgagagggcgcaactgctcaagaacgtctttaagaagaaccacgtgaacttgtaccgctctgaatccttgcaacaaaatctgctccatgggtatgcgttctctcaagatgaaaatggaatcgtttcacagtctgaagtgataagagcatatgataccacgaaacagaggcccgacgaatggtgatggggagagcctgaaaggcaggctctgttacctctctagggagagctaccaggttgtcaccgcagtctgctaaccaattccagtctggtccatgcagaggaaaggtggagcgcggggtcaccgggcccagcgcgcgggaggaaagacgtgccccggtgagcggcacaacggcgcggggaacaggcgtgaaccccttgatttcgctgccctgagacgcgcgggngngnngggnggaggggnnggggggaagggggcccgacnnnnnnnnnnnnnnnnnnnnnnnnnnnnnnnnnnnnnnnnnnnnnnnnnnnnnnnnnnnnnnnnnnnnnnnnnnnnnnnnnnnnnnnnnnnnnnnnnnnnnnnnnnnnnacacccgcacgccncgacagagcacgggcggcgagggggcccggagacccgcccgcccccagacacacgcccaccgcggcaccaccggggacgccggccagaccaagcaaccgcaggaccaaaccactgacaacacaaagggagccgagggcaactgactggagcgtccagggcgcggaggcatcgacctctcggacacccgctnccacgcccataacaggcgcgacacaaggctgtcagagtcgagtagcgccacgcgcgcgcgggcagcggccgcggggcgcctccgccccaccacatgttgaaggatttgtgcgtcatgtacgaagctagagggtgagcaacgcgcaacgcaggcgatganagttgcaggtggcgggaacgcggctggcgcggagacggttctccgacgtcggctggcacctggtacgaggagaacgcgcngtgctgctcgagcgcgcgaacacatgtgcactggcgcgccgtctctgacgcggcggcacctgagtgagcggagcgaggaggaggcggcacgcngcgccgcatggtcctgcgtgctggcggcaggtcgggtgcgagcgagtgatggctcgagcgatgcaaacgagtgtgcgcgcaggga

SEQ ID NO: 62611 - DNA, 524 bp, Homo Sapiens
gatgttaacagaaaccaatcttagcaccttttcaaggggtttgagtttgttggaaaagcagttaactggggggaaatggacagttatagataaggaatttcctgtacaccagattggaaatggagtgaaacaagccctcccatgccatgtccccgtgggccacgccttatgtaagaatatttccatatttcagtgggcactcccaacctcagcacttgtccgtagggtcacacgcgtgccctgttgctgaatgtatgttgcgtatcccaaggcactgaagaggtggaaaaataatcgtgtcaatctggatgatagagagaaattaacttttccaaatgaatgtcttgccttaaaccctctatttcctaaaatattgttcctaaatggtattttcaagtgtaatattgtgagaacgctactgcagtagttgatgttgtgtgctgtaaaggattttaggaggaatttgaaacaggatatttaagagtgtggatatttttaaaatgcaataaacatctcagtatttg

SEQ ID NO: 62612 - DNA, 490 bp, Homo Sapiens
  misc_feature (152)..(152): n is a, c, g, or t
aaactgcatagtattttcatagtgacctgtgtttcacttaatgtttcttagagccaagtgtcttttaaacattattttttatttctgatttcataattcagaactaaatttttcatagaagtgttgagccatgctacagttagtcttgtccncaattaaaatactatgcagtatctcttacatcagtagcatttttctaaaaccttagtcatcagatatgcttactaaatcttcagcatagaaggaagtgtgtttgcctaaaacaatctaaaacaattcccttctttttcatcccagaccaatggcattattaggtcttaaagtagttactcccttctcgtgtttgcttaaaatatgtgaagttttccttgctatttcaataacagatggtgctgctaattcccaacatttcttaaattattttatatcatacagttttcattgattatatgggtatatattcatctaataaatcagtgaactgttcctc

SEQ ID NO: 62613 - DNA, 798 bp, Homo Sapiens
ttacaacagctagaaaaagttcctgagagaataacaaatctgtgattttattatgtcttttatcatgttttgcagctttcagattcagatgtcaataatttgtttctatgatcagagtatataaatcccatgcaaacatatctcagcataactgattttgtttctaaataattaaacaggataaaatgttatttgttgtaagctgctgacatttgtaaggaaattttgtttcactgaatatgtttagagatgccgccagaacattaaccattgtttcatttttatgtaagttgaagacaaatgaagctagatagcatgttctccatttgcagtctacaaaggggaattttattgcttaaattaaagtttcattttctggcctgtgcaagagacttttatatctaaaatatggatgtacgtttttcatattttagagttcattgtatggaaaaataccatcaaagttgaccaaaagattttgaaaatccttaccagttgtttgtcatatgttaaagtcttatggttaattttatttattttatcttgttctcttgctggttattggcagactcagtctttctgttttcacaaagaactcatgaagaggacgatagggaaacccacgtatgcctttgaggctagggactatgttgtaagttcacctgtgatggccaggtcatacagtcatggcacagccactaaccccattcacagcaccaagactggggacccagaggcacttgttatgcttccacactacgaaatgaaattcttaattgagagaactggacaccagga

SEQ ID NO: 62614 - DNA, 1097 bp, Homo Sapiens
  misc_feature (520)..(539): n is a, c, g, or t
ggtccggaattttcgggatggagtctgtgtgtcccgttaacactgcagcagggaagggtggctggctggctccctggcatcagtggtttggtttaagctccagagggtcttattgccattgtcttttcctctgccccttgagccagcctaaggccctggagtctgtttctttaggcggatgaactgacatgctcctaccatgaccaggctctgggcaaggctcctcacagtatccttgagaggtgggcatggaagtgcccatttctcaggtacagaaaccttcagagaggataaatagcttgccctgtagaagcaggactgaaacccttgtccgcctgactcccccagctactctgcccactgtagccccctgccttactgtcctggcacacccctcaccatcctgtataccttaaatatcaaagagggcaagagagaaagggctttaaagataagttatttttttaaggaaccttaatattatttttaagaagtaaccaaattagtgacgtgaaatgcnnnnnnnnnnnnnnnnnnnntgctgactacccttttgaaaatgtgctttcagattgttttttatatgtaattcttatacacttgtcattaagaaaatagtggctggcttgtgctcagcaagaagcacactggcacgtggctttggtataggaagtggaaggcaaggacctgggtttctgacaagtgcagtcagacatacacatccatctgagagctgcttgccttgttcccgtggtaaggccatggctcccacatactggaagcatatttttgtgaactgttttcaaaattgggaacatattcaggggaatgtcttaaacgctgacacatcttcctcctttgaaggggaaatattttttcagaaacagctaagacatttaaggcaaaaatgcctgaaaggcggttcaatccaagttggctgaatggcatcctgaggccaaaactaaaatgggaccattgagttcttaagaaaggaactctttaaaggggggcccaaggaaaaaaggcacctcccttggactcccaggctgggatgggttccccaaaaaatggccattgaaggatgacacctatttcaa

SEQ ID NO: 62615 - DNA, 642 bp, Homo Sapiens
aatccaacatgttcatttgggtttgcttacttgaccctgtggagatccccacagccattgggcatcctaggtgaatttggccttggttgggctctgccaaagactaatggactaaaatgtgaaacagcctcttgccctgtacctttccttcccattaggacatcctttaaattataagcatcctttttgaaaagagctatgaaggtgtatgagcccatccttttattcattgactctaagagtcaaattttctagtgcatatcctattgccagcataaggatgaggagggggaaagggtcttaattctatgtacagcagagacattaaacttgctgtgtccgggctgcatcatcttcctggactgtttctgttgttctctgtgttcacattttttcctgcaacttttaagctactgtcttttttaaatagctatatgaacaccaaatttgggtaccattttatcactgttcaaagcactgtcaaattcctttcatcctttaatagttaagatctttgaatcttcagtctgatttttaatgtaagcaaaaacagaaccattgaatagtaatttcttgagaacctcaggtgttctataaacagtcctttcctgtatgtcttctattaccctaagaccagagtta

SEQ ID NO: 62616 - DNA, 531 bp, Homo Sapiens
gggggagcaattcacttgagaggctgtgtggtgacttcagtggagagcaactcaaatggcaggaagagtgaggaagagaacctttttgagatcatcacagcagatgaagtgcactatttcttgcaagcagccacccccaaggagcgcacagagtggatcagagccatccagatggcctcccgaactgggaagtaaagagactcctgcattcctcctcgcctcctgagggaagcccatggacaagctcagtccaaggacctgtccacttctgtgacaaatcaacgggaaacagcccaggggtgggaagttttcatttgcaggggggtctgaatgtaactcaccatgtggtgtgcaaggttcccctgcattgtattgctcactgcagcccctctgcccctatccatgacccccaagcagatataacaagctgtgcagcctcagtaggctgcttgccctctccaggcctcagggcctcttctggaaaatgaagaaattcaactagtagattcctgaggtccccctagctaaaaa

SEQ ID NO: 62617 - DNA, 716 bp, Homo Sapiens
ccttaacatatattaccaggctttactgtatttcactcagccttaaatgttataatatttttggataacggttattaattctttgagaccttcgtatagcctataaaatgtatgggagatgttggtattttatgtgtataaaagcaacaatatcagcaacttcgtgtttatactgcaccttggttgttgatgtcaagtaaaaaaaagattgttttgtaacacataaaaaaatggaagaaactgataccacacctaaggaccaaagataagaaagactttttgcccaagacagtgaaagtaattataaaaacaagctttgaccacttaccaagtatctgaagagatgagttcatactatgatttagaaagtggttcaattcccctgttggcatatgattatttttactaaaattaatacagctctgtgggtcttccttagtgttttctttgaagccaatctgttttttttaggacaccagcctttggtttttcatctgttcgagatgcctcttctctgtctccttatcagatagaaatggagtcatgtgctgctgcttcatctagcagaggttggcctctggctctgacactttttgtcagttgtctttaggtggtcctgaatcttgggcccttttgattgtgaatactgtgtagcaggatcttgagagtccttgttcttacataggcattgctctagtttgtctttggcaaaaaaa

SEQ ID NO: 62618 - DNA, 1443 bp, Homo Sapiens
agaaggacaatggctgttccaggacctctgggtcactgctcaacaatgccataaagggaggagtagaagatgaagtgaccctctccgcctatatcaccatcgcccttctggagattcctctcacagtcactcaccctgttgtccgcaatgccctgttttgcctggagtcagcctggaagacagcacaagaaggggaccatggcagccatgtatataccaaagcactgctggcctatgcttttgccctggcaggtaaccaggacaagaggaaggaagtactcaagtcacttaatgaggaagctgtgaagaaagacaactctgtccattgggagcgccctcagaaacccaaggcaccagtggggcatttttacgaaccccaggctccctctgctgaggtggagatgacatcctatgtgctcctcgcttatctcacggcccagccagccccaacctcggaggacctgacctctgcaaccaacatcgtgaagtggatcacgaagcagcagaatgcccagggcggtttctcctccacccaggacacagtggtggctctccatgctctgtccaaatatggagcagccacatttaccaggactgggaaggctgcacaggtgactatccagtcttcagggacattttccagcaaattccaagtggacaacaacaaccgcctgttactgcagcaggtctcattgccagagctgcctggggaatacagcatgaaagtgacaggagaaggatgtgtctacctccagacatccttgaaatacaatattctcccagaaaaggaagagttcccctttgctttaggagtgcagactctgcctcaaacttgtgatgaacccaaagcccacaccagcttccaaatctccctaagtgtcagttacacagggagccgctctgcctccaacatggcgatcgttgatgtgaagatggtctctggcttcattcccctgaagccaacagtgaaaatgcttgaaagatctaaccatgtgagccggacagaagtcagcagcaaccatgtcttgatttaccttgataaggtgtcaaatcagacactgagcttgttcttcacggttctgcaagatgtcccagtaagagatctgaaaccagccatagtgaaagtctatgattactacgagacggatgagtttgcaattgctgagtacaatgctccttgcagcaaagatcttggaaatgcttgaagaccacaaggctgaaaagtgctttgctggagtcctgttctcagagctccacagaagacacgtgtttttgtatctttaaagacttgatgaataaacactttttctggtcaatgtctttccctgtttcctgttcattcaataaatatcattgtacatttccatatgattcccaatagaataccaggattaaacttaaaggaatcaagtgctgaaggacttcagaatacaaaaaaatgat

SEQ ID NO: 62619 - DNA, 1895 bp, Homo Sapiens
  misc_feature (268)..(268): n is a, c, g, or t
caggagacccggcgctttcttccttctgcagcatgaggctgtggcggggccgggggtggggtcggggccaggaggaataggtcgtcagagaataaaaggaggttgtccatagattgactttaacgcatgcaatcagtaaaacattgagctcttcagctccggctttctggctctgaaacattggaagaccaagaaggtttgatgtcttgtgtgacgccacctgaattagaaaccaagatgaacatatagccaaatggtggtctggtgnttgttttcacgcaacactcgaattcatcatgtatggagctatcaagagacataattgcagagcggctaggggtggagatgggcaaagtgcaggtttaccaggaacctaacagagaaacgagagtacaaattccagagtctgtgaggggaaaagatgttttgcatcatccaaactgtttcgaaggacgtgaacaccaccatcatggagctcctgatcatggtgtatgcatgtaagacctcttgtgccatgagcatcattggcgtgataccctactttccttacagcaagcagtgcaagatgagaaaaagaggctccattgtctctaaattgctggcttccatgatgtgcaaagctggtctaactcatcttattactatggatttacaccagaaggaaattcagggcttcttcaatattcctgttgacaatttaagagcatctcccttcttattacagtatattcaagaagagatcccagattacaggaatgcagtaatcgtggccaagtctccagcctcggcgaagagggcacagtcttttgctgagcgcctgcgcctgggaattgcagtgattcatggagaggcgcaggatgccgagtcggacttggtggatggacggcattccccacccatggtcagaagtgtggctgccatccaccccagcctggagatccccatgctgattcctaaagaaaagcccccaatcacggttgtgggtgatgttggaggaaggattgccatcatcgtggatgacatcattgatgatgttgacagctttcttgctgcagcagagaccctgaaggaaagaggtgcatataagatctttgtgatggcaactcatggcttgttgtcttctgacgccccccggcggattgaagagtctgccattgatgaggtggtggtcaccaatacaattccacactgatgtccagaagctccagtgccccaagattaaaactgtggatatcagcatgatcctttcagaggcgatccgtcggatccacaatggggagtccatgtcctaccttttcagaaacataggcttagatgactgagttttcctttaggaaaactcccgagggccaaactggaaacataagagtgactgctcggtgggatggatttcacaggaaccgtcatgcttgttcctccctctcccctgtaacctcacttcttattgattcctaagaagatagaccaactttttatgtcggtttgggtgtttgtgagtttggggagcaatttttataaaagaaaaactttattctcctcttttgaaaaggtaagacctcgttttagttgtaactgtttaaaaaataacacttggaataagatttgtaagctcacaaagccttcttccaaagttgcttgagccaagtgcttaaaaagttaataaaataaaatgatctgtatgatacctgcaattgaaaagccgaaaagattatactgtcaagtccagtaaatgacatttttagagatgcttttgtagacaagcatatggaatatgtgattgtatttattttctgcaactaaaaaaggaataaaaacttgtgtttgtgtgtttttctaaaactttgtgttttggcaatcgttttataactaaaataaaatgaaagctaaatctataa

SEQ ID NO: 62620 - DNA, 693 bp, Homo Sapiens
  misc_feature (454)..(560): n is a, c, g, or t
  misc_feature (570)..(583): n is a, c, g, or t
gatctaaaagggttttcttagaaagggcaatattgtccaatgaagtaagcagaaggactctgggttagaagcatctgcacaaaaactggtgagacctactctccactgctctgcagctggatggctgatggcaggctgagcagtggggaagcaggttttaacaacagggagtccttccaggtcactgtatattgagaagaaacataaaactattgtctgttacattccgaggtcagccttcttcttaacgttttataatatgcaaatgccagcttctggaaagcaagtatcatcatgtaccaaatgctttatacaccatcacattcatgaattttttagcatggtcagaacttgtgtaaatatgtctcttagatgattttggggagatgtgatttatttttcatattttcaaaatgcatttcatttcaaataaagttatctattgagacaaccnnnnnnnnnnnnnnnnnnnnnnnnnnnnnnnnnnnnnnnnnnnnnnnnnnnnnnnnnnnnnnnnnnnnnnnnnnnnnnnnnnnnnnnnnnnnnnnnnnnnnnnnnnnttttgggggnnnnnnnnnnnnnnaaaaaatttttaaaaccttttttttggggccgggccccaaaagggaaagaaaaggggccaaactgttttccaaagaaacccgggccaagaataggggtgggattcccccc

SEQ ID NO: 62621 - DNA, 626 bp, Homo Sapiens
  misc_feature (225)..(225): n is a, c, g, or t
gcagggcggccggccctgcctgcgggagagggcgagcatgaactggcccggaggacccagctcgagccgccaggacacagacgtacaggcctcctcgggagggagcgcctccccaccactgagccatcctcagcagcgtccgctgcgtctgcactgatgaccgtctgagcccagctcagcgttcctggacaaacagcctcactcctcagcgttaccggcacactngaatttctccgaatgtcaaggttccctcccactctatttttttaggttaaagttaattggcatatggaatgttttaatctcctctgaaatgtgtagcgtaggcttttcccaagggtcgctagaaactcgtcttcgcgttgccccctttctggctctcagcgccgtcgccactcgggagaggctgggtgaggcccgtgtgaggactgaccctggattcctcgaaactgccattgtgatcattactctgctctttggaaatggctgtatcatttttttgtactaatgtgaattgttcctcagttacgcttcttttccatcctagtgagaagctggcctgcagctggtggcagcaatggtcgttgtaagatttcctcccgtagtttttgtctccacactcggag

SEQ ID NO: 62622 - DNA, 469 bp, Homo Sapiens
tacaagggtccacttcattcagcaactgttctgccaacattttatacccactgcagaccttgcctgctacccttagggctctctgacagctcatgagcccccagctgctctatgacctgtccaaggaccctggtgagaactatcaacctgctgggggaattcgccggggccaccgcagaggtgctgcaagccctgaaccagctttcagctgctcaagtcccagttagacgcatgctgtgacgttcggccccagccaggtggcccggggcgaggaccccgccctgcagatctgctgtcatcctggctgcaccccccagcccagcttgctgccattgcccagatccccatgcctgagggcccctcggctggcctgggcatgtgatggctcctcactgggagcctgtgggggatgctcaggtgtctggagggggtttgtgcctgataacgtaataacaccagtggagacttg

SEQ ID NO: 62623 - DNA, 935 bp, Homo Sapiens
  misc_feature (66)..(117): n is a, c, g, or t
  misc_feature (276)..(286): n is a, c, g, or t
tcctggccaagaactcagtcatttttctgtgtaccaggttgcctaaatcatgtgcagatggttctnnnnnnnnnnnnnnnnnnnnnnnnnnnnnnnnnnnnnnnnnnnnnnnnnnnncgtgtgcattttgtataatggccagaactttgtcgtgtgacagtattagcactgcctcagttaaaggtttaatttttgtttaaacctagacgtgcaacaaaagttttaccacagtctgcacttgcagaagaaagaaaaaaattcaaaccacatgtttannnnnnnnnnngcctacctcattgttcttaatgcattgagaggtgatttagtttatatgtttttggaagaaaccattaatgtttaatttaatcttaataccaaaacgaccagattgaagtttgacttttattgtcacaaatcagcaggcacaagaactgtccatgaagatgggaaatagccttaaggctgatgcagtttacttacaagtttagaaaccagaatgctttgtttttaccagattcaccattagaggttgatggggcaactgcagcccatgacacaagatctcattgttctcgatgtagaggggttggtagcagacaggtggttacattagaatagtcacacaaactgttcagtgttgcaggaaccttttcttgggggtgggggagtttcccttttctaaaatgcaatgcactaaaactattttaagaatgtagttaattctgcttattcataaagtgggcatcttctgtgtttttaggtgtaatatcgaaagccctggctttttctcggttttctcacctggctcctcttggttccccggttttttttaaaacccaatttttaacttttatggaataaaattccatggaacttttgggaaataaaaatgggctttggggaaaacccccacaaaagtcggcagaaataagtat

SEQ ID NO: 62624 - DNA, 817 bp, Homo Sapiens
  misc_feature (621)..(622): n is a, c, g, or t
  misc_feature (625)..(630): n is a, c, g, or t
  misc_feature (632)..(636): n is a, c, g, or t
  misc_feature (639)..(639): n is a, c, g, or t
  misc_feature (643)..(646): n is a, c, g, or t
gggatattttggaagatgaagaacattatgcagatcagttaaaagagtatcttttttatgcagaagcattgcgggctgtgtgcaggaaacatgaacttatgcagtatgacttggagatggctgctcaggacttagcatcccagaagcagcagtgtgaggaactggtaactgggactgtgagaacattctctttgaagggaatgactacccagctctttggtccagaaactccagagcagagagaagcccagaataaaggtgctagaagcaccaaataaatgaaggagaccaccagctaaagtctaaaaatctggaaggcagagaatttgtgaaaaacgcatgggctgatattgaacgcttcaaagaacaaaagaaccgagacttaaaggaggccctcataagctatgcagtcatgcagatcagtatgtgcaaaaagggaattcaagtttggaccaatgctaaggaatgctttagcaagatgtaatcctgtgaattgaatttctcttcaatcaaagtgcccccaaacagaagcacaagtaaataaaagaaatttaagtcactacctagtatacctaaacatataccataagtttaataaattcagctttctttaactcaaannaannnnnnannnnnaanaaannnnacctggtcggccggcctcgggcccctcggagaggcctttctaggacccattcggtttgggcgccgcgggggccccagtaaggtaaaggtggaacaggggggccaatagcctgggtttcccttaggaaaaaaccccggggccaatggaccctaagggggccttggggaattt

SEQ ID NO: 62625 - DNA, 470 bp, Homo Sapiens
gcactttttaagggatatcgacaagcagtttctgttttctaaaggacaaaataccagagtgtgtgtcatttttaattagattctttcccctgctgagttggaaattccagtgcagcactgattgaccacagttgccaatctaaaagcacaaagacagaagtaaagctttatgctaattttatttcaatatgatagaaaatttatcttggtatgtccttttttagataactccagcaggaaactgtaactgctatgtctttaggaaaatgtagaagaaagaacattattattctttaattcctacaaggtacttgaaaaccttaagtgaaaaagatttctatctttttatcttagcgcatttatggaaaaaatattaactgtcctgaatattttataattttgtaggaaaaatatgcatctattttttcttgacttcttttatatagtaataaaagttattttggaaaaaa

SEQ ID NO: 62626 - DNA, 308 bp, Homo Sapiens
gctgggctcgttaattcttatcctagttccagcttagaggaaggcctggaaggagggtagggggaccaaggagaaacttttacccaaagccctattacctccccattcccagtgctgcttatttgtacctcttctgcccactcatttctgttccacctgcccctttacttcttaagcagcatcctcatccttcttcctcttcagctcttatgttgaaactcctgttatctcataatcacgttgaatgtgctcattggttggttgattttttaaagtctagtttaaatccatttaatttcagccctgca

SEQ ID NO: 62627 - DNA, 220 bp, Homo Sapiens
aggtcaggattacttttaatgaaccattctgttgcttctgaataactcaatcaggagtttaattgtatgaccatcttgtatgagactaatcatagcttacattcaacatttgttcttcataccatttccaagaatactttatcattttgaaaagcctcaggagccaaaatctatctgtcattatcttattcagtctgctaatcactagtaatattactag

SEQ ID NO: 62628 - DNA, 562 bp, Homo Sapiens
accattgacgtgatccgcttcgtagtggattccggaaaggtgaaggagatgagttacgatccgcaggccaagcttcaacggctgcaggagttctggattagtcagtccagcgcagagcagcggaagggccgggcggccgcacgggccccggagtctggttcggcctctatgccgaatcggactatgatgccttcgccccctaccccgtcccagaaattcggagggtggccctggactcgttggtgctgcagatgaagagcatgagtgtgggggacccccgaaccttccccttcatcgagcccccaccaccagccagcctggaaaccgccatcctctacctccgggaccagggggccctggacagctcagaggccctcacacccattgggtccctgctagcccagctgcctgtggacgttgtgattgggaagatgctgatcctgggctccatgttcagcctggtggagcctgtgctcaccatcgcagccgcacttagcgtccagtcgcccttcacccgcagcgcccagagcagcccagagtgcgcggcagcacggcggccgca

SEQ ID NO: 62629 - DNA, 956 bp, Homo Sapiens
cgcgaagttcctacctgcacctgtggcagcggtgaccgcctcctgggttattttcttttctcccccagctgccccaggttctggtttcccgaatcacttggcaaataaccagcaggtgggcagatgtcttttttgcgttcctacggacgcgtaggcaagttcgatgcgccggagtgaacagccaggtcccatctctcagccggctcccgggcggtgctagcagggaagagggacgcgccggcgaatgaaacactactagcccggaaagccgccctggaccttccacccgggcagcgagtctggcggcccctcgccgccgccccctccgaccagaacagactgcgctgcgagccccgggcttccgccgcagcgcgcagcaattggaggtgccagaggagaccagcagcagcacttgatttagctgggctgcgggaattccgacctgtacactttccagaagcctgatctctccaagtccgcgcccagggactcgagccccggcttccaggttgacccgagcgcgcccccttcgtgctctcggccgcgttcaccgcgcgaggcctccgggtcctgttaagcccgagcagcacaggccgctgcctcagcatccaccccgcagcccacgtgtggcaagccggggaaggggtggagtgaacggccggagaccacgtggagaaaggggccgctttggcccttccatctgggtgccgggagcccctaggccctccggccatggccgacagcggcgatgctggcagctcgggcccctggtggaaatcgctcaccaaccagcagaaagaaaagcaaggaagccgcagtggggggtgccggctcctgcccagtccgctcccgggggagcccaacggccacttgcgccgcccaagcccggactggaccagacagctcgcggggagaaaccaggaccccaatctcctcagggtgcgctgggaagcccg

SEQ ID NO: 62630 - DNA, 1135 bp, Homo Sapiens
caaagcaaaagaataagcttcgggcgctgtagtacctgccagctttcgccacaggagcctaggctgccacctgtaggtcacttgggctccagctatgtggctgcctcttctgctgggtgccttactctgggcagtgctgtggttgctcagggaccggcagagcctgcccgccagcaatgcctttgtcttcatcaccggctgtgactcaggctttgggcgccttctggcactgcagctggaccagagaggcttccgagtcctggccagctgcctgaccccctccggggccgaggacctgcagcgggtggcctcctcccgcctccacaccaccctgttggatatcactgatccccagagcgtccagcaggcagccaagtgggtggagatgcacgttaaggaagcagggctttttggtctggtgaataatgctggtgtggctggtatcatcggacccacaccatggctgacccgggacgatttccagcgggtgctgaatgtgaacacaatgggtcccatcggggtcacccttgccctgctgcctctgctgcagcaagcccggggccgggtgatcaacatcaccagcgtccttgggtcgcctggcagccaatggtgggggctacttgtgtctccaaatttggcctggaggccttctctgacagcctgaggcgggatgtagctccatttgggatacgagtctccatcgtggagcttggcttcttccgaacccctttgaccaacttggagagtctggagaaaaccctgcaggcttgctggggcacggctgccttcctgctattacagggcccactatggggggggccttccttcaccaagtacctgaaaatgcaacagcgcatcatgaacctgatctgtgacccggacctaaccaaggtgagccgatgcctggagcatgccctgactgctcgacacccccgaacccgctacagcccaggttgggatgccaagctgctctggctgcctgcctcctacctgccagccagcctggtggatgctgtgctcacctgggtccttcccaagcctgcccaagcagtctactgaatccagccttccagcaagagattgtttttcaaggacaaggactttgatttatttctgcccccaccctggtactgcc

SEQ ID NO: 62631 - DNA, 259 bp, Homo Sapiens
gactggtgcctctagcttcgtcagcgcagaacacctcacctctggcccccagcacaggaaagcagcgtggtcaggaggggttaaacttcggctgaagcacaggcgcagtgagcctgcaggccgacctcactcgtggcacacaactaaatctggggagaagcaacccgatgccagcatgatgcagatatctcagggtatgatcggccctccttggcaccaaagctaccattccagctcctctactagtgacctctccaac

SEQ ID NO: 62632 - DNA, 1195 bp, Homo Sapiens
tctgcctgctgtcgggggcgggctggccatggccgatggccggagcatggcaggcatcccccggagttgtctcttttcatgccagcgtcaacaggaggctgtctggacacactgattactcactcaccagcctccctcttttgtccaccagcccagcctgactcctggagattgtgaatagctccatccagcctgagaaacaagccgggtggctgagccaggctgtgcacggagcgcctgacgggcccaacagacccatgctgcatccagagacctcccctggccgggggcatctcctggctgtgctcctggccctccttggcaccgcctgggcagaggtgtggccaccccagctgcaggagcaggctccgatggccggagccctgaacaggaaggagagtttcttgctcctctccctgcacaaccgcctgcgcagctgggtccagccccctgcggctgacatgcggaggctggactggagtgacagcctggcccagctggctcaagccagggcagccctctgtggaaccccaaccccgagcctggcgtccggcctgtggcgcaccctgcaagtgggctggaacatgcagctgctacccgcgggcttggcgtcctttgtcgaagtggtcagcctatggtttgcagaggggcagcggtacagccacgcggcaggagagtgtgctcgcaacgccacctgcacccactacacgcagctcgtgtgggccacctcaagccagctgggctgtgggcggcacctgtgctctgcaggccaggcagcgatagaagcctttgtctgtgcctactcccccagaggcaactgggaggtcaacgggaagacaatcgtcccctataagaagggtgcctggtgttcgctctgcacagccagtgtctcaggctgcttcaaagcctgggaccatgcaggggggctctgtgaggtccccaggaatccttgtcgcatgagctgccagaaccatggacgtctcaacatcagcacctgccactgccactgtccccctggctacacgggcagatactgccaagtgaggtgcagcctgcagtgtgtgcacggacggttccgggaggaagagtgctcgtgacgtctgtggacatcggctacgggggagaccagtgtgccaccaagggtgcatttgcccttccaccactgtgacctgaggatcgacggaactgcttcatg

SEQ ID NO: 62633 - DNA, 744 bp, Homo Sapiens
ttttttttctaaattttgggttctttttaaaggctagcatggaatttttaaataatagactttcattttccagactttatgaagccttttgaagaagtgacttttcccatgtgttagaaaaatcttcaatatatgatgatgatcttatttcaggcttcattctcttctgagaggatgaaattgactgaggcagtcactctgtgaattacttttgaatttaaacgaagtgcagataggatttaattgatactggctttgcaagaagtgtactcatcctcaaccatttgtttgtataatataatacatatagatagaggggcgataatatactggtagacaaagaatgcaggaaatgcccttattcatcacaccaccaagcaggcctcaccctaaagaccagcaaaagtaacaaaagcacatttggaaacccaggaagccagtaaaagtaaatctaaaggctgacagggtgtacattattatgtatgtgcaatataaatcaaattcaaagctgttttctcttaaattttgatacttatagagacaggacttgccatggggaatttctttccccttactatataattttattactagaaggaaaagtaatagcaatgataataatgaacagacttcgtgtctttattacatttgctttcctagttacctttagactgtcacttctgagttctttctctgacatgcttttcttttctcgtgaagcgtcttacattctgactaaatttt

SEQ ID NO: 62634 - DNA, 949 bp, Homo Sapiens
ctcacagacgggtttttgaggctttcgttgagaatgtgagttgctgaagtaaaggaaccctgcagccttcccatgctatctgttgacatggaaaacaaggaaaatggctctgtcggtgtaaaaaattccatggaaaatgggagaccacctgatcctgcagactgggccgtgatggatgtcgtcaattatttccgaaccgtgggatttgaggagcaagctagtgcttttcaggaacaggaaattgatggaaaatccctgctattgatgacaagaaatgatgtgttgacaggacttcagttaaaattggggcctgctctgaaaatctacgaatatcatgtaaaacctctgcagacaaagcatttaaagaacaactcttcatagtacagtcaaattggggtcttcgacctcaaaaaatacataatgacataatttagtttcatgtaatgaaactttgtaaacagaatacatacatgtgtatatgtaaagaatttcaatcaaatgaaacgttatcctattggatagactaggcaattcatcagctcacctgaaatcagccaggaggagcaaggacaagatgcgcacagggtggttttcctcatggattttgtcaaatagatgatctttgacacgattagacactcctccccacaaaggctttgaaatcataaggatcttcctcatctctttatagctttcccaaaatcttttacaaaaagaatttaattaaatgacagtctttggttacagacttaggatgagtaaaaacaagaaaacttggggagggggagacacgaagaaacgggattgctgtctcccttgaattcctctggttcttagagcttgtgttacttggacggaattgccaacaccctttttatagaagggttctcccttgaccttataaggctcattgggaatatgctgcatgtttgaaatgaacatgcctcag

SEQ ID NO: 62635 - DNA, 374 bp, Homo Sapiens
cttaaaggctcaataacaaatacaacaaatgtaaatatgtttacattttaagacatatgcagtggttcttacagatcagttaattaactccagaaagcaaatgttagactacacatttatttttctccttgatcaagtgtaaaattctgaaacagaggctttaaaatttaaaacctcagcaaaataatccatgaatttactgattcttctgtatcgtgtgtagttaccattatgtaactatacacacatacagctatggatatagttgtataatgaaaattatctgcaaacacctaaattaaagagaaaaaaaagtagtttgtaaactcatttgtgatatactgcaaagaggttatattaaagcaaataaaaat

SEQ ID NO: 62636 - DNA, 842 bp, Homo Sapiens
agccatttctgtttaaaattttgtttatttctttctgaaaggaagaagatttctctccccatgtcagctgtagtctgcctctggcttcggcaccttcccagccttgaaaaagcaatgctgcatctttttgaaaagctaatctccagtgagagaaattgtctgagaaggatcgaatgctttataaaagattcatcgctgcctcaagcagcctgccaccctgccatattccgggttgttgatgagatgttcaggtgtgcactcctggaaaccgatggggccctggaaatcatagccactattcaggtgtttacgcagtgctttgtagaagctctggagaaagcaagcaagcagctgcggtttgcactcaagacctactttccttacacttctccatctcttgccatggtgctgctgcaagaccctcaagatatccctcggggacactggctccagacactgaagcatatttctgaactgctcagagaagcagttgaagaccagactcatgggtcctgcggaggtccctttgagagctggttcctgttcattcacttcggaggatgggctgagatggtggcagagcaattactgatgtcggcagccgaaccccccacggccctgctgtggctcttggccttctactacggcccccgtgatgggaggcagcagagagcacagactatggcacaattaaatcagctggtggcgtatccccgcatcgtgtgctgggcctggcgtcactgcctctgtggatgtccttgaggtgaagaacatgggtgcaaagaccaagcgtgtccccgcccaggatgtgtcctgccttgtgaaaaaggctgtccactcat

SEQ ID NO: 62637 - DNA, 494 bp, Homo Sapiens
cccccggtgtccacaccgaagagccaagtcacgggacaggaggtccacggagccctccgtgacgcccgacctgctgaatttcaagaaaggctggctgactaagcagtatgaggacggccagtggaagaaacactggtttgtcctcgccgatcaaagcctgagatactacagggattcagtggctgaggaggcagccgacttggatggagaaattgacttgtccgcatgttacgatgtcacagagtatccacttcagagaaactatggcttccagatacatacaaaggagggcgagtttaccctgtcggccatgacatctgggattcggcggaactggatccagaccatcatgaagcacgtgcacccgaccactgccccggatgtcgaccagctcgttgccagaggaaaaaaacaagagcagctgctcttttgagacctgcccgaggcctactgagaagcaagaggcagagctgggggagcccgaccctgagcaa

SEQ ID NO: 62638 - DNA, 581 bp, Homo Sapiens
ctgtgatctagaggatccctttagctggacaggagcagtgggtgcatttcaggcaggctctcctgaggtcccaggcgccagctccagctccctggctagggaaacccaccctctcagtcagcatgggggcccaagctccaggcagggtgggctggatcactagcgtcctggatctctctcagactgggcagccccgggctcattgaaatgccccggatgacttggctagtgcagaggaattgatggaaaccaccggggtgagagggaggctccccatctcagccagccacatccacaaggtgtgtgtaagggtgcaggcgccggccggttaggccaaggctctactgtctgttgcccctccaggagaacttccaaggaggtgaggagtgtgtgaacgcacctgtgttggagcacggtgtcccactctggcgggtccccagggcctgagcagcagcgatagccctgtgacaatgtgaagggccacagaactcttgtattccagtcaggggcaaagagtggagacggagggcctgtccttctgacaagcagccccttccactgtctgacagtgggaggtcacc

SEQ ID NO: 62639 - DNA, 696 bp, Homo Sapiens
cgctcctgcaggacatattttggcatcgtgttcaacagatggtaccactgtcctatggaatactgaaaatggacagatgctggcagtgatggaacagcctagtggcagccctgtgagggtttgccagttttccccagactccacgtgtttggcatcaggggcagctgatggaactgtggttttgtggaatgcacagtcatacaaattatatagatgtggtagtgttaaagatggctccttggcggcatgtgcattttctcctaatggaagcttctttgtcactggctcctcatgtggtgatttaacagtgtgggatgataaaatgaggtgtctgcatagtgaaaaagcacatgatcttggaattacctgctgcgatttttcttcacagccagtttctgatggagaacaaggtcttcagttttttcgactggcatcatgtggtcaggattgccaagtcaaaatttggattgtttcttttacccatatcttaggttttgaattaaaatataaaagtacactgagtgggcactgtgctcctgttctggcttgtgctttttcccatgatgggcagatgctagtctcagggtcagtggataagtctgtcatagtatatgatactaatactgagaatatacttcacacattgactcagcacaccaggtatgtcacaacttgtgcttttgcacctaataccct

SEQ ID NO: 62640 - DNA, 538 bp, Homo Sapiens
gatccttatgctttgggacggcggggcagagtgtgtacgtggtgggggcttcctcggtggcgggcatggaggcttcgcgctgccggctcagtcccagcggcgacagtgtcttccatgaagaaatgatgaagatgcgacaggctaagctggattatcagaggctactacttgagaagaggcaaaggaataagcgccttgagccatttatggtgcagcccaatccagaagccaggctacgtcgggcaaagccaagggccagtgatgagcagactcccttggtgaactgtcatactccccacagcaatgtcatcttacatggtattgatggtccagctgctgtcctgaaaccggacgaagttcatgctccatcagtaagctcctctgttgtggaaagaagatgctgaaaacaccgtggatactgcttccaagccaggacttcaggagcgtctccaaaagcatgatatctctgaaagtgtgaacttcgatgacggagaccgatggaatatcccagtcagcatgtgtagaaagaccctattct

SEQ ID NO: 62641 - DNA, 516 bp, Homo Sapiens
atggacgagctgcagacctgatcgagaagacctataccatcacgtgcaccgtgcgacgtgtacacctccgctacgcacaccaactcctgttggtgaagggccaggtcaccaccaagtactaccggctgctgtccaagcggggcggctgggtgtgggtgcagagctacgccaccgtggtgcacaacagccgctcgtcccggccccactgcatcgtgagtgtcacttatgtactcacggagattgaatacaaggaacttcagctgtccctggagcaggtgtccactgccaagtcccaggactcctggaggaccgccttgtctacctcacaagaaactaggaaattagtgaaacccaaaaataccaagatgaagacaaagctgagaacaaacccttaccccccacagcaatacagctcattccaaatggacaaactggaatgcggccagctcggaaactggagagccagtccccctgcaggggaagaggaagcattttaatacatatgcctctctttta

SEQ ID NO: 62642 - DNA, 489 bp, Homo Sapiens
cccgtgagagagggaaatgtttcaggctttccccggagactacgactccggctcccggtgcagctcctcaccctctgccgagtctcaatatctgtcttcggtggactccttcggcagtccacccaccgccgccgcctcccaggagtgcgccggtctcggggaaatgcccggttccttcgtgcccacggtcaccgcgatcacaaccagccaggacctccagtggcttgtgcaacccaccctcatctcttccatggcccagtcccaggggcagccactggcctcccagcccccggtcgtcgacccctacgacatgccgggaaccagctactccacaccaggcatgagtggctacagcagtggcggagcgagtggcagtggtgggccttccaccagcggaactaccagtgggcctgggcctgcccgcccagcccgagcccggcctaggagaccccgagaggagacgctcaccccagagaggggcggagcagg

SEQ ID NO: 62643 - DNA, 553 bp, Homo Sapiens
actgtgcttcaaataaatagaaaaatagttataatattgatcttcaactttgccattcatgcttctatgcatattaggctacgtattccacattgaaagcatgagagtgtctaggcctttgaatgcatatgccatttctgggaaatgcatctggaggctaagtattgctttctacaaataattgccccctttgttttaaaaagaagaaatgcatattgaagtagtttgatgatttgtttggcatataggaagcacgctggtgctaagtattttttaaatggttatgtaagcaaagctgaactgtaaatcttcaggaatatgtattaagattgtggaatgggtgtaagacaattggtagggggtgaaagtgggtttgattaaatggatcttttatggccctatgatctatcctttacttgaaagcttttgaaaagtggaaaggtcattttgttgcatttccccatttcttgtttttaaaagaccaacaaatctcaagccctataaatggcttgtattgaacttttacatttgaattaaagatgttaaacatgaa

SEQ ID NO: 62644 - DNA, 1236 bp, Homo Sapiens
cccaaggtccagctctctttcctaaagaaggtgcctgaagaagtctctcttctctctgcttcgtggccccatttcttaaatttctagggctgatgctgaccatgtggtttccacaccttattggccccagaggggccctcccatgggaagatctgcagcagtctccccaaatcagtgagcacctttgagcgcccacgaagaactttctcaacagcccccaattaggagctcagtgctctcttggggcaatgcagttaaaagggtgagcctcaaatctagtcattacaccagtcaacagaagtggacagggccataggcctctcctcagctccttaaccctcctccttctgccctggattgtaacctctcccttgtccaaatctaggattcctggtaggaaaaggaaaaggcccttgcctatccactaccaccacttccaactggcccctcttgccatgacctggactatggagaaccagaggaaacagagagggagcggaagatgggagatggagcagggacaccatgtaagaatcagagacagcaggactacatagggaccactccatctcatcgctacactagctcccagagaaccaccctggagccatagaccgtcgtaagacaacgcgaggaagcccagtgcataggcagcagagagatatcacatcgagaggcccgttaatgagacaaatcatactgaagcccatgaacggaacgacaacaacaagcgggagggggcggaaaggtagagccacaacaggaagacataccagaagatggaacagaacgccaggcagcgaggacgcagcacatgcgtgcgaatgcaattcccttcgcaagaaggacggaagaaacgacgtggcccgacaggacatcgaacaaggaaccagggaaacatatgaggatcgaaaagtggccccgaccgagaggtgacctgagacgggggcacttcggacacacgcggaccacagcgccaagataccaccaaagaaagcaagcagaccagggcacgcagcaacccacaatccagggaaagtgccagggacaggcgaggaacggatatgagggcccacggtgggaagaccaccgcagcgggtgaacaacaactgagatgcgacaaggaaacacggtcgcagggcaaaacagaggcacacagcacgcaacaaacaagccgagacaaagcgggctaggggcaaccagaagaccaccggcccgcgcacgggcccagacccg

SEQ ID NO: 62645 - DNA, 258 bp, Homo Sapiens
  misc_feature (18)..(18): n is a, c, g, or t
gtttttttccccaattanctggaaaattcccaaatttgggaactttttgatacgattcttgtgaaaacactgtattttcgactgaaaattccactttcttcatcttgttttttagctaaaaagagggactgttaaatacaatgtatgataccatgacaaaaatctttcctgaattgtctttgtaaaagtattattgaattttcaatttgtaatttcttttgaaaatgaccatgctcgaataaaaatgtagccaaacta

SEQ ID NO: 62646 - DNA, 896 bp, Homo Sapiens
cgggcacggtcaggcgtgacgtcgggaggagggcagacacgccgctttttggatgcctcctatgcctggcgggagtcttgtctgagctggcaccaccacacggcccacgacatcttcgcagggaagcctgtggaccctctgccaggctccacaagaggtcaggacagtgcagtgtgttcacaaggccagtttctgatcgtccgccccgaggctgaggaccagtaggcagctcccaagatgggtgaaaggaaaggggtcaacaagtactatcctccagacttcaaccctgagaagcatggctctctcaaccgataccacaacagccacccgcttcgggagcgggctcggaagctgtcacagggcatcctcatcatccgattcgaaatgccatataacatctggtgcgatggctgcaagaaccacatcggcatgggtgttcgttacaatgcagaaaagaagaaggtgggcaattactacacaaccccgatctacaggttccggatgaaatgccacctctgtgtcaactacatcgagatgcagacggaccccgccaactgcgactacgtgatcgtgagtggcgcccagcgcaaggaggagcgctgggacatggcggacaatgagcaggtgctgaccacagagcatgagaagaagcagaagctggagacggacgccatgttccggctggagcatggcgaggccgaccgcagcacactcaagaaggcgctgcccacactgagccacatccaggaggcccagagcgcctggaaggacgacttcggcctcaacagcatgctgcggagaaggttccgggaaaggaaaaaaggcatccaggaggaggaggagagagacccaggcctgccgggccacggcgaggctgaccagtccgctggtgccca

SEQ ID NO: 62647 - DNA, 679 bp, Homo Sapiens
agaaataagagatgcagtgattttaccccttcacaggttatattgaacttcttctgtataagagagcagagaaacctctctctttcatgcaccacatggaaacagagtgtggccctgaagttgtggctttctttgtgtcaatacctgtggtctgagtttttagagaaggaaacatgctactcagtgagaaatccaagaaatgaaaccaggaaggttttcagatcacatttcccagagtgagttcgggagaatcttggctgtcgtgatcactactgttccccgccgccccaggtcagcacatacttgacccagagtgggctctcaggatttgttgacttgaagggtgcggtgaaagctggctggagactcctggcctggccacctgcaagaggcggactttgaagataaactgtgatccagttgagccactttgtccctgaggggaatgctgctttgcagctttctgtaacttctcacatgggaattgcactggtgacagataaggtttaacagatgtactttctttatcctcagaataagacaaggcaaactctatatggctagtattactgagtcaggtccctcccgttgacccattaattccagcattgatcaatacgaaccaaattccagccccaggacaagagtggcaggcatgggggcctggtactccaggcta

SEQ ID NO: 62648 - DNA, 862 bp, Homo Sapiens
  misc_feature (224)..(320): n is a, c, g, or t
gcagggtctacacacgcagaagctgataacaaaggcaacatcgcgagtgtggcccagaaaggggctgtcccatagaaaggccctgtgagtagggagctcgtacactggccatgggcagcgacaggccgctctgagcacaaaaggccctatttcccctacggttggacccaggagtctactcagaccagctgtgtgctgccaggcacagaggcacatgccagtgnnnnnnnnnnnnnnnnnnnnnnnnnnnnnnnnnnnnnnnnnnnnnnnnnnnnnnnnnnnnnnnnnnnnnnnnnnnnnnnnnnnnnnnnnnnnnnnnnatatacacataatattagctgggtgctggtgacaggcgccatacaaccccagctatattgggaggctgaggcagtagaatcgcttgaacccagatagcagaggttgcagtgagctagagagtgtgccattgcagagagactccatcccaaaaaaagacagctgtcccaggccaagggtactctgggagagcccgctcatggagaacctagtgttagaccaagtagcagaagctgtggtcatagacaaaacaatttgaggaagaaatcttacaaatcaccactgccctttctccttttccataaaactgtccatcttttcggtgctccctaatcacaagcagcttgactttagagaagttgcagaagcagtgaagccactaacatgctgtgtgactttatgcaagtcactcacctcaggtgagccacctccatttgttcattctgtgaaatgggcataaccagtaatacataaccctacctacctcacagggctgttgtagagatcaaatgaaataatgtaacgtgagaatacagtataaatg

SEQ ID NO: 62649 - DNA, 570 bp, Homo Sapiens
tagatctgtttttaagtcttgtatattcctacatagctgtccgatgtattatatttgtatagtgaattgtgtacaatttttgaataagtgcatcatcacttaacctttatgttgtttgaatagtgatgatgatacatttcttcagacatttaactgtcatttttttcctttgtcatttgtgagttttatttgtacagttcctcatgaagttgcatctgagatgtgtgtatatgaaaagattatacaagggtaaaattaagcaatatattaactatggttcttcaggagaaagcttacagtgtttcaggttgtgatttattttcaaaatggagttgactctgaacatcactttgttcacctgcattgatgtttgtatttctagtgtgagcagtttatgcaaaggtagatatattcagagaaattttaaatacatttatgcaagttaatattgctttgctgatgctatttgcttatttgatgttaaataatgctattgtaaataaagaattctgttgttattgcatcatttaataaattttaatgccttcgggttttacatggcaaaaaaaa

SEQ ID NO: 62650 - DNA, 505 bp, Homo Sapiens
ccggacccttccctcctttgtttacaagatgactaattctagaatccggggttgtcctgtcctgtgagtgtgaccctgactcatccagaccctgtagagagagacgagccactcagtatttatgagatgtctgcacctttatccctaagcctgactattagcaatacgcatatcctatatagaatctattacagagctacgttatctccacaccttttgaggaggacagaagggactggaccgtgttggagctgccgcctggcaggtggtgggcctgggatctagccgcctctcctgccctgccttcctcttccccaaggggatgggcccaggaggcagctgggttgcatggagaggtccaggagggaccggaggtgtgacagatactgtgagcccggcgggccgcgcctggctgggtgcctcggtacttgaattctgtcttggtttccgcattgtgtccgtccacccgagttctctgtcgtcacttaactttgcatttggattt

SEQ ID NO: 62651 - DNA, 364 bp, Homo Sapiens
ggaagcaacactgcagggacactgaccgtgttgatcaaacgtggaattgtgggaacgtattctgctccagttgttgtaaccagaaggttccagttcccagccagcagctctttgaacccagtcgacgtatgcgagtcttgctatagcagcctacatcccacaagctccagcattgaccttgaactggataagcccattgctgccacttccaactgaagctcagtgacctgggtgggcagtggccaagctgctgttcctatgccaggggcactgagcctgggcagaccgagaggcgcgtgccctttggaatgggagcgtggagccagctgttcagagtgcctccaggctagggcgttcctcatca

SEQ ID NO: 62652 - DNA, 376 bp, Homo Sapiens
actcgcggggccaacaaaccgcctggacttctggagcccacgtccactctggtccgtgtgaagaaaagtgcggccaccctgggcatcgccatcgagggtggcgccaacacccgccagcccctgcctaggattgtcactattcagagaggcggctcagctcacaactgtgggcagctcaaggtgggccacgtgattctggaagtgaatgggctgacgcttcggggcaaggagcaccgggaggccgcccgcattatcgccgaggccttcaagactaaggaccgtgactacattgactttctggtcactgagttcaatgtgatgctctagaggccaaggcctgagggcctcccaccactgcccagcccctggtcccagt

SEQ ID NO: 62653 - DNA, 331 bp, Homo Sapiens
acgtcctctgagccgcccgcaggcctccgggtgtccggggaggaagagaccgagaacgttgggggcgcgaaccgccaccccaggacgtccccgaagacgtcaagctgcggcgtcgtccaccggccggaacgggaggctctggagaacgagcccggccctcaagggacgctgtctggggccgggagccgcaggggggcgccgggtgcagagcacgaaccttccctgtcctcccggcacaagaacccggcgccgcccgagggcaagccctcctccgggagggactgccgtcgagggggaccaggcggcgggatggatgttgagcagcaggagg

SEQ ID NO: 62654 - DNA, 700 bp, Homo Sapiens
  misc_feature (26)..(26): n is a, c, g, or t
  misc_feature (86)..(86): n is a, c, g, or t
  misc_feature (95)..(95): n is a, c, g, or t
  misc_feature (107)..(107): n is a, c, g, or t
  misc_feature (164)..(164): n is a, c, g, or t
atccccccagccatcaccacaagganctatgatcccacctcacggcgtcccgagatgacaagagaacaaagtttgccacaccatgnagttcgtgnaggactactcanccatgtagtcagcgagcccgtgccctttgccaacgaggagaagaacaagctcacttntgaggtggtcagcctggcgcacaatctcatctacttcggcttctacagcttcagcgagctgctgcggctcactcgcacactgctgggcatcatcgactgtgtgcaggggcccccggccatgctgcaggcctatgaggaccccggtggcaagaatgtgcggcggtccatccagggcgtggggcacatgatgtccaccatggttctgacgccggaagcagtccgtcttcagtgcccccagcctgtctgctggggccagtgcttctgagccgctggacagaagcaagtttgaggagaatgaggacattgtggtgatggagaccaagctgaagatcctgggaatccttcagttcatcctcaacgtccgcctggattaccgcatatcctacctgctgtctgtcttcaagaaggagtttgtggaggtgtttcccatgcaggacagtggggctgatggcacagcccctgccttcgactctaccactgccaacatgaacctggatcgcatcggggagcaggcggaggccatgtttggagtgggg

SEQ ID NO: 62655 - DNA, 299 bp, Homo Sapiens
ctgtgccgattctccgaccacctgtgcaacattgccctgcaagagagccacagcgccgtgctgcccgtccatgtgccctggggcctctgcgagcttgcccgcctcattggtacaggtccccatggcaggggatggctggctggacccgcctcctagaagaggcccagtaccaactcctcacgggacttaatggacctggcagggtattgccagggcatggccctagttcctgttccccgccctgcaggcttcactcctggggccaaggagcttttcaagcaggagaaccatctggcgct

SEQ ID NO: 62656 - DNA, 412 bp, Homo Sapiens
  misc_feature (18)..(18): n is a, c, g, or t
agggtcagactcctaccnccagtgcagccttctcagttctgctagccactgacccagtttgacaccctctactttgttctccatggagaaggcttcatcttttccccctcaccagtggatgtctgaatacattcaggggcttggaagtgccagctttactacccattccctttactgcctccttcccatgtcaggttgaagatcttaaaaacaagaatctgctgcttcgagctcagttgcggcaccacggattagaggtcgtcatcaagaatgacagcaactaactatggggattcaggggctttgggcccaagaactgcagatagcccaggagcagcagcctaatgccgtgaccacctccttagctgagctccctttggcatcagagcagggggaagttcagaagtgtgtg

SEQ ID NO: 62657 - DNA, 766 bp, Homo Sapiens
agaagtgtcctacccaggagtcctgaatgtgatctgagtatgctctaaggcagccccaggaaaagcaattcagtccctctctctttgcctttagacctgcaggctgggacaatgaaaagaaaatagctattttacatgaaaattttacaaccgtgaagccggaatatgcatatgaagactttattgtgaaacctcccgtgagaaagctggtccacgacaaagagttggcagcagaagatgagcaggtgttcctaatgaagcaacagtcactccttgccaagcaaccagccactcccacgagagcttctgaatctcctgcaagaggaccctctggctctccaaggacccagggtcggggagggccagccagtgtgcctagctcctccccaggcactgtcagtaaaaaagccggacccaacattcaaaaataatgcagcaagtgaaggggtgttggccagcttcttcaacagtctgttgagtaaaaagacaggctctcctggaagtcctggtgctggtggggtgcagagcacagccaagaagtcaggacaaaagactgtgttgtcaaatgttcaggaagaactggatagaatgactcgaaagccagactctatggtaacaaactcttcaacagaaaatgaagcctgaacctccttaaaaagtgcatatgtcgaatgaccaaataactatgtatattgatctgctaagaccaggatttttctgatatggcacatgctatcagttttttggggcaggggagatgaacttt

SEQ ID NO: 62658 - DNA, 783 bp, Homo Sapiens
gaagtcatcttggaatgtctgatggcatgcaggagcaaacccccagaagaggaagaacgaaagaaacgaggaagaaagagggaagacaaagaggacaagtcagagaaagcagtgaaagattatgaacaggaaaagtcttggcaagactcagagagattaaaaggaatcttagagcgtggaaaagaagaattggctgaagctgagattataaaagattcgcctgattccccagaacctccatacaaaaaaccccttgttgaaatggatgaaactccacaagtggaaaaatcaaaagggccagtgtcgttattatccttgtggagtaatagaatcaatactgccaattccagaaaacatcaggaatttgctggacgtttgaactctgttaataacagagctgaactatatcaacatcttaaagaggaaaatgggatggagacaacagaaaatggaaaagccagccggcagtgaagagtgacttgaagaactaaatttagcatattgcaaaaatattttgtgcggaattcgatataagtacttttacagcaagatggtatagttatgttgcctggactggtttttacatttttaaaatatttcagctgtcatttttgtactaattataaaattggcacataattcaaaaatatacatttgagatgatttgtcctcccaaattatacaagtttattttatggtataaagtgttctctctggaaatgtttttaaaaaaattcttaggcttctctttgcgaaataaaactattaaaatatttgaaatgc

SEQ ID NO: 62659 - DNA, 388 bp, Homo Sapiens
  misc_feature (23)..(23): n is a, c, g, or t
ggctcgccgcgccgccccgcctnacttagcggggccaccgagcgatgcccgccgggcgcccgcgaaagtttgtcggctcctgctgaagggcagcggcgcccccgcacccccgtgccccgctccggccaggagccttcacgtaaatgggtccagtcatgcctcccagtaagaagccagaaagctcaggaattagtgtctccagtggactgagtcagtgttacgggggcagcggtttctccaaggcccttcaggaagacgagtgacctcgacgttttctctgcctgacatccgattataagaagggggccatggaagatgaagagctgaccaacctgaactggctgcacgagagcaagaacttgctgaagagctttggggagtcggtcct

SEQ ID NO: 62660 - DNA, 347 bp, Homo Sapiens
gcagagcatatcagtttctatgtgaccaaggcaagcaatagcttttcaaagctaagcggcaaatcctttggaccctgagaatttgggagagaacagtgcatcaggccaggctcagctatatgtttgctcacattctttcagccttctgtcacccccctcaacaccaaactttcttccttgtgagcagagggttggctgctgttagcaggatcccacacgtgataaccaggcccttcccttcctaagccaaaagccattgtggctgcctgtctctcctgtctctgacttctcaggcagcctcctgagtgcactgagttgtatccgagagggtgggaacagcagcatcc

SEQ ID NO: 62661 - DNA, 461 bp, Homo Sapiens
ctaatttttgtatttttagtagagatagggttttgccatgttgcctaggctggggtttaagttaaattttttaaaaaactaaagtgactggcactaagtgaacttgagattatcctcagcttcaagttcctaagataagggctttcttaagctttcaggtgtatgtatcctctagatgtagacaataatgtcccatttctaagtctttcccttttgcttctccttaaattgattgtacttccaaatttgctgttatgtttttttcctaatactgtgatttatttgatctgcagacaggaaccttgtctctgttgaagagcatcaaggggagattatgtacgccttgaaactgaagtgtgttgttactgacttaatgtgcagtaactcctcagatatctgttaaggcatttcccagatgtgatgccagtcttcttacctgtactgaaagatgtttagcttag

SEQ ID NO: 62662 - DNA, 557 bp, Homo Sapiens
cttcggcaccgcagcagcagcgagatcaccctcagcgagtgtgacgcggaggacgcgggggagccgcggggggcccggcacacgggggcgctgcccctcttccgcgagtacgggagcacctcgtccatcgacgtgcagggcatgcccgagcagagcttcttcgacatcctgaacgagttccgcagcgagcagcccgacgcccgagggtgccaggccctcaccgagctcctccgggcagatcctggcccacacctcatggggggcggcggcggagccaagggggactcccacaacgggcagcccgccaaggacagcctcctgccactgcagcccacgaaggagaaggagaaggcccggaagaaacctgcgcggggcctcggcggcggggacacggtggactcgtccatctttcggaagctaaggagcagcaaacccgagggggaggctgggcgttccccgggggaggccgacgagggccggagccccccggaagccagcaggccgtgggtgtgtcagaatagcttcgcccacttcgacgtgcagagcatgctgttcga

SEQ ID NO: 62663 - DNA, 422 bp, Homo Sapiens
cggggactggtggggaagaggcccaggacatcttctgagccaggacgtccctgaggctccacctccaagctcagacagggcccaggcttggggaacagagagagcaggtgtacacccaaccaaagtgattgtgcccttggttggggggcgcgttcatataacctgtcagaagcaaacaggagcggcaacttctaactttgctccaagccactctctttttaaacagcaacaatttaaagctatgaagtcacctggagaaaaggaacgttgctcttggacagcaagcaaaccatttctctccgtctgttttgtttttctcctagtccctctcctgccacctctccaagacttccgtgggacacccacttccttctgtcctagttctctttgtccaatcagatggcaagggcagtgcgtggaaa

SEQ ID NO: 62664 - DNA, 859 bp, Homo Sapiens
ctggtacgggagtggctgagcctttgagcacaccaccattacatcatcgtggcaaattaaagaaggaggtgggaaaagaggacttattgttgtcatggcccatgagatgattggaactcaaattgttactgagaggttggtggctctgctggaaagtggaacggaaaaagtgctgctaattgatagccggccatttgtggaatacaatacatcccacattttggaagccattaatatcaactgctccaagcttatgaagcgaaggttgcaacaggacaaagtgttaattacagagctcatccagcattcagcgaaacataaggttgacattgattgcagtcagaaggttgtagtttacgatcaaagctcccaagatgttgcctctctctcttcagactgttttctcactgtacttctgggtaaactggagaagagcttcaactctgttcacctgcttgcaggtgggtttgctgagttctctcgttgtttccctggcctctgtgaaggaaaatccactctagtccctacctgcatttctcagccttgcttacctgttgccaacattgggccaacccgaattcttcccaatctttatcttggctgccagcgagatgtcctcaacaaggagctgatacagcagaatgggattggttatgtgttaaatgccagctatacctgtcccaagcctgactttatccccgagtctcatttcctgcgtgtgcctgtgaatgacagcttttgtgagaaaattttgccgtggttggacaatcagtagatttcattgagaaagcaaagcctccatggatgtgttctagtgcactgtttagctgggatctcccgctccgccaccacgctatct

SEQ ID NO: 62665 - DNA, 440 bp, Homo Sapiens
ctacatgctcgacagaatgcacgttgatagggagtttgctgttgtaacagatatgaaaaacagtagctccgtatcgaatacattgacaaatggatgtgtcatcaatggacatttggacttcccctccacgaccccgctcagtgggatggaaagcaggaatggccagtgcttgacaggaactaacggaattagcagtggattagccccaggacagccgtttccgagtagccagggttctctctgcattagtgggactgaggagccagagaagaccctgagagctaaccctgagttgtgcggttctctgcacctgaacgggagtccaagtagctgcatagccagtaggccttcctgggtggaagacattggggataacctgtactatgtacactaccacgggttttgggacactgctgaaagcatcccagaactgaacagtg

SEQ ID NO: 62666 - DNA, 563 bp, Homo Sapiens
cgtgcactcccatcttttctcatggcgctgcctctcttcagatctctgttgaggagctggcgcggaatctggtcatccaaggtcaacagggatgctgtcatgaaaatcgcggtggtcggggacttgttcccaccggagcgaggactgtatcatctgaacctgaccgtgggaggtattcccttccatgagaaggacctcgtgcagcctataaaccctcgtctggatggctgcatgaggagctggaactggctgaacggagagaagacaccaccatccaggaaacggtgaaagtgaacacgaggatgcagtgcttctcggtgacggagagaggctctttctaccccgggagcggcttcgccttctacagcctggactacatgcggacccctctggacgtcgggactgaatcaacctgggaagtagaagtcgtggctcatatccgcgccagccgcagacacaggcgtgctgtttgcgctctgggcccccgacctccgtgccgtgcctctctctgtggcactggtaactatcactgcttacccaagctaggtctaagctcgagttcg

SEQ ID NO: 62667 - DNA, 286 bp, Homo Sapiens
caacaagtatttaagcacctgctccatctagacattctgccaagtgctgaggacacaactatgtacaagacaaggtctcttgccttcatccagttacagtctgtcaatatagtcaaaccatcgaataccccgccttttcagattttgacaagtgtctaggaagtgaataaataatagaaggtgctaattggatgatctgagactgtctctctgaggatgtcatgtttaagttgattggtggtaccaaggtgtgtatgggagtttctttagctttcccaatctatcg

SEQ ID NO: 62668 - DNA, 556 bp, Homo Sapiens
aagaacttctttccctccaagtgataaccttttccagacaagtcagctttaaaactgacccaaaggccctgaagtacacagttttcttggagaaaggaaaaaaataagtgaaaaggacttgctgacttgctaattcattttggggcctgtgggtaacatcagaatggcaaagcacttggggcttttttctaatttgtatttttttaatcttctgagaaatgacttttatatgccaagattcattccatgattagtttttatgaccaagttatgaacgcttttgaatatggggacctagaatagaaatgctaacctacctgcaaggagagctctgtgattggcatccccatcatgctgtaactgacacaaaataaacttagggtaattgccgcatagtgtaactttaatgtgtgagcatactgtaacatctgacaagcttcttgatctagatcagcaatgtgtaacccattcattgttgtcactctcacaaggccttatggtcaacatcatcactctcactaaagagatagtttactgaatatactatacttctgaa

SEQ ID NO: 62669 - DNA, 788 bp, Homo Sapiens
gattctcttgttctcatgccatactgtaaatcactggacatcttcaccgtgggaggttcaggagatggggtggtcaccaacagtgcctgggaaacctttcagagataccgatgtctagagaacagcagaagcgtttgtgaaaaccccgatgacagatgtttgcagaaatatcatctttagcatttctgccctgttacaccagacaggcctggcttgtgaatgcgaccctcagggttcgttaagttccgtgtgtgatcccaacggaggccagtgccagtgccggcccaacgtggttggaagaacctgcaacagatgtgcacctggaacttttggctttggccccagtggatgcaaaccttgtgagtgccatctgcaaggatctgtcaatgccttctgcaatcccgtcactggccagtgccactgtttccagggagtgtatgctcggcagtgtgatcggtgcttacctgggcactggggctttccaagttgccagccctgccagtgcaatggccacgccgatgactgcgacccagtgactggggagtgcttgaactgccaggactacaccatgggtcataactgtgaaaggtgcttggctggttactatggcgaccccatcattgggtacaggagatcactgccgcccttgcccttgcccagatggtcccgacagtcggacgccagtttgccccggagctgcaaccaagatacctgttactttactgctgcctgtgtttgtgatcctggatacattggttccagatgtgacgatctgtgcctacaggata

SEQ ID NO: 62670 - DNA, 611 bp, Homo Sapiens
catctagaggatccgggcggcggctggactggcaccctacagtgcaccgtctgcagcttcatcgagcagcagtttgtccagcagaagggccaacgttttgggcttgggagcctggcccacagcatccccttgggccaggcagacccctcgctggccccttacattattgacctccccagctggacccagttccgccaggacaccggcaccatgcgggctgtgcggagacaacctgttcccccagcactcagcccctggccgaggtgtcgtctgggagtggctgagcgacgatggctcctggactgcctatgaagccggcgtctgtgacgatctggagcagcaggtggccaggggcaaccagctcgtggacttggcccccctggggtacaactacactgtctacttacaccacccacacgcagaccaacaagacttccagcttctgctgcagcggtgcggcgtcaagcagggccgccttacccagtgaccaccatcatcgctccgccgggccacacaggcgtcgcctgctcttgccaccagtgcctcagtggcagcagaactggccctgtgtcaggccgctaccgccactccatgaccaacctccctgcata

SEQ ID NO: 62671 - DNA, 510 bp, Homo Sapiens
agcagatatgctgcctgatcacacacttccagacacacgtgcacaggcgcagatatgctgcctggacacacgcagatatgctgtctagtcacacacacacgcagacatgctgtccggacacacacacgcatgcacagatatgctgtccggacacacacacgcacgcagatatgctgcctggacacacacacagataatgctgcctcaacactcacacacgtgcagatattgcctggacacacacatgtgcacagatatgctgtctggacatgcacacacgtgcagatatgctgtccggatacacacgcacgcacacatgcagatatgctgcctgggcacacacttccggacacacatgcacacacaggtgcagatatgctgcctggacacacgcagactgacgtgcttttgggagggtgtgccgtgaagcctgcagtacgtgtgccgtgaggctcatagttgatgagggactttccctgctccaccgtcactcccccaagtctgcccgcc

SEQ ID NO: 62672 - DNA, 389 bp, Homo Sapiens
cggccgcgggcggggacgcgcggacccaggcgcggatggcgaggccagcagggatgatggcgccacttcctcagtttcggcactcaagcgcctggaacggagtcagtggacggataagatggatttgcggtttggttttgagcggctgaaggagcctggtgagaagacaggctggctcattaacatgcatcctaccgagattttagatgaagataagcgcttaggcagtgcagtggattactactttattcaagatgacggaagcagatttaaggtggctttgccctataaaccgtatttctacattgcgaccagaatagggttgtgagcgagaagtttcatcttttctctcgcaagaagtttcagggcaaaactgcaaagagtggagt

SEQ ID NO: 62673 - DNA, 628 bp, Homo Sapiens
gtctggggtagatctagaggatcccgttggcgtgagggtcaaactatccggatctggtggaacgagactgcaatggggacacgccaaacctgagtttctacagaaatgagatccgcttcctgcccaacggcgtgtttcattgaggacatttcttcagaactggacggacaactatgacctcctttgaggacaatcactcctacatccagtggctgtttcctctgcgagaaccaggagtgaactggcatgccaagcccctcacgctcagggaggtcgaggtgtttaaaagctcccaggagatccaggagcggatttgtccgggcctacgagctcatgcttgggcttctacggggatccggctggaaggaccgaggcacgggcacggttgggccgagcaccagaactagcagaagcgcttccagtaacctgaaagtgggcagcaaaaaaccttcgggatcaacgcatcctcaggtcgctgggtgagctgggcctcgagcccacttccaggcgccgctggtcccgcttctacctggagggagacgctggtgcggagggagcctgccgggggttgcggcagagtgccctggactacttactgtcgacggggcggtgccgaacaagggcggca

SEQ ID NO: 62674 - DNA, 492 bp, Homo Sapiens
ttaacagcgagagctgcatgtattgacagcacattcctggcagagagaaggcctccaagacctttctcaagaagaattcttgctacacactgcttgaggttctttgcccgtgtgcagatgctggctcagacagcaccaagcgtagccggtggatggagaaggcgctggggttgtaccagtgtgacacagagctgctggggctgtctgcgcaggatctcagggacccaggctctgtgattgtggccttcaaggagggggaacagaaggagaaggagggtatcctgcagctgcgtcgcaccaattcggccaagcccagtccactggtatcatcgctcatggcctcttctccgacttctatctgtgtgtgtgggcaggtgctggctggggcgggagctctgcagtgtgacctgtgtcaggactggttccatgggcggtgtgtgtcagtgcctcgcctcctcagctctccgaggcccaatcccacctcatccccac

SEQ ID NO: 62675 - DNA, 130 bp, Homo Sapiens
gctcaccaggccaggtattggaggggatgctcatttgatgaagatgaaaggtggaccaacaatttcagagagtacaacttacatcgtgtgcagctcatgaactcggccattctcttggactctcccattc

SEQ ID NO: 62676 - DNA, 487 bp, Homo Sapiens
ggctcatacgcagtttcttcctatttttcccatttcccgttttaaagctagtggcatacctcacagtcaaataaccaagtggtcagtgtctcgacaatgtgcagtaacgaggtgggggctgcaagggtgaggggctcagtcaccttaacaaggcaggagacctcccacaaaaggctgatgtgtcgtccccagggccagctggacaagggcatgcagcgcaggggtagggggatggaaatattttctctcccgtaaactctgacttcatgtgagcaggcatggggtctccctgagagctgataaccgggaaaaccaaaaccaataatattcctaataataatactagaatgtaagaataatcatggtgtttttcactgaaccgctgttggctctggcttttgtcttttatatacaggaagtttttttataacaaatggtcccctaaggtttttaataaaaggaagggtccatggtcaaactggtaaaa

SEQ ID NO: 62677 - DNA, 497 bp, Homo Sapiens
ttccagagtgtgcagaagtgtcctctccccacgcgcggcgggctgcacattggtcgctggctccgagatcgcgcggggccgccggaagcccaagacggtaccgggggccgcagccgcagccggcgccgccctccgccctccccaacagcaggccgagtcccgtagcatccggtagggcaatggtcgtgctttcggtccccgccgaagtcaccgtgatcctgttagatatcggaaggtaccacaaccccgattgctttcgtgaaggacattttatttccttacatcgaagaaaatgttaaagagtatctgcagacacattgggaagaagaggagtgccagcaggatgtcagtcttttgaggaaacaggctgaagaggacgcccacctggatggggctgttcctatccctgcagcatctgggaatggagtggatgatctgcaacagatgatccaggctgtggtagataatgtgtgcagtctgggcactcggcgtgtgca

SEQ ID NO: 62678 - DNA, 827 bp, Homo Sapiens
  misc_feature (357)..(429): n is a, c, g, or t
ggtctcagggctggccctttttgggatttggatgagaaattggaagtactaactactttctagcatatctttaagaaaattgattgttatttactcccagatcctcttgcagacccagaattatcaggaacatagctctgtgattcatgagtgtccccatactgatgaattggagcatccatatggaaagcaaaggcagaattatcccagctgtattattttgatcttttggatgcaggtgccttaatgaagctctcaaaatattttaggagctgctcagggagtgttgggtggaactgtttggactacattgttttctcttagattatgtgatttttgttgggcactggcaaaagnnnnnnnnnnnnnnnnnnnnnnnnnnnnnnnnnnnnnnnnnnnnnnnnnnnnnnnnnnnnnnnnnnnnnnnnnttgcagacatgcaaaactgcagctgaaataataccttagatttctaggtaagtctttccacatttcaataatgggtaagagtagaaccagggccgggtatcaattattgcttgctgtttgcaaccaggcataaaatcactttctcaaatcatccaccgttcctattaaatttatgccggaaactctccttctgtgagtataactcctgcagttcctatagcagataagatataagaaagtgcctcctagtgctcctccgcccgcttgtttgctaaaattccctttctctctaagtccaccatttttcaagatttgtagatagtgtattagttagacagctttgtcgatctggccagatgttttttcctctttgtccaagggcagagacatcccaggaa

SEQ ID NO: 62679 - DNA, 1162 bp, Homo Sapiens
ttttcaatattgccacaatacccagggattaatgctgccacaggggggcaatctttatttgtcttacttcctaccccttccctgttatgcctctttaactcagttaagttgttctgtttgggacctggaaaagaacccaaagaaaacctgagtggacaggttcatttctggaatgcagaaaacattttaaaggctagatttttagaatattctcaactagcattctttccattgatttgaaggggaaattaactattataatctcttgaatccaaaactggatattaagaactttcccccttactaagtttaagacttttgtcatgtggtgagtcaaataagaccattttgattgtaaaccataaaatagttcagcaagtagcccacagttctggcctaacagcagacttgctgttttcacttggtatcctggagttgggttgctaaccttaatttctatgatgttttctaaaatgaaacttgataaagtagaccaccagctgcaccgtgttttctgtaaaagtattgttagtaagtggccaagagacttgaggaaaatacagattttttgtttaccttggtcttgttttaagtcttaaaaaattaaagataacattataatgtagaatacagatgggacatagtccttgtaagcttcccttgaaaatgttttaaatatttaggaagcttttaaaagacactaaattgtactctaaaagacactaaattgtactaattgtacaaaggtcaagccaattttatgaaacagtcctacagagtaatatatgtgatgcagtgtaagaaggaaaatactcatctctaacattatggtaataacatttagcctcttaggagttggagcagggggatgggtaattacagatttgcagactatagaaagagtttcatttttttgtgaccccacagagtctcaaatttttatttcactacctgctagagcctactgtgaaatcactgctccatatttgccagtggaggaaatgggcatagagtagagaatagcttcatatgtttacacgtttgcatagactacacacatgtcatgcgtttatggcagggagctggtatttattcccccaaagtaataatgttgaaagtatggggtctcatcatttccccatacacagaaaaccctaaaccc

SEQ ID NO: 62680 - DNA, 1395 bp, Homo Sapiens
  misc_feature (206)..(257): n is a, c, g, or t
  misc_feature (906)..(940): n is a, c, g, or t
ctctttgctttctggtaagcttagcttttaaaatgcattttcccttgtcctgtctttaactagatatacatgcttatatttatagtgggtttcacagactataaaattgaatgtatgaaatttttatttatatcagtgcttttaataatgaagatatttttggagtaatggtgctgtcttgtagcgagttattaatcatagtaagnnnnnnnnnnnnnnnnnnnnnnnnnnnnnnnnnnnnnnnnnnnnnnnnnnnnacacggacacaaccctctgacagtctttccaaatattaaaatcatttgaatatgtatgctgtgatctgaacactgctcaagccatcaagcagtcttcatacagtttgcattataaaatctcattaaattctccaagaaaaaataagttgaagaattttatttcctgaccatgcatcccctggatttctgagtttcagttcagattgtagatgacaatataagctgccttccgaaattgtcaacatctgaatgttaagtccattttcccccatggaagaagcccgtagttccatgaagtatggattaccatttgtatttttcagctaacagtaaatgcatttttcttattaattgtttgccttaggaatgatgaattacattttttgttccttcttaccataaacatctgcattcctcagctcagccttccttgtatgttgtttctttataaatggttgagctgctgatgcaggtattgccaagctaacagtacaaatcattttaaagaggaagctggcgcgtatggcagccgaggagcacactctgcaggacactggacaagacagtaaatattcaacttttaatgctgattaaaggagtataggtaaagaatacgtaggtatacataattggtgagacaaatattcannnnnnnnnnnnnnnnnnnnnnnnnnnnnnnnnnnggtaaatactatccagctttgtagttgtccttgttgatttgtgtgatattaaagtattagtaataattgccaggaaactatcattagggtgggtttagttggttgctgtttggactgggagggatgatttaaatttagtgctagaaacccaattttagtgactgcacagtttatcatttgtcagacagaaggtagctataaagctaccctgtaagtcatatcaaaaaagttcagagggaagattagtaaatatttatcagtaaaaataaacattttgtttttctaatatcttaacatatcctcccctttaggaggaagaacgtgcaaaacgtgaggagctagagcgaatactggaagagaataaccgaaaaattgcagaagcacaagccaaactggccgaagaacagttgagaattgttgaagaacaaagaaagattcatgaggaaaggatgaaa

SEQ ID NO: 62681 - DNA, 1224 bp, Homo Sapiens
ggcggggtccctgagtgccagaggtggtggtgttgcttatcttctggaaccccatgcagccagatcccaggcctagcggggctggggcctgctgccgattcctgcccctgcagtcacagtgccctgagggggcaggggacgcggtgatgtacgcctccactgagtgcaaggcggaggtgacgccctcccagcatggcaaccgcaccttcagctacaccctggaggatcataccaagcaggcctttggcatcatgaacgagctgcggctcagccagcagctgtgtgacgtcacactgcaggtcaagtaccaggatgcaccggccgcccagttcatggcccacaaggtggtgctggcctcatccagccctgtcttcaaggccatgttcaccaacgggctgcgggagcagggcatggaggtggtgtccattgagggtatccaccccaaggtcatggagcgcctcattgaattcgcctacactggctccatctccatgggcgagaagtgtgtcctccacgtcatgaacggtgctgtcatgtaccagatcgacagcgttgtccgtgcctgcagtgacttcctggtgcagcagctggaccccagcaatgccatcggcatcgccaacttcgctgagcagattggctgtgtggagttgcaccagcgtgcccgggagtacatctacatgcattttggggaggtggccaagcaagaggagttcttcaacctgtcccactgccaactggtgaccctcatcagccgggacgacctgaacgtgcgctgcgagtccgaggtcttccacgcctgcatcaactgggtcaagtacgactgcgaacagcgacggttctacgtccaggcgctgctgcgggccgtgcgctgccactcgttgacgccgaacttcttgcagatgcagctgcagaagtgcgagatcctgcagtccgactcccgctgcaaggactacctggtcaagatcttcgaggagctcaccctgcacaagcccacgcaggtgatgccctgccgggcgcccaaggtgggccgcctgatctacaccgcgggcggctacttccgacagtcgctcagctacctggaggcttacaaccccagtgacggcacctggctccggttggctggaccttgcacggtgcctgcgtgagcggggcctgggccctggcttgctgtgggtgggctgtggctgatgtacgcctgtgggcggcaggaacaactcgcccgag

SEQ ID NO: 62682 - DNA, 973 bp, Homo Sapiens
gagacagtcacaccagctgcccctagtggggctcttactgttttcttttattccaagccaactatgcgagatttgtgaggtaagtgaagaaaactacatccgcctaaaacctctgttgaatacaatgatccagtcaaactataacaggggaaccagcgctgtcaatgttgtgttgtccctcaagacttgttggaatccagatccaaaccctgatgcaaaagatgatccaacaaatcaaatacaatgtgaaaagcagattgtcagatgtaagctcgggagagcttgccttgattatactggctttgggagtatgtcgtaacgctgaggaaaacttaatatatgattaccacctgatcgacaagctagaaaataaattccaagcagaaattgaaaatatggaagcacacaatggcactcccctgactaactactaccagctcagcctggacgttttggccttgtgtctgttcaatgggaactactcaaccgccgaagttgtcaaccacttcactcctgaaaataaaaactattattttggtagccagttctcagtagatactggtgcaatggctgtcctggctctgacctgtgtgaagaagagtctaataaatgggcagatcaaagcagatgaaggcagtttaaagaacatcagtatttatacaaagtcactggtagaaaagattctgtctgagaaaaaagaaaatggtctcattggaaacacatttagcacaggagaagccatgcaggccctctttgtatcatcagactattataatgaaaatgactggaattgccaacaaactctgaatacagtgctcacggaaatttctcaaggagcattcagcaatccaaacgctgcagcccaggtcttacctgccctgatgggaaagaccttcttggatattagcaaagactcttcttgcgtctctgcttcaggtaacttcaacatctccgctgatgagcctataactgt

SEQ ID NO: 62683 - DNA, 1437 bp, Homo Sapiens
ttaggtaccggctccggattacccgggcatatcagtcagacccacgcgtcgatgcggtcgtgatgtctcgtggagtcggatgttgaggctcagacagtctcatggacagcagtgcctgttcacagaccccatggacagacgttacccagtcccaaggactcctcctcacagtcccagggcatatccagactcctctaccagcacgatgccaaactccagccagtcctctcactaccagctctgggacactgagctccgttagagacagtgtccactcaggaactctattctattccatgcaggaccaagaacctgaggaccaagaacctgaggagcctacccctgccccctgggctcgatatatgggcccttcaggatggatttgccaatcttgaatgtgtgaatgacaactactggtttgggagggacaaaagctgtgaatattgctttgatgaaccactgctgaaaagaacagataaataccgaacatacagcaagaaacactttcggattttcagggaagtgggtcctaaaaactcttacattgcatacatagaagatcacagtggcaatggaacctttgtaaatacagagcttgtagggaaaggaaaacgccgtcctttgaataacaattctgaaattgcactgtcactaagcagaaataaagtttttgtcttttttgatctgactgtagatgatcagtcagtttatcctaaggcattaagagatgaatacatcatgtcaaaaactcttggaagtggtgcctgtggagaggtaaagctggctttcgagaggaaaacatgtaagaaagtagccataaagatcatcagcaaaaggaagtttgctattggttcagcaagagaggcagacccagctctcaatgttgaaacagaaatagaaattttgaaaaagctaaatcatccttgcatcatcaagattaaaaacttttttgatgcagaagattattatattgttttggaattgatggaagggggagagctgtttgacaaagtggtggggaataaacgcctgaaagaagctacctgcaagctctatttttaccagatgctcttggctgtgcagtaccttcatgaaaacggtattatacaccgtgacttaaagccagagaatgttttactgtcatctcaagaagaggactgtccttataaagattactggattttgggcactccaggattttgggagagacctctctcatgaagaaccttatgtggaacccccaccctacttggcgcccggaggttcttggtttctgatggggacctgctgggcattacccgtgcctgttgaacttgctggagctttagggaactcattcctttttatcttggccctgccagggggaatccccccttttctcggaacccgcggcatcctatcttcctctgcaagggctcaccatccctccggcggcac

SEQ ID NO: 62684 - DNA, 1041 bp, Homo Sapiens
  misc_feature (82)..(120): n is a, c, g, or t
cccctctccttccgcccgccccccgcacagtttcacccaagaggctggtaccggtccggaattcccgggatgctccacttgnnnnnnnnnnnnnnnnnnnnnnnnnnnnnnnnnnnnnnngatgagggtatatattcggagcgagcgcgggacgccgatgagtggccgcgcggaaggagctggagacggtcgtagctgcggtcgcgccgagaaaggtttacaggtacatacattacacccctatttctacaaagcttggctattagagcattatgaacattaatgacctcaaactcacgttgtccaaagctgggcaagagcacctactacgtttctggaatgagcttgaagaagcccaacaggtagaactttatgcagagctccaggccatgaactttgaggagctgaacttctttttccaaaaggccattgaaggttttaaccagtcttctcaccaaaagaatgtggatgcacgaatggaacctgtgcctcgagaggtattaggcagtgctacaagggatcaagatcagctccaggcctgggaaagtgaaggacttttccagatttctcagaataaagtagcagttcttcttctagctggtgggcaggggacaagactcggcgttgcatatcctaaggggatgtatgatgttggtttgccatcccgtaagacactttttcagattcaagcagagcgtatcctgaagctacagcaggttgctgaaaaatattatggcaacaaatgcattattccatggtatataatgaccagtggcagaacaatggaatctacaaaggagttcttcaccaagcacaagtactttggtttaaaaaaagagaatgtaatcttttttcagcaaggaatgctccccgccatgagttttgatgggaaaattattttggaagagaagaacaaagtttctatggctccagatgggaatggtggtctttatcgggcacttgcagcccagaatattgtggaggatatggagcaaagaggcatttggagcattcatgtctattgtgttgacagctccgact

SEQ ID NO: 62685 - DNA, 1158 bp, Homo Sapiens
  misc_feature (686)..(696): n is a, c, g, or t
ccttcccagggagaaacccacgacctgtcctgtctttgatcgcctctttgacatttttgccaaaataccactagtggaaagtcaggctagctgtgctggtattggaatagcagcctcacactggcgtctggactgttctgtagattcatgcaagtggagctgtctgtctctaatttaacttattgctagataatagggttttcagatgaaaagaaaacttaaagaggaatggccctcattcagtaagttctgtggttccagtaaggatttttatgtacatacgctctcgtctctcgttttgggtactttctatctcatctgtctcggctctgcatgttttccagggtgtagcctacagacatggaacagtgtaaatcccagactgacagacttagaacctgaggtctcattcatccttatggtttaggccttgccagttttccgaagtctctgattagttgacagtattaacactaaattgcagtttacagtatttctacattacagccatatgtaacatcaagccatcgattgtgtacttttcctttgctagttgtttgggctttaacatccttattcagccttatccaggttggttttgctgttgatcggtctcctaggctaaatgagaatgaaagcgacttcaggtttttggttcataggtgctcggcaggtggctgtgggannnnnnnnnnnggtccttctttcctcttaacgtaaatccaccaccaaaattattaatcctcttgagagaaacgtgaaacgccacaaaaatagagaaaattcaggtctgtatgtcatggatcgtgttggtattttgcagagtacatcccgcttctggaaggtgctgcagctccctcctcagggatcacactgccgtcacccactctgcactggggcgtttcctactgcgcctcgtgctggcgggcgcagctgggtgcagaagctgtggggtcggagaggcgtttggagaaggtctgtggtgcagtgtgtgaaaattcaggtgctagaagccctactggtagaaaaacccaaaaggaagagctatatccttaaccattctgtccaatttcgggagccttgtcagtgtgtcagtttttcctccccgaagacactgacccaaagccgaattctgcagatatccatacgctggcgtcc

SEQ ID NO: 62686 - DNA, 443 bp, Homo Sapiens
  misc_feature (229)..(237): n is a, c, g, or t
ggatagagggctggaatttaaacctgtatttaaaaaaaagaatcaccaaatctatttgaaaacaagtcgatttgtattatgctggaattttttgggctttcagatttctctttttaaccacatttctgaatgtataaaaataccaattattttcctacagccctttgtacttcaaaatatgtttttgtgtccatcagtattaactattggtatactactggttttatannnnnnnnnctttgagacaacagtacatataatagaggtacaattcgttggatttttgtttatgtatttatttcattccagtttgatttattttaattgttgatacttaagttgtcgaacagtagacattacttgttttatttatgatatatttcagcttaaagttatgttattatatgtggaagtgtaaatatagatttggtgttttgcaaaaa

SEQ ID NO: 62687 - DNA, 793 bp, Homo Sapiens
ggggtggtccaagaaccaagatgacagttttacaatttgcaggaaacttacatatcctttagaaactctttgcaatagtccaaatagaagtacaaatacattgaaagaaatgccttggggacatatcaataacaacgtaacacagagctattctattggttatgaaggtagctatgatgcctctgctgatctctttgatgatattgctaaagaaatggacattgcaactgagattaccaaaaaatcacaggatattttgttaaaatggggaacatctttggcagaaagtcacccttcagagtctgatttttcactgagatcactttctgaagacttcatccagccttcacaaaaattatccttgcaaagcctatctgactctaggcattcaagaacatgctctccaacacctcattttcaatcagattcagaatataattttgaaaatagtcaagactttgttccatgttcacagtcaactccaatttcagggttccaccaaacaagaattcatgggataaacagagctttcaaaaaacgtgtattttattcagatcttgatgggtaactatgaaaaaaataaggatttttccctggaaatgacaaaacggcaagcccgccccaagctgtcccaaaaaattttaaaaaccccctagccccgaaaaattccaaaaacccctaattggaatccggggaatttttcccaacccccgaaagggttttttaaattaaccttaaccccctttttttcccggaggagggcgcccctggaaaaacccgggtataaaagggg

SEQ ID NO: 62688 - DNA, 648 bp, Homo Sapiens
  misc_feature (112)..(112): n is a, c, g, or t
tttcctaattctgatcccatagttttacatttttcctgtttattttgattttgttcactgctttatttcttaaagttctagcacatctgtgactcctccacttccacatttntgcactgcttacacttacgtgcaatcttattccttgtctgcacacacatgtggaaagctagaaataaatgttaaaacttactttttataaacattttaatatgtagtttggacatgatttattgacttaaggttcttctctaaactggaagtgaaatgcatgccttctgaagatgttctggctttgttaattctgtaatcatttcattggggaaaaaaccagctacgcagtttttccaatgagtgaattttttcattttgtgttttgcttaaaacggctccttcagggtagatgtcatactgcataacttttttggattcaaattatgaatgagaaattagttaacattctgctccacaaggtaagaaaaactgctctttggctctattttcaaaattacttctgagatgcatatagtctcaaaataacagctttagtaggcatatcacttcttgaaagccaaacatgagtgtaagacacttttatgaaacacggtggatccgtacctggctttcaaattgacctttatagcctta

SEQ ID NO: 62689 - DNA, 867 bp, Homo Sapiens
  misc_feature (761)..(804): n is a, c, g, or t
acaaattccctctggcacagtggggatgtgggaaaaaaaatgaagtcaaagacctcctgcgtcgtctaactggtcaggctgaaggcaagctaatctctgtagaatatggaacagaggaaaaaataaaaataccagtaatatctgtttattcaggtccactcagaagtggtaggaacatagaaagagtgtctttctacctaggattttccattgaaggccctctggcatatgatatagaagtaatttaagacaatacatcacctgtagttcaaatacgtttatttatatctttatgattttattctctctctctattctcatggcactttcataacattatggctaacctctaattacagattttgcttttgcctccctgaatgaattacaagcctttttaagatatgaaatatgcctacccgcagagcttggcacaaagtggagtcaatcttttaatgttttaaatatgcattttcagactcaaataattaagaagtttcattgatatccactggtcacatcataactgtctatagggcaataaaatctgtgttaaactcaattgcttttataagttttctaaattatttcttcactgtgacagcaaagatttaaataagatgaatgtaaaagagaaagcttattggactcaaacccacagatccacaccagagttctatttacctcatcttggtatcaataaaaacttatgtggaaggtaaatatattgttccccatccaccacataacactctccccannnnnnnnnnnnnnnnnnnnnnnnnnnnnnnnnnnnnnnnnnnntcccttgtacccccttgccctttctcccaagctcattggctcccgggagagaagaaagagttc

SEQ ID NO: 62690 - DNA, 642 bp, Homo Sapiens
  misc_feature (70)..(70): n is a, c, g, or t
tcaacacaggtactattaccattttgatcatttatttccctttccagaatcatcagaaatttaactatanaatgtactaactatattggtgtattggtagtatattgtaaaaggaacacaagtttccaatcagaagccttgaagctcaactccattgtttccaggtgttgtgaccctgggaacttcctggtatctctgtatctgtaaaatgaggttgttaaggattaaaggacagtatgtcctatgcaatgtcattcacacacaaatgtcagttttttgagcccctctttcggataaggttatcttatttggggtttttacaaattgctgtttttagtcacctaattataaagcgccatctatttgctagatactttcacatactttaagcttttcaccctgaaaagtagttattatcatcatttaaaagatgaccaaacagaagctttagaactgcaaggtaactcgccaaagcctatgaggctaggacatctgggttgatagggacagtcaggagcctggaggaaccaagactttctgatgcccatctgcatgctggacccatctcctgcagctaactcaggatctcaagcaggaccccacccctagtaagcatccagcgctgacagggcaccgtcacct

SEQ ID NO: 62691 - DNA, 525 bp, Homo Sapiens
tgccctgtccctgcttgtagcccctgagccctcacagttgtcacacacccagcagtctgccaaggagctgcttttcctgactactgtctctccatgcctagggaagtcaaagccctgggccttgccttcagggagttgacagtgtccttgaagtggtgaagtgcccaccacatgaaccaaggagagacgccaaagcagctgccatggactctggcctgtccaagcctttggtgcacttgcagtctctttccactggcacttccctgctttgctaccatcgtggaagaatggaagggagggggagaaggtgggtgggctcagggagaacggccagagtggccagaagatgcagagagaagccccactgggatctgagtattccccaagggcactcagccacagggatgaactagtgtttgtttgtatccttgcagttatgtgacttaaagtgactcagagatatctatgtatgcgagtgtactccgctggcaatgaagtaaatatatcaatttgtggaagaaaaaa

SEQ ID NO: 62692 - DNA, 813 bp, Homo Sapiens
  misc_feature (69)..(69): n is a, c, g, or t
  misc_feature (290)..(331): n is a, c, g, or t
  misc_feature (583)..(583): n is a, c, g, or t
catgaaaatctcattaaatcctcttttggtcacattccaccgtttaacacctagttttaaaatcctttnggaatagccatagtattcatatcagtcagtgtactctgggggtaccattcattttttgttgtctcaggggtaaccatttttttggtaagtgtttccagctttggtaaaacgtttttggtgtgtaagcatgcaacacagactaccagaaagctgccatcttcatactagaaaaccttccaaaggaacaataatagttacacggccaggcacagtggctcacnnnnnnnnnnnnnnnnnnnnnnnnnnnnnnnnnnnnnnnnnncaagtccaggaatttgagacgagcctgggcaacatagtgagagcctgtcaacaataaatagaaaagttagctgggcttgttgatacacatctgtagtcccagctatttgggaggctgccttgatatcaggcagtcgaggctgcagtgatgctgactgccccactgtattctagcctgggtgaccccatctcaaagaagaaaagttaccagatgtcatgggtaaaggttggtcttcaagtggcctcataagtntgtcttgcatttaaattcagggaattcattggaccaataggttacattttcgttccttttttgttttggttcatctgttaagcagtgggggcctaattactgctcctttgtaaaaacacattttcccaaagaacactgaattaccgttcaaactggttgttgatgggtaataagggctgtttttgctgccccaaaagggcttaacaatttaggcggatagtttacttaaa

SEQ ID NO: 62693 - DNA, 904 bp, Homo Sapiens
tattgccttgttggcggtgctgagaactgtcgggagcttcttgagaccgaggaccgtcatcccggctccaggcctctgtggactgcgtgactgttgggagcgctggccggatagcgagggactgacggggcctggcccccgggactccctgtgccttggcttggaagcttgacgccgacggctttattgcagggaactgactagatcacctttttgacgaagaagttggaaatgaattcccacatgtgtgattgaacttgaatattcttggattgaggacacgatcttgtgtgggacgatgacttgtaaggattgaacttgagtccatttaagtccccagtgacgggtggcaaagctaggcgtaggtaggagttggcaagccgatggttgtgggaaagcttgcttgcttggaggatacccaggtcccttgcagggcttgttgtttctttttccaggacaagattgcgatcagcctccaaaaatacagacctttcttagcatgcttcacctatacaactgataaacagtcgagcaaagaaaatacaagaacagtggaaaagctctataacatgttcagttgacattaggaaaattcgtacgattaaacaggatgggtacttttagaggatgaaacctatgttgaagaaattgcgaatattttacaagaactaggtgccgatgagactgctgtagccagtattttggaacgctgcccggaagcaattgtctgtagtccaaccgctgttacacccagagaaaactctggcagttggtctgcgaaacactgacgactgagttacatcacagttaagtagagcagtttccagaactctttctttactacttaaagaccaagagaaccaggacagctgaatgttcagttctttcaaggagcttgggaact

SEQ ID NO: 62694 - DNA, 791 bp, Homo Sapiens
caggctgatgctactccctcttgcttcctcacggaccttgcttcattgtcttttcttcaggctctcaatgatccttttctttcgacatataaacatgcataagtctttcatattctttatgaaaacaggaaacgatgaacgcttttggtcgcttctctctaggtttgggtgtgtttcatcttattcctggtcttagcaggcagctccttgaagtacaggtcctcgtacacatcccgcacctcgccatcttcctttcatcttcaaccccctgcactcctgtcctctcctaatgaccaccaggtccattatctaggattctctttcatttcttgaactttgcacaacatttggtgttcttgaccactctctgctccttaaaatgttgcccacctgttttctgagttatccatttctcctcattttctttcttgtccagctgctctatatttggacttctctttactgtcctcccttcctctcaaaccttagcctcccctacagttcagccctcagccctctgctcattctgcacgtttgccctgtggcagctcatcttctgttttcttctactaccacctatatgccattgattccattgtaaatctgcatctccagccttgaaatcttatctgacatgtgttccaaatgtctttaactcgacaagttcaaaacatcacttccccaacttcaatccagcatactccttctgtgttttctatctcaatgaatagaacgtgcttccacgagtttcaagcacagcaatactaactctgcctggcagttggggccca

SEQ ID NO: 62695 - DNA, 797 bp, Homo Sapiens
  misc_feature (400)..(409): n is a, c, g, or t
accaagtcttacagtgattattttacgtgtttccatgtatctcactttgtgctgtattaaaaaaacctccattttgaaaatctacgttgtacagaagcacatgtctttaatgtcttcagacaaaaaagccttacattaatttaatgtttgcactctgaggtgcaacttaacagggagggcctgagaaaagaatgggagggggctattaattatttttagcaaaatgttgcctttgtcttgtgcaaacatgtagaatatgctctttaatttagtaaaatatttttttaaaaggtagagatgctttgttattgtaatcataaacttcctgaaattcttgtaatttttttcccatacttatcagaagtgtgtttaccaacttatttttgtttgaaagtgtgannnnnnnnnnccttcccaacctctcttgcaaaaaaagaaatgggtttctgctaatgaattgagcagacatctaatattttatatgccttttgagctgtgtaacttaatatttggatacttgacaatttgttttattatgtaattgataaaatggtgatgtgtattaatgttagttcaaccatatatttatactgtctggggatgtgtggttatagttctgtgggagaaataattttgtcagtgttcaccagcttgtaaaaacttagtgcgagagctgaaacatctaaataaataatgacatgcatttatcatcattgagattggtttgcttaaaattaacctatttgtagaagacaaggtagagccgagagacaaggtagaggcgagggtccgaccga

SEQ ID NO: 62696 - DNA, 1579 bp, Homo Sapiens
gggctgactaggcatgatttttttggtcttaaaagcttaacatgtaaaattggcaaaaaaaattttttaccttttataatacttgaaaaataagtacctctttgttctacaagtagaatgaataggagaagagtttaagcctgtttttttaaaatattattgcaaagagctctatttgtagaagcaaattataggcagattaccaggttcttataaatacagcttgtacatggacattctgcaaacccagctgtcacatttttcttgcaactccttttgcaaaagcagactaaaatgttttaaaatgtgaaaaaacattattttttcaaagcaagaaaataatttactgccctcttacataatgtatttataaagtttttccagataaactaatcaaataaattagaataatgtgacaacattataaatttaatttgttagctgcattccttctgatgttaccacgatagaatgttactgatgattcagggctatttctgaagtctgtatgttgctgctgtccccagtgatggtggacttatctttgccttacctgatcaccaattatgttggggaaaataaagatttaatatttctttaaatagaaaaagaatttggttttgctcgtttaagagcaatgagaaaatgatggaatgttgactgtgtttggcacacaggacacggaccttcatggaagtccttgctctgcgtggcatctgtcagcttttcacctttcattcttattcttcacttttgctgctgagcctagctgtacaaacttgcactttcatttgctaatataaattcagttttattttaccattttagagactactaatgattaaatgtagaaggagagggtgcacatgtttttatgtggagtgtttaaaagataaatttataccactgtaatgtgcagcttttattaaaagagaaattggttgaactgctaggttgaatgagagacttcatctattggactattttttttaatccaggcatatggtctttagtaatggcttgtaatttgtgaaaacattaatttgggggttttccctgttttcagttgtccatgtacacatagtcattatattagaaaagaaagctgttcaacaaacttgtttaatttgtttaaatcaacatagcatgaaacaccaaataaaatgtttgacatagttttacttttagctttctcatatgttataacttcactcagattgattcttgagtcttcagattgtccttcatttaactcagtgacattttcctagcctcctgttgattaagcatataggatagccttatttaaaatttagagcagtaggtgtattttggctgtttttctttttcatgtgtgtttttaaactttagtcatcattagcaaacggaaagccttctaagtaatcaagttttaattagaagtggtgcaaaattcttaattatattgtgttaaagagcagcgctgccagagaatgaccctgacctttacaatggctggcttgctttttggccagcactggaaaaatctatatttacttgcagaccttaaggaggtcttcagtattcaccctacattaag

SEQ ID NO: 62697 - DNA, 939 bp, Homo Sapiens
  misc_feature (240)..(248): n is a, c, g, or t
  misc_feature (556)..(565): n is a, c, g, or t
gggaaaataaatcatgattgttcaaagctgctgggacgttagaattaggccatgatactggtctcattttaactacagtggtatttggcactagtgtaaacttccatataaatcactcttttggaacaacaaagggggagggagaaaaatcacggcctgttaaatgagtaccaaagccgcccaacagtaatgagatgttctcatccttgattctcccagcctcaaacaacacagcttacnnnnnnnnncccttgctcagaaagtacctgtaatttaacaaacagactgcctgtaggtatagtgcaattacaaatgctctaatcattgtacatacatctctcttgatattgcagcatccatactggctttgtaatcattaattttttggcagattgaatgtgctgtattgatatgtatctatgtaattgtattgtatgtctatagctaattcacgttttgaataatgttattttatttacttttttaagagaggagaatgtaaatttgtcagtttatttctgactagggatattttctttccatttagaaaagaagnnnnnnnnnnacccttactgtcatacagagcggtactagcgtcgtgctgtataaaatcatttgcacattcctgagtagaggtatactgattataagacccaaaggtaatttcatagcaaaatacataaaatcagtcggagcttttatacaaacatggaaaccaactttgtagaacttttgccatttgatctaggattggaatatgagcttttatacaattcatattcttatttggcaaatgcacagtttagtattacctctctgatggcctttactagaaaggcagttttagaagctattgtgatccactaaggaaatgttttaacagctagagaccactgcttgcctgaaagggcgttcttaaatttggtgcagcaaaaaaaa

SEQ ID NO: 62698 - DNA, 791 bp, Homo Sapiens
tgctgggattactggcgtgagctactgcgcccggccagaattaggcatttttaataaattaattggcaagaactttagaaaaaaacattttaattgatatgtattgccaaatataataaacttttctaataacatatttagtcatttcatttgttttttacagtgcacactggtttttggctgttgtttgtttccccggtttggaagaaccaaagtatgaacctaatcctcattacccatgaaaatgctgtcatacagaaatgttcaactgtggaggacagttgtatttcttcttcagccagtgaaatggagagttgttcacaaaactcttctgccaagcctgtaattaagaagatgctaaacaaaaaacattgcatagctgtaattgattccaatcctgggcaggaagaaagtgaccctcgttataagagaaacatatgcagtgtaaaatacagtgtgaaaaaaataaatcatactgcgagtgaaaatgaagaattcaataaaggagaatctacatcccagaaagttgctgataggactaaaagtgagaatggcctacagaatgaaagtttaagttccacacatcatacagatggcttaagcaaaatcagactaaactatagcgatgaatcacctgaagctggtaaaatgcttgaagatgaactcgtcgacttctcagaagatcaggataaccagaccttgtatcctacttatggactcactccgaggcccttctcggtcaaatgttgtcaaaattttaagagagtatttagaagtggaatgggaagtta

SEQ ID NO: 62699 - DNA, 1206 bp, Homo Sapiens
  misc_feature (866)..(866): n is a, c, g, or t
cccagcatggctgcccccacggctgagggcctggcagctgctgcgccctcgctttcttgagattccctggcttctgtgctctcttccccaggccaccccagcagacatgtttgccaaggcctttcgggtcaagtccaacacggccatcaaggggtcggacaggagaaagcttcgagctgatgtgacaactgctttccccacccttggaactgatcaagtctctgagttagtacctggaaaggaggagctcaacattgtgaagttgtatgctcacaaaggggatgcagtgactgtgtacgtgagtggtggtaaccccatcctctttgaactggagaaaaatctgtatccaacagtgtacacgctgtggtcctatcctgatcttctgccaagcctttacaacatggcctctggtgctcgagaaactggtagggggagcagatttgatgctgcctggactggtgatgccccctgctggtctgcctcaggtacagaagggcgacctctgtgccatttctttggtggggaacagagcccctgtagccattggagttgcagccatgtccacagctgagatgctcacgtcaggcctgaagggaaggggcttctctgtgctccacacttaccaggaccacttgtggcggtctggaaacaagtcctctccaccttccattgctccactggccctggattcagcagatctcagtgaagagaaggggtctgtccagatggactccaccctgcagggagacatgaggcacatgaccctggaggggcgcagaggagcaatggggaggttcaccaggcacgtgacgacaagtctcctctcagaagccccagaagacaccagcaccaggggccctgaaccnaagactccacagatagcaaaaacgccttcaagaccaaatgggatgaagctgtttacagccaatgctttctttacatggcccttgaaagtggcccaagtccaaaaagggctgaaccttcccttttacctcaccagccaccttttccttgggaagccaacatggtttctccctgcctgccccccaaagggaacgaacaactgggaacattaaaggaaattccagccctaccaaaaaaggcttcttcctaaggtttccctggccagcaaaatggccgccccggggagcccaaaattttttcccgggggggaaagagggaaaccttaaacccaaaagggggggg

SEQ ID NO: 62700 - DNA, 451 bp, Homo Sapiens
tttttcgcagtaactgttttttaagtctctcgtagtgttaagttatagtgaatactgctacagcaatttctaatttttaagaattgagtaatggtgtagaacactaattaattcataatcactctaattaattgtaatctgaataaagtgtaacaattgtgtagcctttttgtataaaatagacaaatagaaaatggtccaattagtttcctttttaatatgcttaaaataagcaggtggatctatttcatgtttttgatcaaaaactatttgggatatgtatgggtagggtaaatcagtaagaggtgttatttggaaccttgttttggacagtttaccagttgccttttatcccaaagttgttgtaacctgctgtgatacgatgcttcaagagaaaatgcggttataaaaaatggttcagaattaaacttttaattcatttccccccaac

SEQ ID NO: 62701 - DNA, 1492 bp, Homo Sapiens
  misc_feature (1286)..(1286): n is a, c, g, or t
  misc_feature (1311)..(1311): n is a, c, g, or t
  misc_feature (1329)..(1329): n is a, c, g, or t
cacccaccacccaccccagcacctactacactatacaacagctcgttacaaaaaagcaggctggctaccggtccggatatcccgggatatcgtcgacccacgcgtacggcggcggaggcgcccagcggaggtgaaagtattggcggaaaggaaaatacagcggaaaaatgcagagctggagtcgtgtgtactgctccttggccaagagaggccatttcaatcgaatatctcatggcctacagggactttctgcagtgcctctgagaacttacgcagatcagccgattgatgctgatgtaacagttataggttctggtcctggaggatatgttgctgctattaaagctgcccagttaggcttcaagacagtctgcattgagaaaaatgaaacacttggtggaacatgcttgaatgttggttgtattccttctaaggctttattgaacaactctcattattaccatatggcccatggaaaagattttgcatctagaggaattgaaatgtccgaagttcgcttgaatttagacaagatgatggagcagaagagtactgcagtaaaagctttaacaggtggaattgcccacttattcaaacagaataaggttgttcatgtcaatggatatggaacagataactggcaaaaatcaagtcactgctacgaaagctgatggcggcactcaggttattgatacaaagaacattcttatagccacgggttcagaagttactccttttcctggaatcacgatagatgaagatacaatagtgtcatctacaggtgctttatctttaaaaaaagttccagaaaagatggttgttattggtgcaggagtaataggtgtagaattgggttcagtttggcaaagacttggtgcagatgtgacagcagttgaatttttaggtcatgtaggtggagttggaattgatatggagatatctaaaaactttcaacgcatccttcaaaaacaggggtttaaatttaaattgaatacaaaggttactggtgctaccaagaagtcagatggaaaaattgatgtttctattgaagctgcttctggtggtaaagctgaagttatcacttgtgatgtactcttggtttgcattggccgacgaccctttactaagaatttgggacctagaagagctgggaattgaactagatcccagaggtagaattccagtcactaccagatttcaaactcaaaattccaaatatctatgccattgggtgatcgtagttgctggtccaatgctggctcacaaagcagaggatgaaggcattnatctgtgttgaaggaattgcctggntgggtgctgtgcacattngactacaattggtgtgccatcagtgatttacacacaccctgaaagtttgctttggggttgggcaatcaagaagagcagttggaaaggaagaaggggtattggaagtaccaaagtttggggaaatttccccattttgctggctaaacaggcaagagctaaagac

SEQ ID NO: 62702 - DNA, 716 bp, Homo Sapiens
gggtgcccgtcttgtgtccgcacagaggtctgcaaggagagagagtgtcttcattctttccgccgtcttgattctttctcactgaccaagactcagccgtgggaaatatgagtgagcttctaagagcaagatcccaatcctcagaaagaggaaatgaccaagagtcttcccagccggttggatctgtgattgtccaggagcccactgaggaaaaacgtcaagaagaggaaccaccaactgataatgagggtattgcacctagtggggagattgaaaatctggcagtgcctgcttttcaagggcctgacatggaagcttttcaacaggaactggctctgcttaagatagaggatgagcctggagatggtcctgatgtcagggaggggattatgcccacttttgatctcactaaagtgctggaagcaggtgatgcgcaaccataggtttcaggccagacgaatgaagactgaaaccaagaacgttattcttaatctggaaatttgactgataatattctcttaataaagttttaagttgttcgaacccaggtatacgcccctccccccgtatccttgtcggccggctggggccctaaaaaaactttcagaaacaattcctttggggcgccgggcccccgcagcaaagggaacctgggtcataaccggtttccttaggaaaatcctgggccctgaataagggccttggaatttcccccc

SEQ ID NO: 62703 - DNA, 326 bp, Homo Sapiens
ttgtagttttagcgcttagaggcatttaaacagcctctctcctccagactacttcactgtagtttattatccctgaccctccacaatgtgattaccaaccgctaggatgagttgcattttattataaagtagcaaattacaagattgtaacattagactttttaagaaaatccagtcagcttttatactaatccatcttaatttctaggttactcagaattccaggtattctgatttggactcacatctcgtattgtattgcctgtatttaactaggaagttactgccaacagcatctatctctattaaatgtagaggaattgaca

SEQ ID NO: 62704 - DNA, 735 bp, Homo Sapiens
ggtgtacggtcggattcccgggatatcgtcgaccacgcgtcgccacgcgtcgggtccagtgcttggtcctgctctggtcactggggcttcccaggaggcagcagggtctggtcataatccagtgtgaagatgaggtgaggaaggaaggggttgctgtccagtgttggcctggtcgctttgattcttcctgcacagctcagcccaccccatctgtactggaagggaccctggagccctgggaccaccccctttcaagtcccaaacactgagtcctctgtcatgtgtccttgtccctaggctacaatgctacacttggctcaggctgatcaccatgctagtcacaggagggagagagaggcagtgtacttgcccccatctcctggagggaggtgcgttggaaattctaggcccttcagcagagacccatttgtgcccagaccacaatattatcttcttcctcagggactacatgccacagacctgtatccccagtggcaactcctgttagcatcccaaacttaaacagtgatctcttctaaatatacaaggcatctacccagccccaatagtgaataaaagtcccaattttaagttcaacacccttagcaatttcttcaaagccagccttacctgactagggctattccccgcaccggttcccaacccccaagggggaaattagggggattaaaattaagagtaagggaaaagaccccctttgggccctttcccggg

SEQ ID NO: 62705 - DNA, 551 bp, Homo Sapiens
atctgataaattctattattttcccgtatcagtagttgagctagtactgatatgggtaatatttatattatggataataaagcttgtacttatggaatgtaagggaacaagcaaattttatatagaaattgaaaaattagagtttcagtgtattttactcctaacttaaaaaaacccagatatcctcttgaaccactctcagcagctcttctcaagttgcacagccaagtttgcagatggacagcagtgctctgtgccagtttttgacattacacatcagacacctctgtgtgaagaacatgccaaaaaaatggtaagttctgcaacagaggctttcatactttttgtagctatccactgtaggaagtattttataacttagcacaaactatgtatgtatataaatcactgaaacaagttttgagagaggatttttattcccttaagacacattttattaccttaagatatgtatcttatacatagcagaatttctaaatactctctttgttcctatgtctctaaagttttgctttctatatacaattcta

SEQ ID NO: 62706 - DNA, 646 bp, Homo Sapiens
  misc_feature (105)..(105): n is a, c, g, or t
ggcaagccctattcaaactactttgtttttacaatgaaataaaacactttaattctatttctaatgttttaaattacagtgtactaaatatttttaaacattttngcatttttttctacatttataactggtcttaagagtttttaatatttgagcagaaccttaaaggtcatggaacaatcatcattttccctattgattattaagattgcaggaccatttttatggtcccacagtaccatgtgaaatgaggatcgcttgtagctgggaacagtgcttacttcagggaaaactgattttgatagaaccgactagttgagtattaaactgttttggaaataatttatatatctaagtgctgaaatatatttctcttctccccacttattcaaataaaaaagttttaatactataaacttttcattgttagcgccacgcagtccttgtcaagattgttctgggggacaaaaaacttgatgtataaagcatgaatatacacacagtacttaaacagataccatatctgtggtattaaaattttgggggtggttgattaggattgtaaaaagactccttagggagtgaggatggaaaagagaaacactggttaatacagagtataaataaattttttggaaattgaaaa

SEQ ID NO: 62707 - DNA, 786 bp, Homo Sapiens
cagctctagaggagctgaaccgcgctaccacccggcttgcggctccagaagcagcagctggtgaatggctaccgacgctttgatccggcccggggtatggaatacacgctggacttgcagctggaggcactgaccccccaggagggccgccggcccgtcactcgccgagtgcagctgctccggccgctgagccgcgtggagatcttgcctgtgccctatgtcactgaggcctcacgtctcactgtgctgctgcctctagctgcggctgagcgtgacctggcccctggcttcttggaggcctttgccactgcagcactggagcctggtgatgctgcggcagccctgaccctgctgctactgtatgagccgcgccaggcccagcgcgtggcccatgcagatgtcttcgcacctgtcaaggcccatgtggcagagctggagcggcgtttccccggtgcccgggtgccatggctcagtgtgcagacagccgcaccctcaccactacgcctcatggatctactctccaagaagcacccgctggacacactgttcctgctggccgggccagacacggtgctcacgcctgacttcctgaaccgctgccgcatgcatgccatctccggctggcaggccttctttcccatgcatttccaagccttccacccagctgtggccccaccacaagggcctgggcccccagagctgggccgtgacactggccgctttgatcgccaggcagccagcgaggcctgcttaaccaattgggtcttccagggtatgggatcctaa

SEQ ID NO: 62708 - DNA, 535 bp, Homo Sapiens
ttttcttatttagaaactctcaccatgcttaccgtccttcacatttcctatccccaaagcactttttgaatgttttcttagtttaattttgtacaagggagaattaaggcccacttttggcacattgaacctagtccatgtcctgcatgccctgcagctcccctctgccctccaatccattttctttatactggtggctttcgccttcctgttagtcattgctatttcatcatagcctccttttatccttcctacttcatttcttttcttccctcaagtttacgttgtttgttttttaattattttagaccaagatcactccatggatgaaatgacagctgtggtgaaaattgaaaaaggagttggtggcaataatgggggcaatggtaatggtggtggtgccttttcacaggctcgaagtagcagcacaggcagtagcagcagcactggaggaggagggcaggagtcccagccgtcccctttggctctgctggcagcaacttgcagcagaattgagtcacccaatgagaacagc

SEQ ID NO: 62709 - DNA, 1214 bp, Homo Sapiens
  misc_feature (588)..(588): n is a, c, g, or t
ggacagtaaataaatattattttgttatgccaaaaatatagcgagcagcttcatggttaataatacatttatgttgacacctccctaatccaggaaacattcacaaacaaggactcccatatacaaatactttaggaagagagatttcccaggcagatatcaccaaaaatgttttcactgtaggaatcacaaaataagtttttgtcaaaataactgttgttgaacgttatactggtcttcctcactggtgattgataagctcctttctatctagtttgtggtacttccttcattttccctagaaatgttacttgttaaatgtgtcctcaggcggtttcatctttgttgattctgcccatctaagtcataagcttctcaaatgcaagctactagctagttacacttgtaagttttccataatgacatgattttaaacataaagagttcataagaatcacttggagagactatttaaaaatgagattcctaggcccacctcagattgtgataaatctgtgtgactgactgatgcagactttttctggactataataactgatgctgctctactgctttaatacaggccanagtaacgtggaagcgcacagcagaaaatcttcagaaagacatcaggtttgttctgattttgactagggtaacttcttctttattaaagcaaataactggacataatcttaaaggattccacctccatcgtctttcctaacttagatcttcattgagaaatttgggcaaggttaagtttacttttttctagtgctgcggttttggctcgtcttggtagtctcatcttcatttctgattctggttctggaacttcatgatcactttcagagtcggcttcagcagtctgacacctcctgttcgtcctagctgaaactgtcacttttttctgtcctctgttagtctttagctgagtagactttgatgcttgggttgcttttacacccctgagtggagtcatatatacttctttattcttttcatcttcattttggaaagtagttgtagtcaaggtggcatcctgtgctgcttcagcttggtcaccaaattctttatttcctttttctaactgaatcttgattttctccaaagctctcagacatgtcctatcttttacttgctccagaatctcattcaatagaaccagaagatcttttgcaagatggctactgagttctaaagaactcaag

SEQ ID NO: 62710 - DNA, 1726 bp, Homo Sapiens
  misc_feature (1201)..(1267): n is a, c, g, or t
gccaccgcctccgccaccctgcaccccgacagcgccgctgctgccccgccatgggtcgacagaaggagctggtgtcccgctgcggggagatgctccacatccgctaccggctgctccgacaggcgctggccgagtgcctggggaccctcatcctggtgatgtttggctgtggctccgtggcccaggttgtgctcagccggggcacccacggtggtttcctcaccatcaacctggcctttggctttgctgtcactctgggcatcctcatcgctggccaggtctctggggcccacctgaaccctgccgtgacctttgccatgtgcttcctggctcgtgagccctggatcaagctgcccatctacaccctggcacagacgctgggagccttcttgggtgctggaatagtttttgggctgtattatgatgcaatctggcactttgccgacaaccagcttttgtttcgggccccaatggcacagccggcatctttgctacctacccctctggacacttggatatgatcaatggcttctttgaccagttcataggcacagcctcccttatcgtgtgtgtgctggccattgttgacccctacaacaaccccgtcccccgaggcctggaggccttcaccgtgggcctggtggtcctggtcattggcacctccatgggcttcaactccggctatgccgtcaaccctgcccgggactttggcccccgcctttttacagcccttgcgggctgggggctctgcagtcttcacgaccggccagcattggtggtgggtgcccatcgtgtccccactcctgggctccattgcgggtgtcttcgtgtaccagctgatgatcggctgccacctggagcaggccccaccctccaacgaggaagagaatgtgaagctggcccatgtgaagcacaaggagcagatctgagtgggcaggggccatctccccactccgctgccctggccttgagcatccactgactgtccaagggccactcccaagaagcccccttcacgatccaccctttcaggctaaggagctccctatctaccctcaccccacgagacagccccttcaggatttccactggaccttgcccaaatagcaccttaggccactgcccctaagctggggtggaaccggaatttgggtcaatacatccttttgtctcccaagggaagagaatgggcagcaggtannnnnnnnnnnnnnnnnnnnnnnnnnnnnnnnnnnnnnnnnnnnnnnnnnnnnnnnnnnnnnnnnnnttcccagatattcagggcaagggaccagtcggaagggattctggctattgggggagcccagagacaggggaaggcagcctgtccatctgtgcataaggagaggaaagttccagggtgtgtatgtttcaggggcttcacatggaggagctgcagatagatatgtgtttctgtgtatgtgtatgtctgcctttttttctaagtgggggcttctacaggcttttgggaagtagggtggatgtgggtagggctgggaggaggggccccagccttaggtttggagctctggatgacatacataagtaggagcagtgggaactgtttctgtcataatggaaggctgaaagcgtggagtgaactcaggtcctacagttcatgggtggcttttggttggtcctggcctttacgggaaggaagcaaagctataccgccctaagggaacccgggacgggcgcagccccc

SEQ ID NO: 62711 - DNA, 853 bp, Homo Sapiens
  misc_feature (657)..(668): n is a, c, g, or t
gggctacccacctcctgccgtcccccctggaggacagcctcctgtgcccccgcccattcccccacccggcatgcctccagttggggggctggggcgggcagcctggatgagataacgtgagccttttttccctctttgtttttttaacaagattttctaatcgacttgcagagtagttgaagtgggtaagcagcagggtaccttgtataatgcacgacagttgcagtatgggaagaatggaccgggcccctgggataaaatcagagtggtcctcacacctagaggacggggacaaccagctttcagagtagcctcatcagtgcccttgcagtctgactgtgtacacttggttcagctaatgtctgagagtcctgcactgggttactttatactagtgaggacgttaaccagccatattggctcaataaatagcttcggtaaggagttaatttccttctagaaatcagtgcctatttttcctggaaactcaattttaaatagtcccattccatctgaagccaagctgttgtcattttcattcggtgacattctctcccatgacacccagaaggggcagaagaaccacatttttcatttatagatgtttgcatcctttgtattaaaattattttgaaggggttgcctcattggatggcnnnnnnnnnnnncctccagggagaaggggagaaatgtacttggaaattaatgtatgtttacatctctttgcaaattcctgtacatagagatatattttttaagtgtgaatgtaacaacatactgtgaattccatcttggttacaaatgagactccttcagtcagttatccaaataaaagcagttctgaaactaaaaa

SEQ ID NO: 62712 - DNA, 555 bp, Homo Sapiens
agtgcctagtgatagaggcgttgtttgtcatctattataattggaatgtcattgtagttcagtgaattttgatgtaaataaaatatcttttaaaaatgttaaagtaccaggataaacaaacaaaaagaaacaacccttaagatgacagattttcctcaacatgcaggtttcccttcttatatacctcaagtatccaacatctagccatgcaaattgattacctgaagcatagtactggaaagtagaatagcatgaaaaacttaattttgtggacattacctttttttgtaatcagctactgtatgttttattttagatcttttgttttgggtgggttttctgctctggaggtatatgcactaacaaaacattttcctcctttcatatacgcatgttaattagcaatgtgagcaatatttcctaccatacttcactcccaatattttttgagatgtttgtataaaatggaatttaaagttcacttatgattgtatatgaaccacagaggagcccatttattaataaaaaacttttttaatagttaaatgtagaggg

SEQ ID NO: 62713 - DNA, 836 bp, Homo Sapiens
  misc_feature (451)..(456): n is a, c, g, or t
gggttttccaaatgcacccaaagtatcgccagaagcagtgaagaaggaggcagagttggacaagtacctggaatgcagagtagaagaaatcataaagaagcagggggaaggcgtccccgacttagtccatgtgatgcgcacattagcgagtgagaacatccccagcctcccaccagggggtgaattggcaagcaagaggaatgttattgaagccgtttacaatagactgaatccttacaaaaatgacgacactgactctacatcaacagatgatatgtggtaaaactgctcatctagccatggagtttaccttcacctccaaaggagagtacagctcaactttgttgaaacttttaacatccatcctcaactttaaggaaggggatatgacatgggtgagaatgattacatcagagaacttcagcagtacaacagctagcccagaactgannnnnncgagaggttttgtaaatttgagacttatgtaagcgtgatttcaaaccataattcgtgttgtaaatcagactccagcaatttttgttgtatgattttgttgatttttgtaaagtgtaattgtccttgtacaaaatgctcatatttaattatgaactgctttaatcactatcaaagttacaagaaatgttttgccttattgtgtgatgcaacagatatatagccctttccagtccatggtgtgttttgggaacttggggtttgggaacagggaagaagcagcaagccatggtcaggctacacgcctcaaaatgtggcagaatgaattatgggaaaaataaccctcaaaaatttttaccaaagctgtaaccattcccagagga

SEQ ID NO: 62714 - DNA, 440 bp, Homo Sapiens
  misc_feature (266)..(283): n is a, c, g, or t
tctccgctcaaccgtacaggatctgggagcgagagcctgccccactgctctcagcacagtacgagaccctgtcggataatgatgactgaactgcacaaagtgaggggaacagggtgcaggagagggatctctagtttttgtggtttaatttttagtagcaggtcaaaaacctgccctcctgtgacttattccctgagacttttcaggagagccagcccacagatgatgaagaaatgatggaagttcatttggagagtcaaatgggnnnnnnnnnnnnnnnnnnctgcctttgatacaggcaattcagtggactataataatagtggagggttgagatgtagagtttttaaaaagtgaacagttgctgttcttacatctgtaaagaaaaccataatgtctttaaatcactcttctgtaaatagatgacctttttgcagtgt

SEQ ID NO: 62715 - DNA, 1090 bp, Homo Sapiens
  misc_feature (1007)..(1007): n is a, c, g, or t
  misc_feature (1042)..(1042): n is a, c, g, or t
cagcggcgacgttaaagctgagcgacccagtgccactggagacggtcagcttctccactcaggctcctccagcccgagccagaagaccccctcccccagaattctgggggccgatggaagggagccgagtcagatcgcgaggtacccagagccgacagaccggagcgacagggagttgccagaagccccgtcccctaggagtgatcggaaagcctcacccatccgggtgaggaacccggagggaccgcctccgggcggagcccgccgaccatggctacgcccctggtggcgggtcccgcagctctacgcttcgccgccgcggctagctggcaggttgtgcgcggacgctgcgtggaacattttccgcgagtactggagtttctgcgatctctgcgcgctgttgcccctggcttggttcgctaccggcaccacgaacgcctttgtatgggcctaaaggccaaggtggtggtggagctgatcctgcagggccggccttgggcccaagtcctgaaagccctgaatcaccactttccagaatctggacctatagtgcgggatcccaaggctacaaagcaggatctgaggaagattttggaggcacaggaaactttttaccagcaggtgaagcagctgtcagaggctcctgtggatttggcctcgaagctgcaggaacttgaacaagagtatggggaaccctttctggctgccatggaaaagctgctttttgagtacttgtgtcagctggagaaagcactgcctacaccggcaggcacagcagcttcaggatgtgctgagttggatgccagcctggagtctctatcccctcttctcttgcctggagacaatatggtgtggacatggggtggctgcttccagagtgctctgttactgactcagtgaacctggctgagcccatggaacagaatcctcctcagcaacaaagactagcactccacaatcccctgccaaaaggcaagcctggcacacattcttcctcagggaccatncttcagggacgcacccagaaacctctaggctggcnccgacacttcaatctgggcccctcctagggccggacgaagaagtttca

SEQ ID NO: 62716 - DNA, 384 bp, Homo Sapiens
tcctttgtttcccagcatctggcttggatgtgaagggacagcactcccctgtccccatgtcccgggctccactgggcaccaacataaccttgttctctgtcctttctctcatcctctttacactgtgtctctctggctctctggcattctcgctgcctctgtctttccctcttgctgtctctgtttctcattctctttcatgttccgtctgtgtctctcaattaaccactcgtcaactgctgattctactgggctgtgggctcagacctcatttcaggcaccagattggtcgctacaccctggacaagtgactgcccgtctctgagccttgatttcctcagctgccaaatgggaagatagaagaactgcccgctaaacccctcc

SEQ ID NO: 62717 - DNA, 1050 bp, Homo Sapiens
  misc_feature (359)..(370): n is a, c, g, or t
  misc_feature (675)..(687): n is a, c, g, or t
tcttttcaagctctaacaaagtcactaacaaatgcattattttctacagaattagatgttagtagtacagtactgcatattcagggaaaaagtgtgaggaattgatttcaaaatagttcgttcttgtgtttgacctaagaatgattgtcgcatgaagtgtttgtttttacagtttagcatatataaacaaacatgataggattccttaagatgttaccacccagggggccacaagccagcctgctgtctcaggaagctgtagaaggagtgtttgtcaatttcttgtcactggtttgctgacttactgaggattaattgttgccttacaatgttactgaaataaactgtttaatataccnnnnnnnnnnnnttagaagaacggccaccaaaaagaaaatgaaaatggtcatacactgcttccaaaaaaaatcctgcaaaagaccaaagccttgaattcccaccaataaaaacccccccgggggtaacccccagtgttccggaacaaacccaccatgaaagttttgggggcccctttttggtattaaaaaaattttgttctccaactttggtctgggggggtcgggcttccccccctcgcacagggaaacctcttctcaaaatttctgtttccaaaattaaatatcaccggcttcttgaaaaaaaggtgggaaggtnnnnnnnnnnnnngttaaatataatcgcaccccgcgccatactaccaaccggttccctccagaaacacttttaggaggggggtcggccgtaagaggaatttttttcccccgtggcgcccaatacccacggaggggccccaccccccacggcgcgccctcaaatttatgagaaaatagctctccacacaccccacaccttggactggtaaaccattccccgccgcggcgtggatgcgattatgttacacacgacaatatacccctcccctcatcacgatacacccccctctttcacacgggtaattattggccacccagccctttttgcctctctcccacaggcgcggcccccacaaacccactgtttgcccatcaa

SEQ ID NO: 62718 - DNA, 1191 bp, Homo Sapiens
  misc_feature (823)..(879): n is a, c, g, or t
  misc_feature (1120)..(1120): n is a, c, g, or t
gatacactgcccacagcagaagtttccgtagagcatgtgcaaaacttttgtgatggattcctaagtggaaaattgttgaaagaaaatatcaagtttgtatactgcacatgacttacacacaacatagttcctgctcttttaaggttacctaagggttgaaactctaccttctttcataagcacatgtccgtctctgactcaggatcaaaaaccaaaggatggttttaaacacctttgtgaaattgtctttttgccagaagttaaaggctgtctccaagtccctgaactcagcagaaatagaccatgtgaaaactccatgcttggttagcatctccaactccctatgtaaatcaacaacctgcataataaataaaaggcaatcatgttaaaaacccaaaaccactcctatcgcttccgttttgcctttctataatcacgtaaccacctctaacaaacctacccaccctttcacccctcttttccactcccgccatgccctgttccactcgtccgtttgtcccccctccccacctttccccttctctctccacccccatgaaaacccttccgacccccgattcttcctgtcggcacctgtatctcacaccccttacaagtaaccacgtctcccacagtttttgcgtccttcccacccatcccctgttcaccttcatcctcgcccctctgatccgtgattcgctgccacccgtccacccccctgggcgcatcccgctcgccttccttttcccctcacctcccttacatagctatgtcccctttacccgatttttccatctatctttcatttctccctcctctcttnnnnnnnnnnnnnnnnnnnnnnnnnnnnnnnnnnnnnnnnnnnnnnnnnnnnnnnnnattctttccgttctgcgcgccccatccccctctttgtgagccatcttcctcccattcttgtcccgcgccacccctccccgctctctactcctcgcttcactgccatccgccattcgcctcacttaatgcttgccctctcccacacatcggaccggcactcgtcacaacctcatgtgcaccccttctctaccctcccccacccctccgccgctttttatacatgtagtgagccctggcatgngaccgctttatggcgtgcgatactctcagagcgacactcgttcgtgattgccgacgtcacttacgctaccg

SEQ ID NO: 62719 - DNA, 407 bp, Homo Sapiens
  misc_feature (56)..(56): n is a, c, g, or t
gaaacctcactttcagagagatgtgggtcctttgtctccaggatccacaccctagnattttaacactgcatttctcactataacatgccctataatggctgcatcccttttgagcaacctccaaaatctacatttacacagtaggtaaattagggatgactgcattatcaaaatactctcagggttcctataaatggcagctctcctgttgtattcaggtgttgtttacagactaacaaatgtgttggcaaatccctggttagatgcacttcctggtgttgagatgaacacgtcgatttttcaccaatcgatgaagccatgctctgcaatgacaatattaatgtgatccgaccctaacattttctctatggaagacgtatgttgcataaagcaaggcacacttctgc

SEQ ID NO: 62720 - DNA, 1176 bp, Homo Sapiens
  misc_feature (788)..(981): n is a, c, g, or t
  misc_feature (983)..(983): n is a, c, g, or t
  misc_feature (985)..(986): n is a, c, g, or t
  misc_feature (994)..(994): n is a, c, g, or t
  misc_feature (1000)..(1000): n is a, c, g, or t
gagaatagaacctctttcgctgaatattgacatgtaaaagaccaaagtaatttttctgaacttctgcaattctgtagccctctccaaggaatttacagtgattttagtgcttgtcagcatttttccatgaggactttcatacatttgactctttagttcacaggttcccattgattgtgagcaagatatttatctctttagcccttggggatccagctgagagcaatctcttgcatttttttacccgtgtatgtacagatatcatttcttgtgtatgccatgacttgaaaaagtttgggaagctctttagcaatatcagctaaaaggatatgaaatcacaggtgatagcagttgtcattcagtaatttcctacaagcagcaccccaaaggaaatatagtcctaatctttactatccacttctaaatttaatgtgaatttcatacatgttattagttgttttctttataattttataaaaattattcatcgggagtttaacttccacttccatgctatcggatgtgttgggctccatgcaagaacttggaagaaaaacaggcaggaatgcatttgcataatgacccagatcatcattttctgcaactgagaattatatttcatcattgcttctagaagtctgcaattctttacttttctttggtgcattattatctaggtgccatcactggataatgtggagtgactagagaagtcatatatcactgtaaggtacagttagggtaacactttagaggtttattatttttaaaaaacttttcttgaactnnnnnnnnnnnnnnnnnnnnnnnnnnnnnnnnnnnnnnnnnnnnnnnnnnnnnnnnnnnnnnnnnnnnnnnnnnnnnnnnnnnnnnnnnnnnnnnnnnnnnnnnnnnnnnnnnnnnnnnnnnnnnnnnnnnnnnnnnnnnnnnnnnnnnnnnnnnnnnnnnnnnnnnnnnnnnnnnnnnnnnnnnnnnnnnnnncnannccctaccnttcttntaccaaaacatgtcgggccgccctcgggccctcgaaaaagctttcctaaaacatttcgttttggcgccgcggggcccccagtagggtaagtggaaccatggttccataagctggcttccctaagggagaatcctggggtcattgacttaagggcctttggaatttctcccccaaat

SEQ ID NO: 62721 - DNA, 928 bp, Homo Sapiens
gggaccttgtctccattttcattagacaatgcttcttgtgtgtgttctggaagatcttctaaatggaatgcttgttgcactgttcccaggcgagtggctgccatgagacctgaggaccacacttgggggaccaatcatgtccttcaccactgtgccttagaatcgcccctggacagagttcctgggcagaggggaaagcagctcccaggccttactcaggcctcaggtccatgggttgggcagccagtctgggcccttctcaggatcctcatctccatcctcatcctcttccttcacagcatttacttggagctctttgtgacacaccatgtcagtcatgatgaatcggccaacagccagccccttgccagctgacgtcaccagtctaagatgggaaactgtggtacagatagacatgaagatagcttagcagtgattgaggtggtgactaaatatacagtcattgaataaataccatgtagcaagtgtactttgtggagtgttgagtaagtggaaaatggaaagccagttgcatttagagatgataggcctaaagggaactgtcttctgtcgagaagtaaaggaaacttcatgagggatgtagaagcttagctgcctcagagaagagagaacctgaagatctgaggcaagctggacaggagaggtggatatttgttgatggaggatttcaagtttattatcaattcccacttagcacctactgtggtgctaggaacttggaatgtgtatgttttgacaagtcctgctttgcctgatgggtggggagaaggaacctgagcctggctgagatggctaggcgggaagggctttgaagtcccagcagctgaactggctgggtgggtttctacctttgaaactgcaagacttgtttggagctcttaattacaatatctgatatttttacaaa

SEQ ID NO: 62722 - DNA, 666 bp, Homo Sapiens
ctttagccaagctttgattaaagatgacttccttgtttgctcaagaaattcgcctttctaaaagacatgaagaaatagtatcacaaagattaatgttacttcaacaaatggagaataaattgggtgatcaacacacagaaaaggcatctcaactccaaactgttgagactgcttttaaaaggaaccttagtcttttaaaggatatagaagcagcagaaaagtcactacagaccaggattcacccacttccacggcctgaggtggtttctcttgagactcgttactgggcatcagtagaagaatatattcccaaatgggaacagtttcttttaggaagagcaccatatccttttgctgttgaaaatcaaaatgaagcagaaaataccattcaaaatgaggcacagcgataacttcttcacatgctatttcaaaaagcctgtttaataaagctgaatgttaaggtgtatgtaggttattgcaggaactttaggaattaaatatgttcatattcttcgattatctcctaagtgacagtgaagatatgagaatttactggcaagtcacatgttatcacctactactatttcaaggtcatgtatttgctttctaccaaacccatagatgtgttaaacacgaatattaaaaggtggactctttattaattaa

SEQ ID NO: 62723 - DNA, 420 bp, Homo Sapiens
  misc_feature (32)..(32): n is a, c, g, or t
ttcttttaaggtaaaacacaggccacttattntatgtcaaaagaaaaattaggcatatccagttcattcttctctcagtgcctaggatttaatagattggaatacatttcaaaaataaagaattgcttgaactgggtaactgatttgatgtaaatgccaaaggagaaggagtaaaaggaaaatgacatagagtctgagctagagtaacagggacagtattaattaatattaaccaaatatcaaataagaacatttaagagacgagccaccatgcccggcccaaatattttttattcaggatggtataacctaactgataataggtaataaggttaaatttttttatgacgtattttatttacaaatatcatacactgctggtgttaccatgtgaaaggaaataaagtcaattgataattg

SEQ ID NO: 62724 - DNA, 425 bp, Homo Sapiens
  misc_feature (28)..(28): n is a, c, g, or t
  misc_feature (137)..(137): n is a, c, g, or t
cctctgacctctgacctcgtggccactntaggcctcacggaggagggaagaggaagaggcaaggggagggtactgaggggcagatggctccaggagaggcagctcccctgcccaagggtccttgggcagaccccagnctgttgtctgcccagtagaagtgggtgggggtaggaggggatagggtgtccttgggaacaatggatcccagcttagccccaaagaccaaccaaagagccagccagagtaagctggacctgcaacctgcctgagccccgtggcctttcagctctgcggccaccccgttccctccccagcttcctgcccaaagagccccacattcaagccaacttgagggaagggggcgtctcgtcagctggtccctgctagggagctattgatgtgcaatattagaaaggagacatgaa

SEQ ID NO: 62725 - DNA, 749 bp, Homo Sapiens
agcgtgcatgtggtatccatccataatggtacatagcgaaataatataatcttagttcagtaactattatgtgtatgaagatgttgcacattaagtctcagtagtgactctggttgttaatatttgtattgtaagtgtaatattccttttaaattataaggcatctttttatccttttttgtgtttgtaaatggatatagacagtggtaataactaatccttcaaaaataagttaacatgtttttgtaaaattttcaaatgtcagtcaagttttgcattagggacacatttatatatagcaaaagcctgagctgtttttaaacagctaaaaacagtagtatttattacaatctccacaatgaaaacaaatagtgcaatgtaagaaatattatgtatcttactgttgatgtgtgatcagggagcagagctatctgcatttgtatttagtgtgagagtcctaaatgttcttcaccaactttttcttcctcatagaagcaacatggcatagttaagggtgtggactctgggctcctgctgcctgggccccgattccagcatggggcatgctacttaatatctctgtgcctcagttcccatcccataaaagagtagtgatagtgacaacatcttaggattgctttgaggtctaaatgagttaacattttcaaagcacttagaatagtgtctgagacacaagagctatatgttagaggttatcatcattatttgtattttgtgaattacgctgc

SEQ ID NO: 62726 - DNA, 864 bp, Homo Sapiens
ggcgcttggttttcttccagaagttaaatggggggatctgaagatttgaatgtttggtctgctttgaaatgtatgtcttttgggatgtattatatgcctagctttataatcagtataaattttaattattccaggaatatgcataatattgaaatatttcatgtcctattttaatagaaaacctcagggcccaagtaacagtgatagaagttagaaaaacctttacttagaattgtccacctagtcagagcccaagaaagaattttcagtggaaaaatcaatatataacttagtgctagctagcgccacagactctagtagataatattatcatcataatggctggtgaaaccatataatcacagaaaaacattgccttcagcatgttcagttcgcagcactgagggcactcttgagggtgttgttaatgaagatttaatttttaaatacaggtggttccaagctttcaaataggttatgctccaaaagtgttatttgtaagttaatttttttacaagtcaaacaatgttggaagtggtatttaggttctagatcggtccacgaaagttagcccatatgtatatcttgaatagtataggggagggtattcataaagtccttatgtggttttaactaagtgaaattatggacaagagaaataattgtaaaatcgtcttaaaggaaaatttaatttttactcctgtttatgggacattcgttctattaactgtcagacacaatttctgttttcatctgagagccagttttcctttatttctacatctaaaataagaacatattgtacactattatataatacagaattgtcttaaactttaataaattcgcattttaaaggtgaaa

SEQ ID NO: 62727 - DNA, 801 bp, Homo Sapiens
  misc_feature (110)..(112): n is a, c, g, or t
  misc_feature (193)..(193): n is a, c, g, or t
  misc_feature (249)..(249): n is a, c, g, or t
  misc_feature (317)..(317): n is a, c, g, or t
  misc_feature (364)..(364): n is a, c, g, or t
ctcgtgcgaattcggcagaggggctttgccttataggtgccacagggcacagctccatcattgccactggtttttcctaagtcatgcaccaaggacttcagaaagttctnnntccgagtcagtcagtggtgccgggaccccagggcagcctcctcgactcctgaagaaaaggcagtgcccgtggctgcctctntcttcactcgctgttgatgtgaccgccaggcctcctctcgtaccttggacaaaggntacacctgaaccagaatagttttcttaccctcacattgaaatgaggattttgcttaaaacagcacttnccgccagtgggaggagggaggttttatttattcccacagtttctccntgggccttctggaatgaccatgttttcctgtggcggtgggtgtgtcattgcgcccgccgtcttccaaagccttacttccccaagctgccagccaggaggtgataacccccctcccagagtttctctcggctctttttttaaaagtcccccaacaaataggattcttgctgggaaaggaagttcggtaaggaaatgtcaaatctggtttttaaacaaggtccaaccctgcaatgaagcagccacttcagcccagagagattataagaactgatgtggccagagtgcctacccactgtggccccggtgctctgcccccacgccccgaccatctggtcttggtagatgtccctagacgggctgagccatgtgcaataagaacatagatcctaaaggatcctctggaagctgtatttcttgaattagaattctcaaattgt

SEQ ID NO: 62728 - DNA, 959 bp, Homo Sapiens
ccaaagtggctgtacggctcggattacgggatggagagggctctactctgagctcctattttccaaggctccgggccgcgctcggcgctggcctgctgccccggcgggtccgccggccggaggcgggagtcacaggaagagccctccacaaaaggaggcctcggcggatcaggacagctgcaggtgggtgtgcagactggtgagctgccagcaggggcccagacgcgccaggcctggagatggctggaaactgctcctgggaggcccatcccggcaacaggaacaggatgtgccctggcctgagcgaggccccggaactctacagccggggcttcctgaccatcgagcagatcgcgatgctgccgcctccggccgtcatgaactacatcttcctgctcctctgcctgtgtggcctggtgggcaacgggctggtcctctggtttttcggcttctccatcaagaggaaccccttctccatctacttcctgcacctggccagcgccgatgtgggctacctcttcagcaaggcggtgttctccatcctgaacacggggggcttcctgggcacgtttgccgactacatccgcagcgtgtgccgggtcctggggctctgcatgttccttaccggcgtgagcctccttgccggccgtcagcgccgagcgctgcgcctcggtcatcttccccgcttggtactggcgccggcggcccaagcgcctgtcggccgtggtgtgcgccctgcttgtgggtccttgtccctcctggtcacctgcctgcacaactaacttctcgcgtgtgccttggggccgcggggcccccggcgcgggctgcagggcccattgacatcttcgtgggcatcctcctgttcctgcctgcttgcccgctcatggtgctgccctgcttgggcctcatcctgcccgtgagtgccgggcccgaaggcgccaggctctgccaaggtaaca

SEQ ID NO: 62729 - DNA, 926 bp, Homo Sapiens
tgaaacgtaaagaataagaggaattaatacccagcattaaaggatgtccggccaacctatagtggaaatttatagaatagtatacaccacagttctgaatagtgatatcacataaaaatacatactagaggacctgccaagccatgagcagtgtttttgctttttgggggccagtccctggggtgtggagccgctagggtttgcaccgcatgaaacagaaaagccacaccctccaaggtgtggctgttcattttgggactgctgcagggagggcagaggcattgctgagactgcctggcaacggctgatgccccaggtaggaccttttccagtttcaaagtggtgttctaagtctgcgtccaacactgtgtaggaaaagaggttggtgcaaaaatattcctggtcatccacccattaaaatagttagatgaggctattgccttgatgacagctgtccacactcctcatgaaattaacccgtatgccggggcatttccaaatgtctgactcgtgaaattaacccatacgcaggggcctttccaaatgtctgaaaaggcagtggtgtcttaggggaaaatgttatgcatggaagcctgaccttttgcttacagttgacagcaaatcccttctgtactgccaatcaaggttcatgtgagatgcagaggcaatgagcttgagccttcctacctttacttccggctggatacttgctctggggaacaatcccatcaataccgcagacggctttgccggccgccttcgccaaagcctgggattcggaaacatacggggaaacggggcgcggaatccgaggagggccacgacagcgaccagggagaaaaacggcaggtgcgggaagaacctgggccacacaacaaaaacacggaagtgagaacacctggccacacgaaggaagacatgaagac

SEQ ID NO: 62730 - DNA, 552 bp, Homo Sapiens
agatagaagaaaatcctttggaagaaaatattctggcgggggaagcagcatctcaagctggtgacagtggtaacgaggcagccaacagaggagatggttcagatgtttcaagtcaaacacctcaaacctcaagtgactggcttgaacaagtacatttagtgtgaactgcacacatctgggctctaaatgaattacaggtacagatggtatgctcaggtggagtatgcttgatagagactttgattcacttaattccaactcagtgataaaccactgacattagggttgaatacagagaagttcccttgaatggtagcttcattttttattttaaccttacagggaatttcctttgtacttaattgaatagcttttcccctttttgctgacaaaaagaagagcaagagaaagagaaacaaaaatgaaataaataagttgtattccacactctaagaaaatgcagtcctctatttagcctaggcttgacaatacttaaattgaacatttaaactaaaggcttactccctaatctttgggtggctttcctttaaa

SEQ ID NO: 62731 - DNA, 871 bp, Homo Sapiens
cagctctagcgaaaagccgcggtatttctccatctggctctcctctacctccaggcaggctcacccgagatccccgccccgaacgccccctgcacactcggcccagcgctgtgcccccggagcggacgtttctgcagctattctgagcacaccttgacgtcggctgagggagcgggacagggtcagcggcgaaggaggcaggccccgcgcggggatctcggaagccctgcggtgcatcatgaagttccagtacaaggaggaccatccctttgagtatcggaaaaaggaaggagaaacagatccggaacgaaatatccggacagggtccccgtgattgtagagaaggctccaaaagccagggtgcctgatctggacaagaggaagtacctagtgccctctgaccttactggttggccagtatctacttcttaatccggaagagaatccacctgagacctgaggacgccttattcttctttgtcaagcagacaccagtccctacccagccaggctaccagagaggccaacaagaaagagagacaatacatgaggaagactagaaacagaaaaagaggccaacaagagacgaagaagaagcacaacagagagaaaaaataggaagaaaatggtattcccaggcagattgtaatcggctgttacgaggtggttcggggaggtgatgattagaatgtctacttagtgggattaatagtaaaggccggccgattcttctttagatcactgtggagatagaagtacgatacgtatgaaagcatatatggccgattagtgattatcatggagcggttaaggtctttgaactcataattgtgaattttttgggggttggttcttctagccgagggtgatc

SEQ ID NO: 62732 - DNA, 957 bp, Homo Sapiens
cctggggctggtgcagagttccaagcccacggcccggtcgcggcctcgccgccctcccgcgccccgcgccgggagcgggcctagagcgctcgcctcgcccctccgcgagcagggctctggcgcccgcccctgtccgcaccgctggcagcctgaagagagtcgctggccgtggtcgccgctaggtaggatatatctgcatcttgaaaggaagataaaacaaaagccttctttggaatagatggatttttgtcactttctgtgtgaactaaagtgattcaatgtctcttttggattgcttctgcacttcaagaacacaagttgaatcactcagacctgaaaaacagtctgaaaccagtatccatcaatacttggttgatgagccaaccctttcctggtcacgtccatccactagagccagtgaagtactatgttccaccaacgtttctcactatgagctccaagtagaaataggaagaggatttgacaacttgacttctgtccatctttgcacggcatactcccacgggaacactggtaactataaaaattacaaatctggaaaactgcaatgaagaacgcctgaaagctttacagaaagccgtgattctatcccactttttccggcatcccaatattacaacttattggacagttttcactgttggcagctggcttggggttatttctccatttatggcctatggttcaggcaagtcaactcttgaggacctatttttcctgaaggacttgagtgacaactttactaaggaaccattctctttggaagccgtgagacgggttgaactaatctgcaccaaaatgggttgtatttcacaggagtatttaaaagccaggcatattctcatttcctggtgattggcttagtgagccttttttggcctgtccaatctggataaggtgcggtaccattggacagaaggctatggatgggtatca

SEQ ID NO: 62733 - DNA, 861 bp, Homo Sapiens
gtgctgctggatgaccagaccgggcgtcgggtgagcccagaagtgagagcagttggctgtggcccagtgctgtgtgacccagaggcgccgctcaccctctctgagctggtggacatcataggtggggaagctcaggtcagggcactcccatgagtgtctggaggcctgagtcccattctcagcgtctgccatatgcttgctgcgctctagaggagttcctcttcctctccaagcctcggtttatgtacccgtgcagtgggagtgagttgcacttcggggtgaagggggcaagacttgtgtgggcgcatcctgcagaaggatcccacagcaaggcaagtgaggtgctgccgtcatccaggctggacagttcagtgatttgcctgaggccccacagcagagttcaactggagcacagagaaaccagctagaggcagagggaggtaacacggagtcccccagaaaggtctgggctgcgcgtgcttcaggcttcagcagagtgtgagggagaccccggttatttcctcagctatttccaccaaatcctcctgtctttcgtggccaacaccccaggcaaggcttggggcccccgtctgctgctggacgagccatgaagaagaagttagtggtgctgggcctgctggccgtggtcctggtgctggtcattgtcggcctctgtctctggctgccctcatgctccaaggaacctgacaaccatgtgtacaccaggtctgccgtggccgccggatgccaagcagtgctcgaacgattggcgacggatgcactgctggacgggtggctctgcgtcgatgccgccatttgcagcctgttgtgtgtggggttcttgtaatgccaagattggca

SEQ ID NO: 62734 - DNA, 1365 bp, Homo Sapiens
cagtaggaggtttgactaagatcaatcatgacgacttacagtgacaaaggggcaaagcctgaggagaggccgattcctccacttccactctgtgaccttctgggttggcaacgccaagcaggccgcgtcattctactgcagcaagatgggctttgaacctctagcctacaggggcctggagaccggttcccgggaggtggtcagccatgtaatcaaacaagggaagattgtgtttgtcctctcctcagcgctcaacccctggaacaaagagatgggcgatcacctggtgaaacacggtgacggagtgaaggacattgcgttcgaggtggaagattgtgactacatcgtgcagaaagcacgggaacggggcgccaaaatcatgcgggagccctgggtagagcaagacaagtttgggaaggtgaagtttgctgtgctgcagacgtatggggacaccacacacaccctggtggagaagatgaactacatcggccaattcttgcctggatatgaggccccagcgttcatggaccccctacttcctaaactgcccaaatgcagtctggagatgatcgaccacattgtgggaaaccagcctgatcaggagatggtgtccgcctccgaatggtacctgaaaaacctgcagttccaccgcttctggtccgtggatgacacgcaggtgcacacggaatatagctctctgcgatccattgtggtggccaactatgaagagtccatcaagatgcccatcaatgagccagcgcctggcaagaagaagtcccagatccaggaatatgtggactataacgggggcgctggggtccagcacatcgctctcaagaccgaagacatcatcacagcgattcgccacttgagagagagaggcctggagttcttatctgttccctccacgtactacaaacaactgcgggagaagctgaagacggccaagatcaaggtgaaggagaacattgatgccctggaggagctgaaaatcctggtggactacgacgagaaaggctacctcctgcagatcttcaccaaaccggtgcaggaccggcccacgctcttcctggaagtcatccagcgccacaaccaccagggttttggagccggcaacttcaactcactgttcaaggctttcgaggaggagcagaacctagcggggtaacctcaccaaacatggagaccaatggggtggtgccccggcattgtaagccccgcgcaccccacggaggccacagccacacagcaacgcccccatgattctggaactcgcccaacttccctactggctgctccccttgggtcccgcccaccaggggactcggccccaagctccgccatactgacgagcccctcggcggg

SEQ ID NO: 62735 - DNA, 1116 bp, Homo Sapiens
  misc_feature (1082)..(1082): n is a, c, g, or t
tccagaagttccaacaggatggattcctggtgctggaaggattcttgtctgcggaagagtgtgtggccatgcaacaaaggatggcgagatagtggctgaaatggatgttcctctccactgccgcacagaattctccacccaggaagaggagcagcttcgagcccagggcagcacagactatttcttgagcagtggtgacaagattcgattcttctttgagaaaggcgtttttgatgagaaaggaaatttcctggtccctccggagaaatccatcaacaaaattggccacgctctgcacgcccacgaccccgtcttcaagagcatcacacactccttcaaggtgcagaccttggccagaagtctgggcctccagatgcccgtggtggtgcagagcatgtacatctttaagcaacctcactttggcggtgaagtctcccctcatcaggacgcctccttcctgtacacggagcccctgggccgggtgctgggcgtgtggatcgcagtggaggatgccacgctggagaacggctgtctctggttcatccctggctcccacaccagtggtgtgtcaagaaggatggtccgggcccctgttggctcagcgcctggtaccagcttccttgggtcagagccagcccgggataacagcctctttgtgcccaccccagtgcagagaggggccctggtcctcatccatggagaagtggtacacaagagcaagcagaacctctctgaccgctcgcgccaggcctacactattccacctcatggaggcctctggcaaccacctgggagcccggagaactggctccaggccaacgagctgaactgcccttatccccaactgtacacctaaaggctctcgcagggcaggagccctcgcccctcccgggtgaagctgtgggctgtaaacaccagtgccttgctcagcctcctggtttgcaacagggaggtcttgtctcccctcctgggctttcctcctgccctgtggggcagcagcctaaggctgggtcaggggcttccctaagatcttccactctctgctccctactgcccaacatagccttgaggaggcttctcangcaccaaaggttctggcccttctcatcttccttc

SEQ ID NO: 62736 - DNA, 1000 bp, Homo Sapiens
gcgccggccatggagcgcacagcaggcaaagagctggccctggcaccgctgcaggactggggtgaagagaccgaggacggcgcggtgtacagtgtctccctgcggcggcagcgcagtcagcgcaggagcccggcggagggccccgggggcagccaggctccctgctcgccatatgccaataccttcctccactatcgaaccgagcaaggtgagggtgctgagggcagcgcgcctggagcggctggtgggagagttggtgtttggagaccgtgagcaggaccccagcttcatgcccgccttcctggccacctaccggacctttgtacccactgcctgcctgctgggctttctgctgccaccaatgccaccgtccccagctcccggggtagagatcaagaagatcagcgtgtatcatggatcttgagcttcagagcaattaacctgtatggggcgtagtgtgtggtcaggagcgaagtacgtcctaggcgtagtcagtgagttagccctacagaagtttgctatgatggcctcatggctgcaaaagcttaactctaaatttcgctgaatactcttagagcgctaaaactaaggaacctatggggcatgggctcccggggaacaagtagttttgaagttgcgacatagaaaaggctgggtatatatgtctaatcttggggaggagaatattattttaacggagggtgcggagctaagttgggccttcaggattgcggaagattagactattgggaattgccctttctccttactcgatgttggaaataattggtcaccgcagaggggagtgccaactcccccgagggaaggtattatgacgctccagagaagcggaatatcgaaatgaatccgtctagggaaaggcttggccttaaatcggactagtggagcccaaatgggtccagtggcggtgggagactgacgggatgacgggggtaggggcttaccattgatagcccttaaccagaaaggagtgttaccc

SEQ ID NO: 62737 - DNA, 1677 bp, Homo Sapiens
  misc_feature (996)..(996): n is a, c, g, or t
  misc_feature (1012)..(1012): n is a, c, g, or t
  misc_feature (1028)..(1028): n is a, c, g, or t
  misc_feature (1080)..(1082): n is a, c, g, or t
  misc_feature (1173)..(1173): n is a, c, g, or t
  misc_feature (1215)..(1215): n is a, c, g, or t
  misc_feature (1288)..(1288): n is a, c, g, or t
  misc_feature (1356)..(1356): n is a, c, g, or t
  misc_feature (1390)..(1391): n is a, c, g, or t
  misc_feature (1456)..(1456): n is a, c, g, or t
  misc_feature (1466)..(1466): n is a, c, g, or t
  misc_feature (1489)..(1518): n is a, c, g, or t
  misc_feature (1603)..(1603): n is a, c, g, or t
  misc_feature (1611)..(1611): n is a, c, g, or t
gcgcccacaaacccgctccatacacatggacccggaccggaattttcgggatgttacgaggttcgctggccgcgtgattccccaggcagctggcgctggaggcttcggcgtcacgtgctggtctggatttttctcgatgcactggggaaagcggtggactcttatcgtgggagggctcttgatctgtgatttatagataggcacagctactcccgttcgggaacccaacggcagacaggtcctagtgcccatcagatacccgcggccgggactcggagctgtggggtgtggggaggcggaggcaccaactaagagcgacctagcatcgcaaagccgccctcggggcgctcatggcgggacgcctcctgggaaaggctttagccgcggtgtctctctctctggccttggcctctgtgactatcaggtcctcgcgctgccgcggcatccaggcgttcagaaactcgttttcatcttcttggtttcatcttaataccaacgtcatgtctggttctaatggttccaaagaaaattctcacaataaggctcggacgtctccttacccaggttcaaaagttgaacgaagccaggttcctaatgagaaagtgggctgcgttggctccctgacacgacccctacccgcgtggcaaacactgccgcccctcgcgccgcacggacacccgacgggaaaaaaaccgaaccgccccaggacggggcatctgttcgcgagatagcgcgatcggcgatcgggaccggcattcatttcaccatcactaaaacgctggcactacgcctctcccgccgccgcacccgcaaataaccaggggacgctgccggtatcaacagccagtgggcgccggggatcaaccgcctatgagttatgacaagatggcggcccaataaatgtgacagtggacgcaatctgcatcgacggacataaatgtccgcgcgagcgccgccccccgtctacaaccacgaacaacctcctggtctccgctntctgctttaccgaggnaacgacgacggacgtngaggttgtcgggggttgggtttcgttgcctttttccgaccggcaaacaaaannntcgcctcacgccctccgcgcccgcaccaccacccaacaccaaaacacccgtacgaacgcgcgtttaaatacagccgaaccacaaaggccantgaataacgggtccgccgattcaattcgcccccggggggccncgccacctggcccctgttccttacaattgaaactatcgtctcacgggaacgcacccccaaagagaaaaattanctattggggggcaacttataacaaaaactttcgccaccgtagaggtggtggttccctcattataacantccgcgacgctgtgggcgaccggttcagcgccgnnttcttctgggacctcggttcggcgtcaccacaaggaatacccaaacacgcgggcctaaatctccntttcctaagngaccacgtatggcgcgtttggannnnnnnnnnnnnnnnnnnnnnnnnnnnnnccaagatctcccggaggacaaacttctaccaaggctggcgcacagaaaaaagttggtattaaaaagcacgatttctataaatctntacgtctntccccttgtatgacaccctcgcgagataggtggcgagtagagaaggacggggtatcatcacaggaa

SEQ ID NO: 62738 - DNA, 855 bp, Homo Sapiens
ctgaggcagagctcgggggctgtcggtggggaccttgcaggagggcaccccaagcccgcccggccggccaacccagcccctgcgcgcagtccgggccgagtatgacctccgcgcgcccctcgccatggcggcgccctcgcggttcctgatccgcgggtggtcgctgtggtcaacgatgacttctcggaggtggccgacgtgctggtggaggacggcgtggtgcgggcactcgggcacgacctgctgcctcccgggggcgctcctgcggggctgcgggtcctcgacgccgccggcaagctcgtcctgcccggaggcatcgacacacacacgcacatgcagttccccttcatgggctcgcggtccatcgacgacttccaccagggcaccaaggctgctctctcaggaggcaccaccatgattattgatttcgccattcctcagaaaggtggctccctcattgaggccttcgagacctggcgaagctgggctgatcccaaagtttgctgcgactacagccttcatgtggcagtgacgtggtggagtgaccaggttacagaagaactgaacaatccttgtgcaagataaaggtgttaactctttcaagatgttatggcctataaagatctgtacatggtgacagacctggaggctgtacgaagccttctctcggtgcaaggaaacttggagcaatttgcccaggtccatgcggaaaactggcgcacttagttgcatgagggcagcagacgaagatgtagggctcggaggataccagcgcctgatggcccaccagctgtgccggcccacaggcatatggcaggctgaagggcacgcttgataggccatcaccaatagcct

SEQ ID NO: 62739 - DNA, 1644 bp, Homo Sapiens
aggtgtatggatgtgggtagtgatgtggtgtgtttcctaacacctccggcagtgagccaggctttgagtggctgcgtctaaacacttctttccctgaggactggaagacattagaataagctccagacaattcaaacattgagattcctgggaactaccagatagtagcatcagttcaccaagaaatgaagctggtgaggcagtgaaaatccagggcctagaaagctgggaatgccatgacgtgggcacattgaaagacaagaggcaggcatgatcagccttgaactttaggaagatcccaggaagctgatggaagacaagatgtggagtgaatgtgaaggtccagaaatgtccttggtgtgtctgacagactttcaggcccatgcgcgagagcagctgtctaagtcaactcgggattttattgaaggtggagcagatgacagcatcacgcgggatgacaacattgcagcatttaaaagaattcgcctccgtccgcggtacctgagagatgtgtctgaggtggacaccagaaccacaatccaaggggaggagatcagtgcccctatttgtatcgcacccacagggttccactgccttgtctggcctgatggggaaatgagcacagcaagagctgcccaagcggctggtatctgctacatcaccagcacatttgccagctgtagccttgaagacattgtcattgcagctcccgaaggcctccgatggttccaactctatgtgcatccagacctgcagctgaacaaacagttgatccagagggtagaatccctaggtttcaaagctctggtaataactttggatacacctgtatgtggcaacaggcgacatgacattcgaaaccagttgaggaggaacttaacactaacagatcttcaatcacctaaaaagggaaatgcaataccttatttccagatgactcctatcagcacttctctctgctggaatgatctctcctggtttcagagcataactcgattgcccatcatcctgaaagggattttgacaaaagaggatgcagagttagctggtgaagcacaagtgtccagggctatcattgtttccaaccatggtgggaggcagcttgatgaggttcttgcttcaattgatgctttgacagaagtggtggctgctgtaaaggggaaaattgaagtctacctggatggcggggtccgaactggcaatgatgtgctgaaggctctggcccttggagctaagtgcatttttcttgggagaccaatcctatggggccttgcctgcaagggtgaacatggtgttaaggaagttttgaacattttaacaaatgagttccacacttccatggcccttacaggctgccggtcggtcgctgagatcaatcgaaacttggtccagttttccaggctgtaagaaaaaagggccaataaccagactgctgaggttgcccacaggaggatcacaaactcacagcacagtgtgtgatgctgtccttcctggaccccattctgtccggaggctcatggcccatatttcccacatttctaataccacacccctgtgcttcaggccctccaaacccctgtgttccccaaatgttccatgcccttctttgtatcactgactattatatgttgctctcttgcctaa

SEQ ID NO: 62740 - DNA, 461 bp, Homo Sapiens
gatgccttgctggctttttgctgtgctccacattcctgtgcattgaggggttacattaggctgggaagatacaaaacttgaagagcatctggagggaattgtcaatatcttccaccaatactcagttcggaaggggcattttgacaccctctctaagggtgagctgaagcagctgcttacaaaggagcttgcaaacaccatcaagaatatcaaagataaagctgtcattgatgaaatattccaaggtctggatgctaatcaagatgaacaggtcgactttcaagaattcatatccctggtagccattgcgctgaaggctgcccattaccacacccacaaagagtaggtagctctctgaaggctttttacccagcaatgtcctcaatgagggtcttttctttccctcaccaaaacccaaccctgcccgtggggagtaagagttaataaacacaaacacgaaa

SEQ ID NO: 62741 - DNA, 527 bp, Homo Sapiens
  misc_feature (361)..(399): n is a, c, g, or t
gcggccgcgccctggtcgtgcgcattgtgccccccggctactccatcaaggtgttcgacttcgagcgctcgggcctgcagcacgcgcccgagcccgacgccgccgacggcccctacgaccccaacagcgtccgcatcagcttcgccaagggctgggggccctgctactcccggcagttcatcacctcctgcccctgctggctggagatcctcctcaacaaccccagatagtggcggccccggcgggaggggcggtgtgggaggccgcggccaccgccacctgccggcctcgagaggggccgatgcccagagacacagcccccacggacaaaaccccccagatatcatctacctagatttannnnnnnnnnnnnnnnnnnnnnnnnnnnnnnnnnnnnnncttgtaattatggagtcatttttacaatgtaattatttatgtatggtgcaatgtgtgtatatggacaaaacaagaaagacgcactttggcttataattctttcaatacagatatattttctttctcat

SEQ ID NO: 62742 - DNA, 361 bp, Homo Sapiens
cccgtcccgataggcccatggcatggctggggttgtttcctgagccaagcatccaatatcatgccccactcaatggcctagaagctgcctgtactttggggaaacagatggagctcttgggcccagccagctgggcctgggacttctgcctctgccgcctccagagtggcctggcagctttgccagaggctgtggagcgagggtagtaggagcttttcccagagtgctgtgacttgcatgatggattctaggctgtggcaagggctgatttctgggatagggggagggttggaaaatttatttttatgaaacagagggaagactttattgttgttatttttggtaaaataaaaggcaaact

SEQ ID NO: 62743 - DNA, 737 bp, Homo Sapiens
gaaatccacaaagactcacagtctgctggtgggcagagaagacagaaacgacatgagcacaggcaggaaaagtaatcaaatgcaaagcagctgtgctatgggaggtaaagaaacccttttccattgaggatgtggaggttgcacctcctaaggcttatgaagttcgcattaagatggtggctgtaggaatctgtcgcacagatgaccacgtggttagtggcaacctggtgaccccccttcctgtgattttaggccatgaggcagccggcatcgtggagagtgttggagaaggggtgactacagtcaaaccaggtgataaagtcatcccgctctttactcctcagtgtggaaaatgcagagtttgtaaaaacccggagagcaactactgcttgaaaaatgatctaggcaatcctcgggggaccctgcaggatggcaccaggaggttcacctgcagggggaagcccattcaccacttccttggcaccagcaccttctcccagtacacggtggtggatgagaatgcagtggccaaaattgatgcagcctcgcccctggagaaagtctgcctcattggctgtggattctcgactggttatgggtctgcagttaacgttgccaaggtcaccccaggctctacctgtgctgtgtttggcctgggaggggtcggcctatctgctgttatgggctgtaaagcagctggagcagccagaatcattgcggtggacatcaacaaggac

SEQ ID NO: 62744 - DNA, 607 bp, Homo Sapiens
ctggacctctggcagcagcttcactaaggtgggatggatagcagggtctcaggcacaagcagtaatggagagacaaaaccagtgtatccagtcatggaaaagaaggaggaagatggcaccctggagcgggggcactggaacaacaagatggagtttgtgctgtcagtggctggggagatcattggcttaggcaacgtctggaggtttccctatctctgctacaaaaatgggggaggtgccttcttcatcccctacctcgtcttcctctttacctgtggcattcctgtcttccttctggagacagcactaggccagtacactagccagggaggcgtcacagcctggaggaagatctgccccatctttgaggtttccccgcaggcattggctatgcctcccagatgatcgtcatcctcctcaacgtctactacatcattgtgttggcctgggccctgttctacctcttcagcagcttcaccatcgacctgccctggggcggctgctaccatgagtggaacacagaacactgtatggagttccagaagaccaacggctccctgaatggtacctctgagaatgccacctctcctgtcatcgagttctggga

SEQ ID NO: 62745 - DNA, 903 bp, Homo Sapiens
gggtccggaattcccgggattgagcggggcaacgcagaagggtggagaggagggggtggcgagggcgggcagcgaggcctggagccgccaggagaggggcggggggcggcccttctccaggaatttccggggatcgtgttacagcgttggcggagcccgagcggagtgggactcgaggccctgtagccggactgggcccctcgccccctcctccagcggcctgcgggccttggcagcgccgcccctgcccacactgaccccgtgtggcggggccgctccgcgcccccgggccgctctgtaatggtagggcagcctcagccccgagatgacgtcgggtctccgcggccccgggttattgtaggaaccatccggccccgcgtaatcgtaggaactatccggccccgcgtaatcgtagggtctgcgcgggcccggcccccaccagacgggactccccgcccccaattggcggccgaagagtctcctcgccccagagtcatcttcgggacgcccagggcccgggtgattttgggctcgccgcggccccgggtgattgtttcatctccgtggcccgcggtggtcgtagcgtctccgagaccgcggactcccgtagggtccccgtggccccgagttgtagtcgggacaccccggccgcgggtgatcgtcgggtctccacgcgcccgggtcgctgacgcggatccggcctcggcgccttctcagggcgccctgcaaggccgcaggcaggatgaacattctggcacccgtgcggagggatcgcgtcctggcggagctgccccaggtgcctgaggaaggaggccgctttgcacggggcacaaagacttccacccccggtcacctgcgcctgccaggagcaccggacaaggcaccgtgggatttaagatctcc

SEQ ID NO: 62746 - DNA, 530 bp, Homo Sapiens
  misc_feature (265)..(265): n is a, c, g, or t
  misc_feature (285)..(286): n is a, c, g, or t
  misc_feature (292)..(292): n is a, c, g, or t
gcctcgagaccaaagatgctgagtcaccggcccagaagaaacagaagaaaaagaagacgacagcagagcagactgtatgacgagcaccagcaccaggcacagggatttcgtagccgagcagtgggcatccccatgcctttgacctccaccgacctctgcccaccatgggttggaactaaactgttaccttccctcgctccacagaagaagacagccagcttcaggggtccctgtgctggccaaaccagtgagccttcggggaggntggtccaaggagaaagtggnncagctncccatgacctcaccccactcccccaacacaggacgcttcatatagatgtgtacagtatatgtatttttttaagtgactccctctccttccacagaccccacatgcccaaaggcctcgggacttcccaccaccttgctccacagatccagctaggcctgacctgtgcctcatcccgtgccgctcggtctctggctgatcccgaggctttgtcttcctctcgtcagttcttttggttgtg

SEQ ID NO: 62747 - DNA, 813 bp, Homo Sapiens
atcagaatggggaacgtgttcaactttattagcttaccctaatcatgacgcatacccattagagtaaagaaatgcaactgagcaatgacaacctctttcccgtggtacagtaataagtcataggcaaacggttcccccgaaatggacagtcattaacagattaagtaagttatccaccagtaagcgccaggatccacctaataaatggagtaactcagcataagaatggagggattacattttaagcaccggagagattgcctttatattcgtgtagaaaacctctttaaacggatagcgcctcgcagttcatcacttctttagtacaaccatgagtaagtactttagtcctattgccaatgaattcactagtaatattactagtgaattcactagtaatatcttaccatagctgtaaattgtatcaaaacaaaaaattagtagatggatttaggaatatgtaagaaactcaacacataatataaatgcaatgaatgtttttcttctttaaatttaaagttagtatctacagatggaattgtatctacaaccaaatgcctcttatccctgaattcagagtgataattttataagtgtgaaacttaattatgtagggctccccccgtctgaatagaattaattccttaaagtctagttagggtcctgctgtctgtcatgttgccttgtaacggatgtttccacctccttctccaacctctaccccaccattagtgtattttactataaaaacagtggaaccacagccctaaagtcctgctgatataaagtccttttgtcttaattgtatttaaa

SEQ ID NO: 62748 - DNA, 1078 bp, Homo Sapiens
  misc_feature (328)..(328): n is a, c, g, or t
ccggaattcccgggatcagccgcagagcgccgcagtctcgccagctcgccccggcactgcgcacttgccagccagtccgcccgtccggagcccggctcgctggggcagcatggcggggtcgccgctgctctgggggccgcgggccgggggcgtcggccttttggtgctgctgctgctcggcctgtttcggccgccccccgcgctctgcgcgcggccggtaaaggagccccgcggcctaagcgcagcgtctccgcccttggctgagactggcgctcctcgccgcttccggcggtcagtgccccgaggtgaggcggcgggggcggtgcangagctggcgcgggcgctggcgcatctgctggaggccgaacgtcaggagcgggcgcgggccgaggcgcaggaggctgaggatcagcatgcgcgcgtcctggcgcagctgctgcgcgtctggggcgccccccgcaactctgatgcggctctgggcctggacgacgaccccgacgcgcctgcagcgcagctcgctcgggctctgctccgcgcccggcttgaccctggcgccctcgcagcccagcttgtccccgcgcccgtccccggcaaggggctccgaacccgtgacgggggctaccacaaggggccgacggagcccaataccaaatccccgggacctgcacagagcctggatgggaagccccccccgagcggggggctcgccacggcggcaatcacacgccctaaaggggtcaaaaggaatacgcgtggaatgaaaaaaaccatgacttctctaaggacccaaaaaacaccctgtcgcagctctacaggaacgccctgaggccccaatgaaccgccaacggttggctgtgggggcacagagaagatgcccctctaaccccaggatccacagccgcccaaagttttgagggggacgcggcaagcccgagaacgagattgacaaacccggggcgcacaagagataccaagggatcgcggaagagtgggataacacaaactttcgggtgggcgcaaataaggaaaccgtttcttaaaatactaaaacaacattctctggccgggggaaagggca

SEQ ID NO: 62749 - DNA, 376 bp, Homo Sapiens
cagtaactaggatgagttgcttgaggtcacaccgatgaggttgaagctggaatctgacaccagagcctgtgtgattgtcctgatgtgtaagacagaggggggaagacggtggggcctccccacctgccccgcagaagatgcagttctttggccgcctggtcaataccttcagtggcgtcaccaacttgttctctaacccattccgggtgaaggaggtggctgtggcggactacacctcgagtgaccgagttcgggaggaagggcagctgattctgttccagaacactcccaaccgcacctgggactgcgtcctggtcaaccccaggaactcacagagtggattccgactcttccagctggagttggaggctgacgc

SEQ ID NO: 62750 - DNA, 855 bp, Homo Sapiens
ggggcactcagagatccagcaggtgctgcaccatgagtgtctctgtgctgagccccagcagactcctgggtgatgtctctggaatcctccaagcggcctccctgctcattctgcttctgctgctgatcaaggcagttcagctctacctgcacaggcagtggctgctcaaagccctccagcagttcccgtgccctccctcccactggctcttcgggcacatccaggagctccaacaggaccaggagctacaacggattcagaaatgggtggagacattcccaagtgcctgtcctcattggctatggggaggcaaagttcgtgtccagctctatgaccctgactatatgaaggtgattctggggagatcagacccgaaatcccatggttcctacagattcctggctccatggattgggtacggcttgctcctgttgaatgggcagacatggttccagcatcgacggatgctgaccccagccttccactatgacatcctgaagccctatgtggggctcatggcagactctgtacgagtgatgctggacaaatgggaagagctccttggccaggattcccctctggaggtctttcagcacgtctccttgatgaccctggacaccatcatgaagtgtgccttcagccatcagggcagcatccaggtggaccaggaattctcagtcctacatacaggccattagtgacctgaacaactggtttttcccgtgtgaggaatgccttttcaccagaatgacaccatctacagcctgacctctgctggccctggacacaccgcgcctgcagctgggccatcagcacacagacaagtgatccaactgaggaagggtcaagtacagg

SEQ ID NO: 62751 - DNA, 419 bp, Homo Sapiens
tgatcaagcttcggcaaggtgtatgtggcagcagtgcgcctggagcgtgtggtgctgacctgtgagctatgccggccctgggcagaggtgcgctggaccaaggatggagaggaggtggtggagagccccgcgctgctcctgtagaaggaagacactgtccgccgcctggtgctgcccgctgtccagctcgaggactccggcgagtacttgtgtgaaattgacgatgagtcggcctccttcactgtcaccgtcacagagcccccagtgcggatcatataccctcgcgatgaggtgaccttgatcgccgtgaccttggagtgtgtggtgctgatgtgtgaactgtctcgggaggatgcccctgtgcgctggtacaaggatgggctggaagtggaggagagcgaggccctggtgctggagag

SEQ ID NO: 62752 - DNA, 449 bp, Homo Sapiens
ctctgggcgtaaatgtgacaggggttacgcagcaggctgttacggtcggaattccgggcatatcgtcgacccacgctgtcgcccatcgcgatacgtgaagatgaagatgagtcatcagaagaagactctgagtgatgaagatgccggcacctaagagaaggttgcagaagaaaaccccagccaagtccccagggaaggccgcatctgtgaagcagagagggtccaaacctgcacctaaagtctcagctgcccagcgggggaaagctaggcccttgcctaagaaagcacctcctaaggccaaaacgcctgccaagaagaccagaccctcatccacagtcatcaagaaacctagtggtggctcctcaaagaagcctgcaaccagtgcaagaaaggaagtaaaattgccgggcaagggcaaatcccccatgaagaagtctttcagagtgaaa

SEQ ID NO: 62753 - DNA, 346 bp, Homo Sapiens
cctcttagaaaataatacttgcgatgactttccttgtagctcagactttttcacgtctgttgttatctctttgggaatgctgaatacatacatttcgagaaggaaatgactgttaaactcttaagacttcaggttcatattgctaaactgcccagcagggagggattttttcaattagtgttctcactggtgaggcaaacctgatgccctcccctcttcctcagaaccggcatttatacacattgaaaacctttgctcctccgacggatcgagtctgctttccctgtggatgtgagcattgctttgtctgctggtgactgaacatctctacctagtgctgtgtgga

SEQ ID NO: 62754 - DNA, 418 bp, Homo Sapiens
ggagtagacccccaggaaggaaaggtgtactggtctgacagcacactgcacaggatcagtcgtgccaatctggatggctcacagcatgaggacatcatcaccacagggctacagaccacagatgggctcgcggttgatgccattggccggaaagtatactggacagacacgggaacaaaccggattgaagtgggcaacctggacgggtccatgcggaaagtgttggtgtggcagaaccttgacagtccccgggccatcgtactgtaccatgagatggggtttatgtactggacagactggggggagaatgccaagttagagcggtccggaatggatggctcagaccgcgtggtgctcatcaacaactacctaggatggcccaatggactgtatctgttgacaaggccagctcccaact

SEQ ID NO: 62755 - DNA, 336 bp, Homo Sapiens
aaggttctctggaggtcctgaggcagcttctgggcatgggtggaaccactgcacaccctgcctggagacagctcagctcctccctttgcctttcaagagcagacgtccctggaggagcagctgaaggagcaggagctgagagcctgcgagatggtccgtggaagagaccgggcgtcagaaggagctcctgtgcaagatggagagggagaagagcattgagatcgagaacctgcagaccaggctacagcaaactggacgaggagaacagtgaactcccggtcctgacacgccctgtctgaaggccaacattgagcgtctggaggaggagaagcagca

SEQ ID NO: 62756 - DNA, 663 bp, Homo Sapiens
ttggaggacttccctgtcaatgtgttctccgtcactcctttacacacccagcaccgctgacatccaggtgtccgatgatgacaaggcgggggccaccttgctcttctcaggcatctttctgggactggtggggatcacattcactgtcatgggctggatcaaataccaaggtgtctcccactttgaatggacccagctccttgggcccgtcctgctgtcagttggggtgacattcatcctgattgctgtgtgcaagttcaaaatgctctcctgccagttgtgcaaagaaagtgaggaaagggtcccggactcggaacagacaccaggaggaccatcatttgttttcactggcatcaaccaacccatcaccttccatggggccactgtggtgcagtacatccctcctccttatggttctccagagcctatggggataaataccagctacctgcagtctgtggtgagcccctgcggcctcataacctctggaggggcagcagccgccatgtcaagtcctcctcaatactacaccatctaccctcaagataactctgcatttgtggttgatgagggctgcctttctttcacggacggtggaaatcacaggcccaatcctgatgttgaccagctagaagagacacagctggaagaggaggcctgtgc

SEQ ID NO: 62757 - DNA, 738 bp, Homo Sapiens
ttcatgcagtacaagactacctggtggctttgagggagggtgcaacccgacttccatgaggccattgggcacgtctaggccttctcagtgtctacgccaaagcacctgcacagtctcaacttgctgagcagtgagggtggcagcgacgagcatgacatcaactttctgatgaagatggcccttgacaagatcgcctttatccccttcagctacctcgtcgatcagtggcgctggagggtatttgatggaagcatcaccaaggagaactataaccaggagtggtggagcctcaggctgaagtaccagggcctctgccccccagtgcccaggactcaaggtgactttgacccaggggccaagttccacattccttctagcgtgccttacatcaggtacttcgtcagcttcatcatccagttccagttccacgaggcactgtgccaggcagctggccacacgggccccctgcacaagtgtgacatctaccagtccaaggaggccgggcagcgcctggcgaccgccatgaagctgggcttcagtaggccgtggccggaagccatgcagctgatcacgggccagcccaacatgagcgcctcggccatgttgagctacttcaagccgctgctggactggctccgcacggagaacgagctgcatggggagaagctgggctggccgcagtacaactggacgccgaactccgctcgctcagaagggcccctcccagacagcggccgc

SEQ ID NO: 62758 - DNA, 398 bp, Homo Sapiens
tatttattgtttgacatgaactatttaggtgttccaaaaccttgggatctcaatgtgcaaactccttggactccagacccctgtctggttggcactcccagcagtgtgtggtttcatcaggaaatccttgcagcaggggtttagatggttccttcaggaggtgggaagcctccatagcattgaaggccagcctgcatctcgcggtgtgtgtccacttctcccctcactttcccctcacccatccctttaaagtgattggctgtgaggagcacagagggtggcaattccatctgttatgggctcagaagacatagccgccatgttgatttcacattaaactgtgtaaaatgtggaaaagactcagcatgttggtcaaacaataaactgtcctaattctc

SEQ ID NO: 62759 - DNA, 623 bp, Homo Sapiens
aagactatttgagagatattgatctaatctgtagtaatgccttagaatacaatccagatagagatcctggagatcgtcttattaggcatagagcctgtgctttaagagatactgcctatgccataattaaagaagaacttgatgaagactttgagcagctctgtgaagaaattcaggaatctagaaagaaaagaggttgtagctcctccaaatatgccccgtcttactaccatgtgatgccaaagcaaaattccactcttgttggtgataaaagatcagacccagagcagaatgaaaagctaaagacaccgagtactcctgtggcttgcagcactcctgctcagttgaagaggaaaattcgcaaaaagtcaaactggtacttaggcaccataaaaaagcgaaggaagatttcacaggcaaaggatgatagccagaatgccatagatcacaaaattgagagtgatacagaggaaactcaagacacaagtgtagatcataatgagaccggaaacccaggagagttttcggtggaagaaaaatgaaaaacagcaaaatgcctctgaaagcgaaactggaattgagaaataattcaaatacttgtaatatagagaatgagcttgaag

SEQ ID NO: 62760 - DNA, 721 bp, Homo Sapiens
  misc_feature (493)..(505): n is a, c, g, or t
  misc_feature (509)..(605): n is a, c, g, or t
ctcctcctctactgtacatgttcttgctttcccaaaattgtaagtttggtttttcctatgaacaagactgtaattgatttttctctccctgaggaaaaaagttcggaataaatgagacatggatatgaaactacttagcacaatgcctggtacatattaggccctcagcaaatgtggctaccgtgtcattatttcatggtgagactcaaggcaaaacaagattcttaatttatgctccgtaaatgctagaggcttgggcactacggtctgtcctgaaaaacaggactctgtgtctcattgcctctagaatccttaggtagcagtttctgttcactgtcttttcttttttaaaaatatctgctggacacaattacggccattacatgatgcaggtgattctacctattttttaaaaaagaacaaaatttcttttatattgtgacagtacattttaataaaggaaaattcttttcttccccctactccccctccnnnnnnnnnnnnncggnnnnnnnnnnnnnnnnnnnnnnnnnnnnnnnnnnnnnnnnnnnnnnnnnnnnnnnnnnnnnnnnnnnnnnnnnnnnnnnnnnnnnnnnnnnnnnnnngtgtgtgccaccatgtccggccaggaaaattattttctatcttaaagaaccatagttacttttcagaatgtcaattcagtaaaatctttctcagtgttaaccctggatgtcggcgg

SEQ ID NO: 62761 - DNA, 380 bp, Homo Sapiens
cgatctagaggatcccgggccgggctggggttggtccacattagaggcagagacgttaatgaaagacgatgagatctgtggaactagaaacccaactcctcataaaattttgcttgatacaagatttgagttgccttttgatatcccagaggaggaagccagatattggacctacaaatgggagcaaatcaatgccttgggagctgacaatgagtattctagtcaagaagaaagccagaggaagccattgcccactgctgccgcccagtgttcttttgaagaccctgatagtgccgtcgatgaccgagatagtgactatcgcagtgagaccagcaacagcttcccacctccttaccatacagcttcccagcccggcccgg

SEQ ID NO: 62762 - DNA, 310 bp, Homo Sapiens
ggagaagcagcaggccatgcacctgtgttttgagaacctgatggaaggcatcgagcgaaatcttcttacgaaaaacagagacaggttcacccagaacctgtcagcattccgtcgagaagtcaacgactcaatgaagaattccacttatggcgtgaatagcaatgacatgatgagctgacacctccttggactctacctgtacagagcagcgtccctttggtttggcccagaggggcgaacaattgcaagggaaagggcctggctgatcctggctcttttctccagggggggtaccgagctgaatgtcgac

SEQ ID NO: 62763 - DNA, 381 bp, Homo Sapiens
gatttcacacatcaatttttatttctgttttgaagagcacatgctatataataattgctagtagcaactgcagtaaaacaggtgataagttattttctctgaaaagatccagtcctagagcaggattcttcgatcattcatggcagagtgaaaaaggtttgtatggttcttgtccaaataactcagttcttaaaattcttaaaatgatcgtaaaccattatcctttaaaggtttatttgaagatgctgttaaagtacagaattttgtgtacaggtagatttttccgtccctcattaatagtgccttcttaattaatactgactggtgttagctataacaaaactccagtaaggccaaagaatcccaagttctttgtggaaa

SEQ ID NO: 62764 - DNA, 527 bp, Homo Sapiens
tgacagcggaactctgtctcaaaaaaaagatgtgcaattcttttctgcaaatgttctctaatagtataccttcttcagtctgtcgatatatgtatgctattattttacaagtaatacatgttgattgtattggaaattatagaaaagattatattggattgtttaggaaatatttttaaatgtgaacataaatataagaattactcccttgttccactttccccactctcaagtcagactatgttgttttcatagttagtagctagcagtctaccccactagattatatgcttcacagagggaagggaccctcaagacttcactggattgagtagcaccccataccttgccagctgattggtgcgtgatgggcatgctgtatgagaaacacatatgcatgacataatgtttttccataatgccttgccttcctcttgaagaggtgggtcgtaatgttgtagtcttacatgcttacgtagacgatcaaagcaagaatactcaataagtggctatagcacccgggtgcc

SEQ ID NO: 62765 - DNA, 410 bp, Homo Sapiens
acgcatcagagccttcgtgctttgattatcttgtatgttaacaattctagaaaacattcatgaattcacaaaaatacgttactatggcaggggaacattttgtacacatttaagtatataaaaatactaaaatatgtaattttataacaaagtcacgggtatctttaggttcagggaactagactaggtcattcgtgtaaatggactggtagttacagtcttaggttaaagtattctaatgaagtatgggaactaaattgctggttttctaagataagatatgggatatgggtcatataacttttatattttttatgaagttgattttgtcttgtgtgttatttttaattgtatcattgaagatgtattttaaaccaaaggaattaaattttatatgtctatttcgtaaa

SEQ ID NO: 62766 - DNA, 363 bp, Homo Sapiens
gacatgtgagctttccttgatgcagcccttggttccagagcggggtgagcctgagctggcggtcaaggggttaaattctccaagcccagggaaggaccccacgctcggggccccactcctgctggatgtccaggcggccttgggaggcccagccctgggcctgcctggggctttaaccatttatagcactcctgagagccggactgcctcctacttgggcccggaagccagtccctccccctaagaccccgcgcctctgaaggggcttggaaccagtccgccgctgcacatccttcttggcttcctggcgccccctatcgggggtgagcgaagcccccactactaaatggcctctctccacta

SEQ ID NO: 62767 - DNA, 393 bp, Homo Sapiens
gcacctccggatgcaattttgatgtccatcgtccaggagagagacggtctcgggtcacagggactggaggggcatgcccctgccgtgcagtcccatgcacgatggccccttaccctgctgccgtgggctttttggcctgaagcaaattcctgagtggggggtactggggcctgccgcatcctgtcctgttccactgcccacccccgtgtgctggctccctcacttctggctgcagtgggagccgccagtctgacccttgtcaccgcacgctctgcccccaccccgttgcaagaggtcacaccatgtcagcagccttgcactgaccgcagccggcccccaggcctcagagttctggatgcttccgtgcggctccaacaggcatcgtcttccctt

SEQ ID NO: 62768 - DNA, 850 bp, Homo Sapiens
tgctgggaatagagcttggctcaggcctctgcggggtggaggcccctgggcctgaggccgccagcagcgggcagtgagctgctcttcatccactgtgagtgctgcgggcgaagaaatcaccaccggtcattcttaccctcagctcaggaatgggggtgactcgcacaagacctcacggaaagggtgatgactagggaaaagagggtgcagggcacggctgctccccaccaccaggtctgcatttgtgcatcatcatcaggagcagaggtgaccagagggttcagagtgggaggcagggccagcccaggccaggagcgcctcatcttcccaggcctcagccacccagggtaaaaggtgccagggaagttgtgggcacctgagaggaggaacaggtgtggaggacctgagggtgctcaaaggcccaggctcagcctcaagcagtgttttcattgccaacacttactgtacccactccgcagagccccgctgggcctgggccccagggccacagctagcctgcatgtgtgtactgcactttacagtttgcaaagctcttccatacccactctctcaccgaagcctaattgaggctcttggaaggagtcaggcaaggattgtgcttcccccattatacaggtgacaaaactgagtcctggggaaagtgactggtccgtggtagagccgggacccaatcccctctctctcctccctgttggtgctgttcttcctgcccaacacctgtttctcttttcctcaaggggtttggggcaggagcctgggcacttactccccgtttttgctgtttctccttctgaccctgctcttgggtctaataaccccatttatttgt

SEQ ID NO: 62769 - DNA, 287 bp, Homo Sapiens
cctatccggcgaggagcggatgtgccagcggaggcagcgccttcccgaagcagtttatctttggacggttttctttaaaggaaaaaggaaccgacaggttgccagccccggcgccacacacgagacgccggagggagaagccccggcccggattcctctgcctgtgtgcgtccctcgcgggctgctggaggcgaggggagggagggggcgatggctcggcctgacccatccgcgccgccctcgctgttgctgctgctcctggcgcagctggtgggccgggcggccgc

SEQ ID NO: 62770 - DNA, 459 bp, Homo Sapiens
gcttaccaatgagtggtttttgagctatgagaaagtggatgggagtgggaggaggagagatgggtgaagacaaaagagttctttatgagcctcgatgttccctggtaaacttttaaaaaggccttctctcatgatctaagtcttggactggtggcatcatgtaactgctaaccttacagtaaaaacccaagaatgggtcaaaaatgtcttcccagtttctccaagctgcttctggaatgcaggtctgtcggctgggtgctctccagcagctgctcctgcctgattcaactgtagcctgtaatgggtaaaagccacatttaggaggtggtctgatcatagaacaccttaggaagaaagtccatgagactttctgactaggaaaccatgtggtttgaacttgaagaaaaatgtagacccatctgggttaattttcctacaatctgactcaactgccaggtg

SEQ ID NO: 62771 - DNA, 588 bp, Homo Sapiens
gaccaggcagacgagcgggggcaccgtgagcggacggcggcgcgtagtgaggacctggacatcgctgtgtggctggccacggtgcacctggagcagtatgcagacacgttccgacggcatggcctggctacagcaggtgcagcccggtgcctgtgccacgaggagttgaagcagttgggcatcagcgccacagtgcacgggaaacgcattctacgcctgctgcagacaggcaccgaaagagggctccctggatcccaaatcagatagtgccatggaaccatcccccagcccagccccgcaagcccaggccccttaagcccgtgccgaagcccaggaccgtgtttggtggactcagtggccctgccaccactcagagacctgggctgagcccagccctcggggggaccaggagtgtccaggagcccagagcccagcccaaggccccctcctctccccacttcctcctctgagcagtcttcagccctaaatactgtggagatgatgcctaattccatctacttcggcctggactcaagaggcagggcacaggcagctcaggacaaggccccagacagctcccaaatctct

SEQ ID NO: 62772 - DNA, 971 bp, Homo Sapiens
  misc_feature (869)..(869): n is a, c, g, or t
acagctgagaagtaagcaaccttttctgactgcatatggtgtattcctctttgagtccccataatattttataaattgtaatgccccatcttgtactacagttgtcttattcgtattgtttataaactttgagggttaggactgggtcttactcatctttatgtgccttccttatgcttcaaagaatttaccatctaatggaagagaacatttgcaagttggctccataccaagctccttccacatactctactcatctgaactttgaatgcagaatctttaaattgccaccccacatactaaggtcaagaaagaacttaatgggaattaatctccagccattagctttaccctgacatcaggattgccaaatccaatggactcttgtctattcttacgtgacttctgctggaaaatgcgaatgttgaccatcctgccacttggaactctcttcccactcctcacattgcttttgctaccactggaagttccttctgtttcttgtggagtaccttttgctgtctgggacttgtagataatggtgtttcctagggctccctccagggccctctgcctcactaactggatatacttttcctgagcaaatcccaggaaacttgcgtcagaccgtgacttcaaatacaggttgataaatgctaaactgtctccaaaccagacttcatcctagcctccacacccagacacccaactgctatgcgatcaactttttagaatatcctcacttcgaactgaccttacctaaaataatgactttttcccccaataattgcccctgctatattccttatttctgaatggtacctcctagctatatagattatctgaggagcttactgaaatgctgattnctgaagataaggggcatggctttaagattctgtatttctggcgagtacccactggtgctcatgctaacgatcgagacataggggatcctctaggtcgcctca

SEQ ID NO: 62773 - DNA, 653 bp, Homo Sapiens
gcccaaggtgtctgtcatcctgacagctggtaatgtgctgccacctccagctcctgcatcgagtctgtaaaccagagctgtttctcatgcctttcgtcacgatcccaggattcggaggtgatcccaggtccatccatacccaccccagggtaacgggtctggcctggcattagtcattatttagtttccagtccaaccatccagatagagattccctctttcctttgatcagtgctctcaagagctccgtgcctgtccaccatgacctagagtgcatcctgctcaattgtcagtgtagcccctcgcccctatattcatccaggatacttggaagtgctaaaataggaagggattcggctttctactttgctaccatcttccctgaagcaggaaaatgaacatggacttaaatgttctttgcaaaaaccaaagttttaacgatttgctgtgtgatgaagtgacagggagggccggagtcagcaggtgccagactttctgttctgtctgccatgggtttgtccagctcaggtagctctaggagcaccatcctgccctagcagagcccaggccttgccctcatgaagcatcattgaaatagcaggagcatgttgatttcttggttaggttgcattataataagaacgagaacatag

SEQ ID NO: 62774 - DNA, 870 bp, Homo Sapiens
  misc_feature (395)..(395): n is a, c, g, or t
  misc_feature (443)..(443): n is a, c, g, or t
cagcgccctctttgagaacgtgccccaggaggccctgggtgaggtggtggccagctgccccatgccaggcatggtgcccggctcacaggtgatcatcattgcgggccctggttacgacgctctcacggccgagggcattcacctcaacatggcagcaggcagcggtgtccccgtgcagtggactgggcgaggatggtgccctgtgccatgatggagggtgtggcagcctacacccagacatgagcccgagggtagccatgcctagcatccattggactgctcaccgcgagtatgcatggcatctgagaccaagaaacgagaaggatgtgacctgttgcattgctacacagtaaggcaggagacaggcaggagccatgttagctccctgtgagctnggcaacaacggttgccttgacgagctgctaagacgccctgtaagtgcnacgaaggggctgggaacttgtggggcagtggaagcttgggactgtggcagctgaacattgtcatgcctatcgtatctatcgaagattcccctcaatgtgagccttgatgaagaaggctgtgctggatgcaatgcgagtcgcggcggtgattggatcgtctgactgtgcctgctcaggagattgttccaatcgtgccctatacagagagtgctgctagccgatagtcctacctgtgtgccactcctagtcacgcttcgcatggaaaccatcggtcagatcccttgtgcgatcgcgcaatcggcatgacgacccatatagctgtgcccggtcaattccttgtgctgctgtgcaacagacagtttcctagttgtattccaaagccaaccctgcgagagggcacattgtattccatctcagttccagcgtg

SEQ ID NO: 62775 - DNA, 604 bp, Homo Sapiens
aggctggtcctggtcatgggtttaatggatcgagctggtgagcgctgtgcctgtgatgcctgggatgcctgagcgcgccggtgctggggtcggggccggagcggatgctggagagtggagcgcgccctggcccagccccgagtcccgccgccttccctccctgccgcagctgcgggcccaccggccgccgccccagccatggagcaagacaacagccccctgaaagatccagttcacggtcccgctgctggagcctgcaccttgatccccgaggcggcggagcagattcggagagcgcctgcccaccgcctgccaccctcgttgctgaccagttgaccagtcatccccagagatagatgaagaccggatccccaacccacatctcaagtccactttggcaatgtctccacggcaacggaagaagatgacaaggatcacacccacaatgaaagagctccagatgatggttgaacatcacctggggcaacagcagcaaggagaggaacctgagggggccgctgagagcacaggaacccaggagtcccgcccacctgggatcccagacacagaagtggagtcaaggctgggcacctctggggacagc

SEQ ID NO: 62776 - DNA, 647 bp, Homo Sapiens
tagggatctggactggaccagaagtttctagccggccagtgctacctccctttatctcctccttccggtctggcagcgaggaggctatttccagacacttccacccctctctggccacgtcacccccgcctttaattcataaaggtgcccggcgccggcttcccggacacgtcggcggcggagaggggcccacggcggcggcccggccagagactcggcgcccggagccagcgccccgcacccgcgccccagcgggcagaccccaacccagcatgagcgccgccacccactcgcccatgatgcaggtggcgtccggcaacggtgaccgcgaccctttgccccccggatgggagatcaagatcgacccgcagaccggctggcccttcttcgtggaccacaacagccgcaccactacgtggaacgacccgcgcgtgccctctgagggccccaaggagactccatcctctgccaatggcccttcccgggagggctctaggctgccgcctgctagggaaggccaccctgtgtacccccagctccgaccaggctacattcccattcctgtgctccatgaaggcgctgagaaccggcaggtgcaccctttccatgtctatccccagcctgggatgcagcgattccgaactgag

SEQ ID NO: 62777 - DNA, 416 bp, Homo Sapiens
tcatttgaactgataagcactttttgtgtcaatataaaatatactaaaactgatgaaatgctaagacatgtcttgtgaaggaaggtttcttggagaccacttttatttactcatgagaagtggaagctcctagtatcagaagaagctgatacatagtgtcatgtgctcagtggttgccaaagtctaccaactttggggagctgcaggggttctttttgggaggtgggaggaagggagatgagttttgttattttggggttttcaagcattggaaccaaaggccaaataataaacagcctttagtttttaaagtaaaattcattttatttgcagagtacacttgtatggtagactgttaaagacaattttatgactatttatgcacattataatggttacatctgctttttgtcttt

SEQ ID NO: 62778 - DNA, 460 bp, Homo Sapiens
gttctcatcccttcccagtcctctctccggccatgtcaacagtgagaggtgggtcgtttccatcccctttggggggctgcggattcacccctgtgggaaatggcacctcatcatggtaggggctcttgttccctttcagctcccgattctcctgaaggggacgtccgatgatgatgtcccgtgtccgggctacctgtttgaagagattgctagccgcagaaatctcccacgagtctccgggcagcagccagtgcctgctggagtacctcctgagccgcctgcacagcagctccggccacgggaagctcaaggtgctgaagatcctgctctatctgtgcagccacggctcctccttcttcctgctcatcctcaaacgcaactctgccttcatccaggaagctgcagcttttgcagggcccccagatcctctgcacgggaacagcttgtaccagaaggttcg

SEQ ID NO: 62779 - DNA, 490 bp, Homo Sapiens
  misc_feature (461)..(461): n is a, c, g, or t
gttctaggtaactactcttaggtgagaccccagatgaggcctccagtcacctctggtaacgtcccccaggcaaagctctgaggtcgcccctgcaggtaaccctctatttaagactccagtaactactctcatgtaagtaacccaggtagatcccttaggtagaggtcccccatcaccttccaggtaactcccaaggtaaggacccaggataacaccccctctaggtaaaggttccaaggcatgccccaagagcacctcctcctcacccttctggggacattcctgtagcaaccagaggaccggacacatacagtccgcctggcaatgggcaatggactacgggctgatgtgtgggagaccttccagcagcgcttcggtcctattcggatctgggaagtctactgctccacagaaggcaacatgggcttagtcaactatgtggggcgctgcggggcccctgngcaagatgagcctgctcctccgagtagtg

SEQ ID NO: 62780 - DNA, 485 bp, Homo Sapiens
tctagcggatccttctgggtgcatgcatgtggaaacacaacatgcgcattgagtatgtggctatggcatcctggcccctggagcctgagggccctcgagtaacacgggtggaagtgacgatggaaggcggctacgacattttgcatgatgtgtcctgtgcactaaggcagcccattcgttcattgtatcgtacccatgttatccggcgtttctggaacacgctgcagagcatcaaccagacagaccagatgcttgcccaccttcagtccttctcctcagtgcctgagcatttcacgcttcctgacagcaccaagagcggagtgccactcttctacatccctccaggctccaccaccccggtgctctccctccagcccagtggttctgactcatcccatgcccagtttgctgcctactggaagccagtgctgtccatggatgcaaattcctggcagcgatggctgcacatgcatgcacccaggggc

SEQ ID NO: 62781 - DNA, 429 bp, Homo Sapiens
gacgaaaaaaaccctccaattttcccaaatgcaatcagtgtaactaggggctgtgtttctgcattaaaataaatgtttcaggctttgtggtcctgatcaaggtcctcattaaaaaattggagttcaccctaggtgcttttcccctctgtgactggcagataacacatacttttgaaagtaactttgggatttttttcttaggtgcagctcgattctaatcttttcatgctgcacacgattcctttaatgtagcatccttatctgaaagaaataaccatcttctcaacatgacctgcttaacccaaataagaacagtgatcttataacctcattgtttcctaatcattttatttcatctcctgctagtactgtgccgcttccccctccccccacacaaaataaaaacagtatctgccttctggctcattt

SEQ ID NO: 62782 - DNA, 857 bp, Homo Sapiens
agcaggctggtaccggtcgcgagtggtatggatcatcctctgagtttgagattgtcaaggccataaaagaaagagcctgttacctatccataaacccccaaaaggatgagacgctagagacagagaaagctcagtactacctgcctgatggcagcaccattgagattggtccttcccgattccgggcccctgagttgctcttcaggccagatttgattggagaggagagtgaaggcatccacgaggtcctggtgttcgccattcagaagtcagacatggacctgcggcgcacgcttttctctaacattgtcctctcaggaggctctaccctgttcaaaggttttggtgacaggctcctgagtgaagtgaagaaactagctccaaaagatgtgaagatcaggatatctgcacctcaggagagactgtattccacgtggattgggggctccatccttgcctccctggacacctttaagaagatgtgggtctcctaaaaggaatatgaggaagacggtgcccgatccatccacagtataaccttctaatgtcgggacatcatcttcacctctctgctgaagttaactcctactttaatactcgctttcttgagtcggagtgtttgcgaggaactgcctgtgtgtgagtgcgtgtgtggatatgagtgtgtgcgcacatgcgagtgccgtgtggccctgggaccctgggcccagaaaggacgatgaactacccgcagtggtgatggcctgaggcctggggttgaccactaactggctcctgacagggaagagcgctggcagaggctgtgctccctcctcaggtggcctctggctggctgtgggggactccgtttactagca

SEQ ID NO: 62783 - DNA, 501 bp, Homo Sapiens
cagtctacccactactatcatgcttgggaaacaagcgtcagcttgtacatatgacaagagaggaccctgaatacaccctctcttcatcagcccaagccttactgaggtgggatgaagacctcattctctgttctttaaaacatgtttcgtgaactaatattggtccatgtattttttgtccttttgggactctaagtgggtcaagaagcaaaaacatccatgtgttgtttggggggaattggcaccattttttcctgactatgtttccattaacttaaagaataaatgatgaagaaattctccttgtagcacaactgtatgctgtgtaaattggtgtgagctcaaagcccagtcatgtgttttacctgtgggtgactctgttgtagaatggtcatattactgcatatgttatcatgacaacttgtgagtttgagtttatatttctcaaagaacaagttacccgtatatgcaacattgcgccattaaaagcttatttctctg

SEQ ID NO: 62784 - DNA, 310 bp, Homo Sapiens
ccgtcaccaacttggattcaacaaggcagtatctcctggtggactgcgctttttaaccatgctcacggacatcgcaacacagttagcgatttccagggaaacacagaatggctactatgtcaaatcctacaagctggaagtcagctctaatggagaggactggatggtgtaccggcatggcaaaaaccacaaggtatttcaagcctacaacgatgcaactgaggtggttctgaacaagctccacgctccactgctgacaaggtttgttagaatccgcccttatacctggcactcagccattgcactccgg

SEQ ID NO: 62785 - DNA, 554 bp, Homo Sapiens
  misc_feature (469)..(469): n is a, c, g, or t
  misc_feature (513)..(513): n is a, c, g, or t
  misc_feature (533)..(533): n is a, c, g, or t
agcggccgctgctggacgagctgcacggcttcctgcagccgcagcgctcccaccacttccacaacgccatctacgtgctcctcagtggcgcgggtggcgccgaggtcacgcgcttcgtgctgcagaacgcgtcccgcgcgctgcccctgcgccccgacggcttccgcagtgccgaggccgcagcggcgcaggcggaagaagacctgcgcgccagcctgctggctgtgctgtcccgggagcatccgctgtggcaggccgcggccatcgtgccgtttctgctgctggacaagcgggatgtggtcagctgcttccgggacgagatggcgggtgagggcttctttcctgaccaggcccgcgcggagaacctggccgcgcagctcagcttctaccgcgtggctggccgcgagtttgccgtcaccggctgcaagcaggtggtggccacggtgaacctcctgtagtggaggcgcangacgggacgtttgggttgatggcggcagtaggagggcgaccagngaccttgtgggctggtgcangcccctgaggtttctagtgaa

SEQ ID NO: 62786 - DNA, 209 bp, Homo Sapiens
gcacaacagaatcaaggagaggtccctgaaccccaagatatgaaagtggctgaggttctcttatgatgctgcagatgcaaatgccattgaggaagtaaaccttgcttatgagaacgtcaaggaagtggatggactggatgtttccaaagagggcacggaagcctgggaggctgctatgaagaggtacgatgagaggtccaatcttccgg

SEQ ID NO: 62787 - DNA, 400 bp, Homo Sapiens
ctggatcttggaacattttccgtattttgcaaatgcacctactgggtggaaaaactcagtgagacacaatttatcattgaataagtgttttaagaaagtggacaaagagaggagtcagagtattgggaaagggtcgttgtggtgcatagacccagagtatagacaaaatctaattcaggctttgaaaaagacaccttatcacccacacccacacgtgttcaatacacctcccacctgtcctcaggcatatcaaagcacatcaggtccacccatctggccgggcagtaccttcttcaagagaaatggagcccttctccaagttcctgacattgatgctgccagtgccatgatgcttttgaatactccccctgagatacaagcagttcctccaggagtgatc

SEQ ID NO: 62788 - DNA, 560 bp, Homo Sapiens
gacgacagaagggccttgcagtgcatgcccaggtggcggggtgtatcagcttcagcgaggtgtccagcttcatgcctatcctgaaggctgtcctcatcatcgctcataagctgctggtctaaaccaggcagcctctcttgctaggaggccacttctgctgttacataactcctccctgcagaagagggggacttctgcaacagattctgtttctttttcccgactcttttccttgctgccaggtatgtgatgctgtaggcttggctccaaaaccagctgagtgcctgctttttactccttttatgtctggccttctaggatctggtccaagacactctcagggcctgggaggcagggcatagaaatcagttcttcactctccctaatactacactctgtaaggacctggggcaggatatcttctccccccaggggatcttctatttaagtggcttttgagagggtgaacaggattgttacttttaagcctacctctgctgtgaccatcatgtggtctttgttctccttctgtcgtcttctcggatcctctagatcacccg

SEQ ID NO: 62789 - DNA, 229 bp, Homo Sapiens
accgtggttaatgcgtgactggttcaatgtcgaactatataaatatggaaattccttcttccagcattataaatcagtacattgcttgtcaagggccattaccacacacttgtacagatttttggcagatgacttggggaacaaggctcctctatggttgtaatgttgaccacacaagttggacgtgcagagttgaatgtcaccatattgccagaccagtcagcaagcg

SEQ ID NO: 62790 - DNA, 517 bp, Homo Sapiens
actccctcccgcctcccgggtctcctggcggcggcggagtgaggctgacagcggggaacctgggagacccctccgccctccccgcggtggcagcggccgatccccggctccggcgcgagggacggccgcgatgcgctcggcctgaggttacccggcccggcccttcctcgcttccctcgactattccactgcgtctccgcgccccggcgtcatcctgcgagtccctctgacgggagggaagatggctgcacggagctggcaggacgagctggcccagcaggccgaggagggctcggcccggctgcgggaaatgctctcggtcggcctaggctttctgcgcaccgagctgggcctcgacctgtggctggagccgaaacggtaccccggctgggtgatcctggtgggcactggcgcgctcgggctgctgctgctgtttctgctgggctacggctgggccgcggcttgcgccggcgcccgcaaaaagcggaggagcccgccccgcaagcgggaggaggcg

SEQ ID NO: 62791 - DNA, 747 bp, Homo Sapiens
ccttcccaccctcgcctctgctgtctccagcctcgcttctccgactttcctgctcctctgctgccttcgtttctggtcctcggccgtcctcgccgcccgcccagaggagtccccgcgcccgccaagaagccgctttccgctggcccgcagccgccgcgacttcggcacagtttctccctctggctagtctcccaaacggccgctcctcgcccgcgggaagaccaggctgcgaccgcgaacgcccgatcctctccaggagccgcagcgagcgcccggcggccacgccccgcgaccacaccccggcggctctcggcccagcgcgcctgccttcgccgcccgccgtcgctcctcgcccgctgcacgacgacgcgacgcccctgctgcaggcggcggacccgaccggacccagacccagacgcaagatggcgacggccgcgtgactgcctcagcgtccccgagctcggctccgagtgcacctacggactgactgtgggggcagagaatggcgagatcaggactctgtctttgttaatcgtgactgcatgaaggtcgcctccctcgggcctacttggtgggagtgtctggtattgttctaaggccaggagcacggtgagccacagtctggttgtagaatttggcgtcttgatagttgagaacatggcgatgacactgttggaagactggtgccggggggatgatgtgaactcccagagagctctggttagtctgggcatcccagtgaactgt

SEQ ID NO: 62792 - DNA, 791 bp, Homo Sapiens
  misc_feature (713)..(725): n is a, c, g, or t
caacatcccacctgatgggttcaagcagatccgacagggaatgatcacattaatcttgtgccactgacatggcaagacatgcagaaattatggattctttcaaagagaaaatggagaattttgactacagcaacgaggagcacatgaccctgctgtaagatgattttgataaaatgctgtgatatctctaacgaggtccgtccaatggaagtcgcagagccttgggtggactgtttattagaggaatattttatgcagagcgaccgtgagaagtcagaaggccttcctgtggcaccgttcatggaccgagacaaagtgaccaaggccacagcccagattgggttcatcaagtttgtcctgatcccaatgtttgaaacagtgaccaagctcttccccatggttgaggagatcatgctgcagccactttgggaatcccgagatcgctacgaggagctgaagcggatagatgacgccatgaaagagttacagaagaagactgacagcttgacgtctggggccaccgagaagtccagagagagaagcagagatgtgaaaaacagtgaaggagactgtgcctgaggaaagcggggggcgtggctgcagttctggacgggctggccgagtgcgcgggatccttgtgcagggaagagctgccctgggcacctggcaccacaagaccatgttttctaagaaccattttgttcactgatacnnnnnnnnnnnnnggaattcatgatgctgtacagaattttatttttaaactgtcttttaaataatatattcttatacgg

SEQ ID NO: 62793 - DNA, 497 bp, Homo Sapiens
  misc_feature (360)..(383): n is a, c, g, or t
tgcttcatgtttcagtaaacaaaaggagtttgtgaccaactatgttttctttcttaattcttctaagttgacttttctttcctcctgaaactagtctctgtagcctttcactctgttccttatattctcagcctctgagcagccctaggtaaggattatgctggcatcccctttttcctgtgcagtggaacccctcttatcttgctttccctaggagttgaatccttctccctgcctacctgcagcatctcctttccctttaaaatgaccatgtagtggcaagcagccttttactcttctgttagctctggactcttaacacttaagttactcttctgaaattgctaggaccattggggnnnnnnnnnnnnnnnnnnnnnnnnatgtccgacctgtgatcgtggtacagcattagctgaaatttacccttgttttactccactcctcccttttttaaaaaaattttttgacaaataaatgtttctaacacttaaaaa

SEQ ID NO: 62794 - DNA, 547 bp, Homo Sapiens
tcggaccgcatggacatctgcctcgcggcagcgatggagcccggcagccgtggtccaggctgggggcgggcggacacagccatgcgacggagcccgatgcgggaggccgggtggagacctggtgcagcgtgcggcccaccagtcatcctcagggacaccgccatccgctcggacggcccccatcccggccgtcgccttgactctgcgctctctgagtctcccaagacggctttgctgctggccctcagtcgaccccggcccccccatcacgcgctcccagagctatctgaccttttggggaggagaaagcagcagcggaagaaggagaagtcggggtcccctggggagaagggtgccctgcagcgctccaagacgctgatgaacctcttcttcaagggaggccgacaggggaggctagcgcgggacgggcgcagagagccctgggcactggacagcgggagcctggccaaaaacttaccctcgcctggacatagagaaagcagggggcatggcccggtacagaagtttgtcacctgggagccatcac

SEQ ID NO: 62795 - DNA, 250 bp, Homo Sapiens
ctctgcattcttccctggaggccaggtgaggggtccaactgacaggaaaacaagggatctgctggagcccacagaagggagcatttccaccccgcgctcagggcagacatgagaaaggaaggcccaaatgaaggtttggggcgttagatgagacaggcagggactagggcggaggggacctggagaagaagggaggctttctggggctagtcccccaagtcagtccagagagggcgagcaggaccgacca

SEQ ID NO: 62796 - DNA, 666 bp, Homo Sapiens
caaaagtgtagtgcttgtcgaggtcgaggtgtgcgcatcatgatcagacagctggctccagggatggtacaacagatgcagtctgtgtgctctgattgtaatggagaaggagaggtaattaatgaaaaagacctctgtaaaaattgtgaagggaagaaggtgattaaagaagtcaagattcttgaagtccacgtagacaaaggcatgaaacatggacagagaattacattcactggggaagcagaccaggccccaggagtggaacccggagacattgttcttttgctacaggagaaagaacatgaggtatttcagagagatgggaatgatttgcacatgacatataaaataggacttgttgaagctctatgtggatttcagttcacatttaagcaccttgatggacgtcagattgtggtgaaatacccccctggcaaagtaattgaaccagggtgtgttcgtgtagttcgaggtgaagggatgccgcagtatcgtaatccctttgaaaaaggtgatctttacataaagtttgatgtgcagtttcctgaaaacaactggatcaacccagacaagctttctgaaccagaagaagaggagaggacatgatgcatccactcaaagtatctttagaagatctgtataatggcaagacggctccgacttcca

SEQ ID NO: 62797 - DNA, 434 bp, Homo Sapiens
gagaggttatatagggactatattatccaacacatattttcttattttgccacaaatttccacttaacaaataaaaaaaggcgaatgctgttttgcaatcagaaagtgaatttcttttgtggtagcgtacacgtggttcatgtggttctccacgtttaagcacgaaccacagcacaggaagccacaccccctccagcatctctgtcttgtggggtctttgaggagaaggaatcagaacatcgacacctgggaagagggaggcggggaacaccagctggactctggccaaggagtgatgtaagcaggtgacacttggctgtcagctgagcttctcaggtgcttctgacattgccagccccttgagatgagccaccgcaggtgtgctcaccttggctacatgttgaaatcatccagaggagttgggaaatctactg

SEQ ID NO: 62798 - DNA, 383 bp, Homo Sapiens
gtggggcatggccaacagagcttcactccttacccaggagtgctggcttatagagttagaagtcagtatttcttctaatctgaggctatgatcagtcccagctgtaggggcccagaggggaggtgaacatgcctgatttttgtgggacaactctagcccacaaactgactggctggtgagtcttgactcccttccaacacagatgcccaggcacctccagatcattcacttcgcacgtgggccttgtgaagggatttgtgaatatccaggaagaacttagaggaccccatctgagttcggatggtcaggaaacaatctgggcaaaaaagaggcaggcatttcaaaggaaggggcaaggaagactggcaaacagatggcaaggc

SEQ ID NO: 62799 - DNA, 592 bp, Homo Sapiens
caagtggaagaacttgtttgcttgaaagtatctcagacccaaggcacctcaggtctctttgctgtgcctccactatattgtcgtgtgggtgtgtgtctgcacccacatcctcacacattgatctagatctgcctttatccactcgaattataaacagctcggcttgtccttgtcccatgtgtttgtagacacacatgcatactgtccaaagattagggttggtggtggcagtgcagcaggggagggacaaacaaccaagctatgggtgacagaggctctctcctggtgcctgcacctgcactctagtgaccctgggtgccgccagacccttctcttctacaaagaccccagcaggagtgggagggtctgcaatggcatcgccctgtcctgccttggccagaagcctggagctttggtttgaggaggtagagatatgtgtatccataggaagagatctgtcagaacaggcagctgttgagctcggggtgtcttcctcaaggcatgtggctcagcagcaagaaaggcaagttgctcctgctggggccctggactctgccttagctcccacctctcagccttgttattgggtttc

SEQ ID NO: 62800 - DNA, 708 bp, Homo Sapiens
gtacagaagaggaagctgacattgtcttttaatccaaacagcaatcctgggtggctctggcggaatgaggtatttaatcacctcaccggtgatccttgttgggtctttcttgttgagtaaatacttggcagccttagtcattagcttgaaaggcagagggaaaagtaaaccttcatgagtgagtacccagctgaggtgtttgtttaggctaatcccaaatgccctttagggcctaactcagtgctgcccctcccctacttcactgtgaagctgcagctgtggagccaacattttatcttatttattctctatgtgcaggttcccaaacataattattggatgaatgaatgaacaagaagatgactatggaggatacttgggatctggctagcaacaagtatatttcccattgttagaggtagttggggtcagaaattagatcagtgcttctcagcatttctctgttcaatgcatactttttggtggcacccataaagaaatcaaaaggggaatatccctttttagcaagaagtatttagaaaatctaaaagaactcttcctcctattcattgggtcacttttcagccctgcatcactgtttacagaaaagtgttaacatcttggactcgtgaagcaatgttttcacacattctaggtatgttgacctaatatgaaaccactccttcttgctctgattagcaacaagtg

SEQ ID NO: 62801 - DNA, 1386 bp, Homo Sapiens
  misc_feature (136)..(148): n is a, c, g, or t
ggggaatgaccacaggcgattggttttagtggtaggtgtgtggggatctgttctggtcatctggatgctggtcatcggtgtgcagtattgatcaggacctgcaaacccaaaagcttatgggagctggcacgtcacnnnnnnnnnnnnnccaagcccatcatcttcgtttcggacagagcaaacagcaacaaggagctgggtgtggaccaggagtcagaggagggcaaaggcaaaacaagccctgataagcaaaagcagtccccacagccacagcctggcagttctgatcaggaaagtgaggaacagcaacaattccggaacattttcaagcagatagcaggagatgacatggagatctgtgcagatgagctcaagaaggtccttaacacagtcgtgaacaaacacaaggacctgaagacacacgggttcacactggagtcctgccgtagcatgattgcgctcatggatacagatggctctggaaagctcaacctgcaggagttccaccacctctggaacaagattaaggcctggcagaaaattttcaaacactatgacacagaccagtccggcaccatcaacagctacgagatgcgaaatgcagtcaacgacgcaggattccacctcaacaaccagctctatgacatcattaccatgcggtacgcagacgaacacatgaacatcgactttgacagtttcatcttctgcttcgttaggctggagggcatgttcagagcttttcctgatttgacaggatggagatggcatctcaagctcggggtctggaagggtcgtcacggctcgcatctaataggcgacagccgacagaggcctcgcccgcacaacacgacatacacgatcacgatggtcccgtgtcctgcgtggaggggtcggcctctccttcgttctgcccctcgcacccccgggcgcgggggaccacaggcgggaacaggggtgtgaccacctaaacacgggggacacaacaaaatacatggggggggcggcccacccgcgcgcgccccctacccacacccgccgccaccccagctgctcgaagagccgggggcgctccggcgcgatcaaatggggttaaacaaaacagaaaggaacaggcattcaatgggcggggagggcggggacaagagcagacgacacgtgggataggtagtcagggtgtcatggtgttgtgcttgctcctgtataaaattaactaaaggggagaaacacacacatggtggtgggaatatacaccggtgtgagcgcctgagagtgtgcagacccggggggtggatgcggggggtgtgggaccgggtgaacaacctacaccatacacgagacgtttgtgacagtacaacacacgagcagcagacccaagggagacgagcg

SEQ ID NO: 62802 - DNA, 1389 bp, Homo Sapiens
  misc_feature (78)..(78): n is a, c, g, or t
  misc_feature (89)..(89): n is a, c, g, or t
cggccttgtctcggcattccgggctcgaaggctgtgcggtctgccaggagctgcggccccgtccggccccgggctggncatgggttggnaattggagcctatcccccaacccgaaggctaacagcatcatgtggttactaactgttcctcattcaccggttgatgcctcccagaaaaaaacgccgccagccttcccagaaagccccgctgctgttccaccaacaaccactggagggccccaaacacagctgtgcatctacacagcttcccatcactcacactcgacaggtgcccagcaagcccattgaccacagcaccatcacttcctgggtatcacctgattttgatacagcagcaggaagcttgttcccagcctaccagaaacaccaaaaccgggcgagacactcaagtcgaaaacctaccacctccaagtttccacatctaacttttgagagtccgcaatcttccagttcagagacattggggatccccttaatccgagagtgccccagtgaatcagaaaaggatgtttccagaagacccttagttccagtgctcagtccccaaagctgtgggaacatgtcagtgcaggcacttcagagcttaccttatgtgttcattccacctgatatccagaccccagagtcatcgtctgtgaaggaagaactcattccccaagatcagaaggaaaacagccttctaagctgcactcttcacactggcactcctaatagcccagagcctggacctgttctggttaaagacacccccgaggacaagtatggaataaaggtcacatggaggagacgacagcacctggtttgcttacctcagggagagaggggaagctgaagcagaagcccatttccttggtgaaaagctgactgccatcagtaattctccatagaaaagagatctgtttttctggagtcataaaggaattccattcctaggggctttggctttggctttgagatgcaatattgctccggttgcccaagcctggagtggaaggggcattatctccccttacgtggaaccaccactttcctggggtcaaggggatttctccctgggtccgcctccccccagtaggctggggatttacagggcacccagccccccctgggcgggggtacatttgttttttggaagtcttcaagaggaagatgggggggtgcctcccctggggcggccgaggctgggggcctccaaaatccctgaccctccaaggcgcttgtggtggggccctgtgaccttcacaagaggggggctggggccacaccccgaaaatttggttttcggcacaaatcacttttgggtgtgccctaaaaagggctccagcgtttaagggcggcagtgggaaacatttgtgacctttcctatagt

SEQ ID NO: 62803 - DNA, 622 bp, Homo Sapiens
gtggaatgagtgtgcatggaggccctcctgtgctgggggaatgagcccagagaacagcgaagtagtttgctccctgtgtccacctgtgggtgtagccaggtatggctctgcacccctctgccctcattactgggccttagtgggccagggctgccctgagaagctgctccaggcctgcagcaggagtggtgcagacagaagtctcctcaatttttgtctcagaagtgaaaatcttggagaccctgcaaacagaacagggtcatgtttgcaggggtgacggccctcatctatgaggaaaggttttggatcttgaatgtggtctcaggatatccttatcagagctaagggtgggtgctcagaataaggcaggcattgaggaagagtcttggtttctctctacagtgccaactcctcacacaccctgaggtcagggagtgctggctcacagtacagcatgtgccttaatgcttcatatgaggaggatgtccctgggccagggtctgtgtgaatgtgggcactggcccaggttcataccttatttgctaatcaaagccagggtctctccctcaggtgttttttatgaagtgcgtgaatgtatgtaatgtgtggtggcctcagctga

SEQ ID NO: 62804 - DNA, 379 bp, Homo Sapiens
agcaccctttttgatgccaccacaggggcatatcaccggccagtgacttcgttcattatcacaggatttgattcctttgaaactcaagagaccagggaaagtgacaggaaggaaagggctctttgctgctgtgcttattacaaagaagactgtttgtccagcgtgtatttcaggatatctggatcccttttattgactcacaatttgtggcaccactttctcatcccagaacttcattcttatttctctcctcatctggcctcccaagtgctccgttgagctgatgaaaagttctttgtactccctcaacgtgtcggaaacaggaggccacacagcacagctttgtttggggtgggcaggagtcaggagtcttgagcag

SEQ ID NO: 62805 - DNA, 347 bp, Homo Sapiens
tacagatcttttctgatgctgagctgcttgttaagccattgtggttgtctccaaagagatcaaggaccatggggtggtgggggttccgttcatcaataaggaccaggggtgtttggttccagagcagcaacttcagcatcagtaatgccccactcggcgcaccactccatcagcaataatgctccactccattggcactaacgccccaactccagcggcactaatgacccgctcctttgacattggtgccccactccatcagcactaacgccctgctccatcggcactggtgtcccactccattgtcactaacaccccactccatcggccccgctccatcggcacta

SEQ ID NO: 62806 - DNA, 485 bp, Homo Sapiens
tattccagcctcggcaacacagcaggactgtgattttctttggagactcctagattttctgtggttttgaactgaatttgttggatgttggcaagtgcctcttatgagctgtttctttatcctgcatttgccccacaaagacttatctggaggtgagcaaagtatgtttggtagtgaggtcacaaaggcaatcagccccttcctccccactcccattgccatcttctcagtccttctccctttctttccaagtagtttacccacccctcctctttcctcccctgtccctaaaataatccacgtgtcttcctaaaatctctctttgatcctgtcctttgataacaccgtcagtgcctactactgggtctagacagacctctgttgagcagtcagagtcttccctgactccacaatgcccctttccttggctgaccagtatgactactggtccccacctttcccttgcctatccctacctccctcct

SEQ ID NO: 62807 - DNA, 228 bp, Homo Sapiens
catcccacccagaagaccttttcatcaatagatcgcccttaaagacccattgtaaggtcataaaaaacctcggccaactgcacaaagatggtgcctcactgcaacaagaaaccttaaggtgtcttaccgacgaaataaaaaacataaatgattgttctccaaggcctgagggcaagactcatgatgggcaagtcaaccccaatctggaacaatgtccctcctcttaga

SEQ ID NO: 62808 - DNA, 788 bp, Homo Sapiens
gggagttgtttctgtaacagcagaaagtgcactcactaggagtagtcagaattcaaaatgctcaagagaaagccatccaatgtttcagagaaggagaaacatcaaaaaccaaagcgaagcagcagttttgggaatttcgatcgttttcggaataattctttatcaaaaccagatgattcaactgaggcacatgaaggagatcccacaaatggaagtggagaacaaagtaaaacttcaaataatggaggcggtttgggtaaaaaaatgagagctatttcatggacaatgaagaaaaaagtgggtaaaaagtacatcaaagccctttctgaggaaaaggatgaggaagatggagagaatgcccacccatatagaaacagtgaccctgtgattgggacccacacagagaaggtgtccctcaaagccagtgactccatggatagtctctacagtggacagagctcatcaagtggcataacaagctgttcagatggtacaagtaaccgggacagctttcgactggatgacgatggcccctattcaggaccattctgtggccgtgccagagtgcatacggatttcacgccaagtccctatgacactgactccctcaaaatccagaaaggagacatcatagacattatttgcaaaacaccaatgggggatgtggacaggaaatgttgaacaattaaagtggggaaacttcaaattcattttatgtgggatgccatcctccaaaaaagggaaacagcccccccagaaaataagggccaaaccgaaagggagtaccc

SEQ ID NO: 62809 - DNA, 726 bp, Homo Sapiens
ggcatcattgactttcaaatgacttttagaagtgataactcttaatttcctaatagatactagattgtattgaattctgttttaattattctctaggtaagtatgttttaggattaaataccttttacagatactgaaagtgcctccttttgtggtgtaaaaaacaaattatggtgcaaaaagtaatcactagattgaaatacatggaggttttttgctttttgacatacgaaaatgtcaagagaaaggccaaagatttgtactttttcacttacaaagcactcctttttcccttaaacttctttctgtcaagttagatttaatgagagagtactatttttaaggagctatctgtttatgtagaatgattttgttaagagtaatgtaaactattattgagtagaggcctaaagaggactgtgcatttttgctatttaaaggaatcacaaatgatcatacttaagtgagcaaaaatgacaagttttactagctaagtagagaaataaatctcagatgcagcgctacaattttcattatcttaagcacattgtacatttctacagaacctgtgattattctcgcatgataaggatgggacttgcatatggtgaattactactgttgacagtttccgcaaaaatcctatttcaggggaccaacattgtggccatggcagccaatgccaacaattttggggaataccagccaaacctacaaggagaccct

SEQ ID NO: 62810 - DNA, 3071 bp, Homo Sapiens
  misc_feature (2100)..(2123): n is a, c, g, or t
  misc_feature (2174)..(2182): n is a, c, g, or t
  misc_feature (2441)..(2441): n is a, c, g, or t
  misc_feature (2477)..(2477): n is a, c, g, or t
  misc_feature (2506)..(2506): n is a, c, g, or t
  misc_feature (2535)..(2535): n is a, c, g, or t
  misc_feature (2593)..(2593): n is a, c, g, or t
  misc_feature (2612)..(2613): n is a, c, g, or t
  misc_feature (2635)..(2635): n is a, c, g, or t
  misc_feature (2721)..(2721): n is a, c, g, or t
  misc_feature (2729)..(2729): n is a, c, g, or t
  misc_feature (2767)..(2767): n is a, c, g, or t
  misc_feature (2839)..(2839): n is a, c, g, or t
  misc_feature (2851)..(2851): n is a, c, g, or t
  misc_feature (2857)..(2857): n is a, c, g, or t
  misc_feature (2870)..(2888): n is a, c, g, or t
  misc_feature (2893)..(2895): n is a, c, g, or t
  misc_feature (2949)..(2949): n is a, c, g, or t
  misc_feature (2974)..(2975): n is a, c, g, or t
ggaattaggtggatttttggctgtcatttcaaaagtggaataaatttattaatttagtagtactaaatggtatccttagattaaaattttgtgcttgataacagctgttttttctacattagaaataagatgccacacaaggaactacattccagatttaaagaaatgaaaggataccattagtgtgtataacagattattgttcatacttgtaaagcatcttatgtcattgagaatataaagaacagtgccttagaagacagtgaaaggtaagctctagcttaatgtctatgatttgttctttgacattaaggaaggtaaggattggtcagaggatgtaacttgatgtgagcagtagtaaacctgttttagatatcatactgttaatattttattgaaaatttatttcagagcggagaaacttaagctaaagtctgttatacagaattgaaagccttcgtatcttgaacctcccaacatttttcttatggctgttgaaaagtatagagctaaattgatttaattacactttcctttgtactttaaaaaaaagtatgctagcactattgtaccttgaaaggatttccaccagactgtcttgagtagtgacttctttggtgaggcaagaaggatatacattattttagaatcatttactatttaatgagacaatcatattattttagaatcatttattttaaatgagacaatcattttaagttttaagataacagaagtgaccaatgtaatttcacaacacctaaggattttttggttgatcaggttactgtagatttttactgattgtcctggatgaatagactgtgctttttctttttctctcccttccttcttggtttcccatagtataataagcatgcatactttaacttctatagttttctcctttagagggtcgtcttcagttttagaggtttacttctcccttgcctttgactcattggactagtgcagaggctttaagtagtttaaaatgggcttttgcttttctaggtcattaacgttttttatttagtttctttagccaatagtggctgagtttcgcacttgattttcaatattttatagtaagaaatgacaaactgctttgtttcatttcataaacaaactctgcatttagataactattaaaggttgttaagatgaagatttactgtttctttgttactcgttggtacagctgtttgttttacttgcacatttgtacatatacttaatgttttcaagtgccttaattgtttaaaatctctggcttcaaagtttcttggggaaaggtcggtttacctcacatttttttgttcccattagtaatattctaggttcctcacaaaatgtattatggtgccatggctgttagtttttagtgagtgctgtaggattaattcgaaaataggcagaattccattcctcccaaggtggcaaaaattagctatactgatgtaattgtcatttacctgggtatgaattccctgacacacattcatgtcaacatatgtagcaaattttgtgaaaacataacaatttgaagcttctgtaattttgagcactgctctaacaacaagcataatataaaattagttagattttgcaagtctacaaatgagctcttgcaacagaactcacagcctttttacttttttcccctaactttagcaatgtagtatcttgagccattaatttttgggtttttttaaaatccagaaggtatatagaaaccttttcagatttttcatctgatttgttcttgcagatgttcttctatcaaataccttattttaccttacagatatttgttgcacaggcagatactgctgtatttagacatttctatttcagttcattaaaaactgcaaaaccaatctgtatcatgtaccaaactgacttaaaataaatctacatgtttattgcaaaaaaaccaccaaaacacaaagcaccaccacaaccccgaaagagcacgcaagaaaagaaaaacgagcaccatccattcccaccgcgaacccgccagaacacaaacgaacaatacaattagggccaacaccaccacacaaacgcgcaaaccacaaaataaccatcttggtnnnnnnnnnnnnnnnnnnnnnnnnaacaaaaaacttcaccataaaaaccctttttccttgtcgccgcaccctcgnnnnnnnnnatattgtgtgagacccgcacaagaagcggcgcctctctccgtctctcctcttcctcgcacaacagaggaaactcctcttcgccgcccccacacccaccaacacggcgcgccgcctcgaccgcgggacaccccccacccaccccactcacaaacataaacctcccgcgcccccgcccgcggggcgcccgagacgacacacacacacccaccccgtcgctgtgagtctttttttatctatgagaaaaccacacaaaacacnatcccaccgaccaccctagaggcgtcagggaggggntattcgtccttctccctggctatgcgganaccgcgcgccgtcgtaactccaacccacngcgcggcagcgggcccctgcctccccccctcacccaccaccacacagcgtcgacgcgngccggtcccccctccactnnccccctccctttctacgcgccnccgccctctactctcaaattccaaacgccggagactaattgctgagggcgtcccgcgcgcgcacgccgaggctgttttggtgtggngcgcgtgntgtggatgcatatgcagcgcgacgagaacacgggctgntccagtcgggggggaggaataaacagtaactacgtgatagatagagcgcagaactcaaccgcgcgcgccggncgcccctagatntgatgnatggaagccagannnnnnnnnnnnnnnnnnnaaccnnntcatgaggagggaggcagtcgacgcggatcgtacatcctacggtagcggtcagncccgccgcgcgggcgggtggtgttnntgttgatggtagattgtttgagtgatgtcgaccctgccggcggtgggaccgcgcgacacatcacttttcttcggcccccgccagagcggcacgaca

SEQ ID NO: 62811 - DNA, 478 bp, Homo Sapiens
agtgcggcatgcagcagcctccagcacaacctcttagttcatctcagcctaatctccgtgctcaagtgcctcctccattactctcccctcaggttccagtttcattgctgaagtatgcaccaaacaacggtggcctgaatccactctttggccctcaacaggtagccatgctgaaccagctatcccagctaaaccagctttctcagatctcccagttacagcgattgttagcgcagcagcaaagggcgcagagtcagagaagcgtgccttctgggaaccggccgcagcaagaccagcagggtcgacctcttagtgtgcagcagcaaatgatgcaacaatctcgtcaacttgatccaaacctgttggtgaagcagcagactccaccatctcagcagcagccactccatcagccagccatgaagtctttccttgacaatgtcatgcccctgtggtggtatcggagaaggggatcctatag

SEQ ID NO: 62812 - DNA, 481 bp, Homo Sapiens
  misc_feature (363)..(363): n is a, c, g, or t
  misc_feature (378)..(378): n is a, c, g, or t
  misc_feature (461)..(461): n is a, c, g, or t
gggaaccaagatgctggccgcgtacctgtatgaggtctcccagctgaaggactaggccaagccctctgtgtgccatctccaatgagaaggaatcctgccctcacctcacccttttccaacttgcccagggaagtggaggttccctctttcctttccctcttgtcaggtcatccatgactttagagaacagacacaagtgtatccagctgtccacgggtggagctacccgttgggcttatgagtgacctggagtgacagctgagtcaccctgggtaagttctcagagtggtcaggatggcttgaccttcagaagatacccaaggtccaaaagcacaaaggtctgcggaaagttctggtttgtcnggcttgggcaccacnggctcacacctataatcggagcacttttggggaaggccaaagacaggaggatcacttgaggccaggaatctgagacaagcctnggcaacaaaaacaagactct

SEQ ID NO: 62813 - DNA, 275 bp, Homo Sapiens
gaagaaagtctaaataaacctttgttacacttttttaccacgcttttgcatgcttgcaataaaacatcttttactttgtgactccgaactccaaattttaactgttaacacacggtgccagaccaggtggcttttctttggtgaatgtagtgtttcatctgaacacctcgggaagcagagacaaaccaacctgtggttgaactgcccttaacgtcaccactactaacgtctatgttgactgtattgtgttagaagcacattaacactccgtcaca

SEQ ID NO: 62814 - DNA, 1148 bp, Homo Sapiens
  misc_feature (608)..(608): n is a, c, g, or t
  misc_feature (631)..(631): n is a, c, g, or t
  misc_feature (802)..(802): n is a, c, g, or t
  misc_feature (957)..(957): n is a, c, g, or t
ggggtgaccgggatggcgcattttcttgcaccaactaatgcggtgtcgctggcggctgaggagggcggagagttctgtggtgaaatagtgggaaggattcatgtaggcatcgggaagagcctaagtccacattataaaataggaagttgatgcggggtacagttactcccggaccggcggcgtgaaagtcgtgatatcatcgttgaactattagctttgaagtttaaatccaatggagaagactcaagaaacagtccaaagaattcttctagaaccctataaatacttacttcagttaccaggtaaacaagtgagaaccaaactttcacaggcatttaatcattggctgaaagttccagaggacaagctacagattattattgaagtgacagaaatgttgcataatgccagtttactcatcgatgatattgaagacaactcaaaactccgacgtggctttccagtggcccacagcatctatggaatcccatctgtcatcaattctgccaattacgtgtatttccttggcttggagaaagtcttaacccttgatcacccagatgcagtgaagcttttttacccgccagcttttggaactccatcagggnacagggcctagatatttactggnaggggataattacacttgtccccactgaagaagaaatataaagctatgggtgctgcacgaaaacaaggtggactggtttggattagcagtaggtctcatgcagttgttctctgattacaaagaagatttaaaaccgctacttaatacacttgggctctttttccaaattanggatgattatgctaatctacactccaaagaatatagtgaaaacaaaagttttttgtgaagatctgacagaggggaaagtctcatttcctactattcatgctatttggtcaaggcctgaaagcacccaggtgcagaatatcttgcgcccgaagacngaaactttgatttaaaaaaatcctgtgtacattatccttgaggaaggtaaggtccttttggaatacactccggaaaaccccttaaagaaacctggaaggctaaagccctaaaaaaacagaattggaagcaccgtggggggggagaacacccggaaccctaaggagccctttaagtaaaaaacacctttaat

SEQ ID NO: 62815 - DNA, 760 bp, Homo Sapiens
gcgggcgactggatgaggtacccatgacccaacttcacaggcatttctattctgctcccagatgttcctgcagcagccagctgtatccctgagcttcagcagcacccagcgacctgaggctcagcagcagctacagcaaaggtcagctgcagtgactcagccccagctcggggcgggcccccaacttccagggcagatctcctctgcccaggtcacaagccagcacctgctcagagaatcaagtgtgatatcaacccaggtaaatgtgctccttgccagcttcactccttgcctctagagcagacaccctcttgcagtttgggacatacttgattcctgcagcctacgtgaactgaggcctactgccctgttccgttatggactgagggtagatttgggagtgagccttcttttccttcttctgttaaagtcactttgaaaccccaagttgtattggcttccttctgtgttttataaatgtccacctcagtcccttgctctcgtgcttaaagatatcactcggctgaaatgttcacctttgatgctgacttagggttggaggcagatatggccatcctagagacccactggcagctgaatgtcccaacactcaacgtccatggtccccgccatctactctggttttaaccattacccacatgagcagccactgctgttcactgtcccttgccccaggtgccccctgctcctccaggcgccccctgctcctccaggcctccgcagatgtatcttctcggcg

SEQ ID NO: 62816 - DNA, 495 bp, Homo Sapiens
cctggcaaatgggcatgcaccctacagtcggactgtgagcctcatcagtgaggctagtgtagatgctgccttggctgaggcttcagtggagtccgttggcccagaaagcctagcctggggacctagcccacctacgcacgcagctcccacccatggagagcaccccagtcctgttcctcctgccctggaccctggccactctgccacaagctctaccctcggtacaacaggctctgtccccacatctacagaccctgccccatctgcacacctagactcagttcataagtccacagactctggcccttcagaactgccaggccccactcacaccactacaggctctacctatagtgccattaccactacccacagtgctccaagccccctcactcacactactacaggctccacccacaagcccataatctctacccttactactacaggccctaccctcaatatcataggcccagtccagacctgagcagccag

SEQ ID NO: 62817 - DNA, 462 bp, Homo Sapiens
tttgggttggggaggtgacaggtaggtaggacaggatctcttaagatgggaaagatactggggagaggagggctgcttggccccagggaactgcagtgaggtggaactgagctccgctcctgaatctccaaaggagcccatgctgcccggcttccctgagtcattttttccagcatcctgtcagatccctcaatgtactgatttcccccttgtgttaactataccgatattatttttttagcaattgaaatgcacttttttatttcaactcaatcatgattttaagtataaaaaatttatagattgttaaaactacttttttgtgtatttttaaccactcaatgtagcattgtatattttattcttgtgagactctggtacaggtgtgccgcctaatgatttttctgagatgctgggcctttggatgtgtacggtaaccaacttaatgctaatgttcaaagt

SEQ ID NO: 62818 - DNA, 1023 bp, Homo Sapiens
  misc_feature (571)..(571): n is a, c, g, or t
tcccgggatgggacacggactggctaggcgctggtgagggggcggcggtcccagcagcaggcatgggagtggcggcgcggcccccagccctgcggcactggttcagccactcaattcctctcgctatcttcgcgctgctgctgctttatctcagtgttcggagcctaggcgcccgctcgggctgcggacccagggcgcagccctgcgttccaggggaaacggcgcccttccaggtccggcaggagtcgggaaccctggaggccccggagaggaaacagcctccgtgtctgggccctcgggggatgctgggccgcatgatgaggcggttccacgccagtctgaaacccgaaggggatgtggggctgtcgccgtacctggcgggatggagggcactcgtcgaattcctgactcccctcggctccgtcttcgccttcgccactagggaggccttcaccaaggtgacagacctggaggctcgggtgcacggcccggacgcggagcactactggtcgctggcggccatggcggcgtgggagcggagggcgggactgctggagcagccgggggcggncccccgggacccgacccggagctcgggctctcgcacgctgctcctgctgcaccgcgcgctgcgctggtcccagctctgcctccaccgggtggcgaccggcgcgctgggaggcccggaagcgggcgtgcagtgcagcgacgcctaccgtgcggccctgggtccgcatcacccctggctggtccgacagaccgccgcctcgccttccctcgccttcccgggtcgccgccgcctgctggagctggcgtgttccggagccaccgaggcggaggcgcgggccgcgctgctccgggccgccggcaccttggaggatgtctacaaccgcacccagagcctgctggccgagcgcggcctgctccagctggcctaagacggcggctgcggggaccggcgggaacggagcggaccgcccggggtggggccgcgcagcccggggtcagtcctgcagcccgcgc

SEQ ID NO: 62819 - DNA, 688 bp, Homo Sapiens
gaatctagtatatccaggttagaacctgtggatgtatcaatagcatatagcttggtttccataacatagagcattggttgactgtattacaggaagactcactcaccaggataaacattgctgtatgttacagtaaagctatctggagagaacacataaatgattttggcataccattagagaaaccatttgtaaaactcaaatgaccacataaagcttatcaaggagtctagattggttttgttttataccatatgggatgaagaaaatagaaatgtcagtagaactcattgagggtgctcttgccagctgctgaaaatagaagttggctactctcagaatttggtttaaagctggacagatttgctttgttatagggtaaagctttgtctaaagtcctcattttcttttaaaattgaataaaatttctgtatacagattcattgtatgtacctttattgcttcttaagggtccttgctgtatagacagtcctgcttcagaagttgctgctttgtttgtctaattgactcatttgtaaatgagcagaactgttttgttggtttttttccctaaatataaaagtccacacttcgtttgtgctataacctcaaactttgatttctaatgtcacacttaaaactgtgtggaataagacttttgccataaaaataaactatggagtccttt

SEQ ID NO: 62820 - DNA, 877 bp, Homo Sapiens
  misc_feature (390)..(390): n is a, c, g, or t
ggggcttacagctattttgttacaaattaagtgtctagcagaaggaggagacctgaattcctttgaattcaaatcacttacagactcattaaatgatatcaagagtacaatagacgcttctaatatcagttgctttcagaataatgtagaaatccatgttgcacatattcagagtggcctgagccagatgggatacttacatgcctttgcagcaaataacaccaacagagactgagtaaagatttcattattccaactgcacgggacattgtttttgagaagttcttttcctttatataggcttccaacaccaaataacctaactgctggaaaacaagggaaatttaaatctccaaataaggcattttaatagactgtactgcttcttanaccagcattgctgaccagcattatatttatttttcttttattattcagatgcagtagcattgcttatgttacatatgtttatattcacaaatatttttaaactgaaatatctgaacataatataatttcgtggaagaatacattgaccattttttttaatgtgcatgaattcaccgcaacacatgcagacaactgctgcaatggagagtatgaagaaacctggtctttttattcatgtcggtggcagtgtggaaattccatccagaaaattacaactccacttgatttagttgatcaccatctcagtcttcaaaagataacatcatgaggtgtgggaagtcctagttttaaggaaaccactgaaatatagatgggaaatgtggactttacaagtatatgttatatatacttgcaatgtgacatggttctgtagatcattttataataataaatattttaattcatcgcggataaaacacctcaacac

SEQ ID NO: 62821 - DNA, 624 bp, Homo Sapiens
aacaacttttaggatgtttttcaacaatgtcccagtttctttccctaatctaaagctcccctcttaaagggtggcagctttcctccgcccccgcagaagaaggagcaaggcaagcaggctgtcgcggcggatgcccctggagcgggatctttttcttgaaagccaaagacggtcctgggaagcaacggtccccctgagatcatgggccagtcttcccgccagccacgtccagctggcgtcaataagcatctttggggatgtcctgcctcctccaggaccagccatgagtggctcttatggccaaaggcggtactgcaggccaagcaaacggctctgggctggaatagccctacctgagtgccctgtttgactccgccactatctgccatgtgagttgggcaaattgttgaccacctctgagccttgaaaaagtaggaggttactttgttagagcaaaataataaaatttaattttaaaaaagaaaacgtaggaggttcgtttggatgagctagtctcttccggttgaaaagtctgactcggtgagcatcctgacgactccatttccttctggctccccacccagtcttacacttggccttgccatatggcaggggatcctctag

SEQ ID NO: 62822 - DNA, 360 bp, Homo Sapiens
gcaggccagagcctcttttgcttccttttcttgcccatgccgcttctagaagccaggcacaggttgccaagaggtgacacgaaacaggaggaaactcagtgacctctgcctctcccacattcctccccgcgggggaggacctcgccgctttgaagagcaccgtgcacatgtgggtgcacaaacgtgggtgttggtgtggacggggcgcagatctccgtggatgaactgcgtctggactcttagattcataaaatattcgagggtttgggagtcacagaccctcccctctcctcagtgcactttggcatttgcacggtgtcttccccggacagcacagcaataaatggtgtgattgcgtgg

SEQ ID NO: 62823 - DNA, 1509 bp, Homo Sapiens
cgcggcgtcccgcccgcacactcgcgcacactcgcgctcgggcgcacacggagcgaggaccggcgcccggagcgagccagtgagcggctaaccggggacccaccgcgcggagccagcctagctgccagcgagcccaacccgcgacgacccacgcccctgagccccgcagccgacccctgccggccggtgtccccacgcgcatccctgacccatggcgctgaagaggattcagaaagaattgagtgatctacagcgcgatccacctgctcactgttcagctggacctgtgggagatgacttgttccactggcaagccactattatggggcctcctgatagcgcatatcaaggtggagtcttctttctcactgtacattttccgacagattatccttttaaaccaccaaagattgctttcacaacaaaaatttaccatccaaacataaacagtaatggaagtatttgtctcgatattctgaggtcacaatggtcaccagctctgactgtatcaaacagttttattgtccatatgttctctactttgtgatcctaatccagatgaccccttagtaccagatattgcacaaatctataaatcagacaaagaaaactacaacagacatgcaagagaatggactcagaaatatgcaatgtccaaatcaaaaacattttcatatataccagagtactgtcaaatctaggtttttttcaaccattagcagtaaattggagcactgtttactgtttcattgtaccatgaaaccatttgatttttacccattttaaatgtgtttctgaagcaagacaaaacaaacttccaaaaatacccttaagactgtgatgagagcatttatcattttgtatgcattgagaaagacatttattatggtttttaagatacttggacatctgcatcttcagcttacaagatctacaatgcagctgaaaagcaaccaaattattttttgctgaaactagatgtttttacatgagaaatactgtatgtgttgtctaagatgtcagttttataaatctgtattcagatttcattctttgttagctcactttataatttgtatttttttactgtatagactaaatatattctatttacatgtatgtcaactcattacttttttcctgtgaacagtattgaaaaaccccaacggctgataattaagtgaattaactgtgtctcccttgtcttaggatattctgtagattgattgcagatttcttaaatctgaaatgatctttacactgtaattctcagcatactgattatggagaaacacttgttttgattttgttatacttgactttaactttattggcatgtgaatttaattgcactgcctaagtaggaagatgtggtaacttttattttgttgctattcacattttgaatttttttcctgtaaaaggcaatattataattgaccccttttaaccgatctttactggaacctttttcccatataaaataaaatggcttttttccttccccgg

SEQ ID NO: 62824 - DNA, 1176 bp, Homo Sapiens
  misc_feature (438)..(498): n is a, c, g, or t
aagtttattcagagtgctgctccaaaatccctgctcttcatggtgacctatgacgacggaagcacaagactgaataacgatgccaagaatgccatagaagcacttggaagtaaagaaatcaggaacatgaaattcaggtctagctgggtatttattgcagcaaaaggcttggaactcccttccgaaattcagagagaaaagatcaaccactctgatgctaagaacaacagatattctggctggcctgcagagatccagatagaaggctgcatacccaaagaacgaagctgacactgcagggtcctgagtaaatgtgttctgtataaacaaatgcagctggaatcgctcaagaatcttatttttctaaatccaacagcccatatttgatgagtattttgggtttgttgtaaaccaatgaacatttgctagttgtatcannnnnnnnnnnnnnnnnnnnnnnnnnnnnnnnnnnnnnnnnnnnnnnnnnnnnnnnnnnnntatgtcaggcttgctggccccccgagacgctttaaaaactttttaaactattcgttgggcccgctaggccaattaaaaaagggaaacaggggtttcctagggctctccagacatccagtactggtagaattgctcgcattcaaaccagccaaaaaggcccggaggcaaccgaaccgttttcaaatgagacatatggggtctttgagggaatttactggatctatcaccaaggagaccctcgcgagcatttatactcaacttccgtgcccactcctgccaagtcatggtgagaaattgttgtaatctatttagccattctggcaagacatggaaaaccgtgcatgaatgaccctgaaaacgccctgactcgctcagggaccattgagcaccctgtgcgaaaattgattttgccacatggtgcaccatggggggacaaacgggggttgaacaatatttggccaaatttggcccaccataaaatgtgcgaaactgcgcccaaattcattcggtgtgaataggcctgaaacacgaaaccccattatcacccttttaacgcctattacggcccaaatttgtccaccgattttcacgcccaaaccctccgccaattattggggagaataaagctgtccgaaacctgcccggaaagccattcgggtccaattaccccccaaaacc

SEQ ID NO: 62825 - DNA, 975 bp, Homo Sapiens
catcctgtgatacgagatgaagtactttgagaagagcgagggcatcgctccacagtgaccagcagatgaactccgtgcagctggacgggcttcggactgacgcacgttatgtggtccaggtccgtgcccgcacagtagctggctatgggcagtacagccgccctgccgagtttgagaccacaagtgagagaggctctggggcccagcagctccaggagcagcttcccctcatcgtgggctccgctacagctgggcttgtcttcgtggtggctgtcgtggtcatcgctatcgtctgcctcaggaagcagcgacacggctctgattcggagtacacggagaagctgcagcagtacattgctcctggaatgaaggtttatattgacccttttacctacgaggaccctaatgaggctgttcgggagtttgctcaaggagatctgacgtgtcctgcgtcaagatcgaggaggtgatcggagctggggaatttggggaagtgtgccgtggtcgactgaaactgcctggccgccgagaggtgtttgtggccatcaagacgctgaaggtgggctacaccgagaggcagcggcgggacttcctaagcgaggcctccatcatgggtcagtttgatcaccccaatataatccggctcgagggcgtggtcaccaaaagtcggccagttatgatcctcactgagttcatggaaaactgcgccctggactccttcctccggctcaacgatgggcagttcacggtcatccagctggtgggcatgttgcggggcattgctgccggcatgaagtaccgtgtccgagatgaacctatgtgcaccgagaccatggctgctcgcaacaatccttgtcaacaaagaagctggtctgaaaagtctcagaatttggctactaccgcttcctggaggatgacccatccgatctaactaaccagtacctgggcgggaagatcacattcgatggactgcca

SEQ ID NO: 62826 - DNA, 471 bp, Homo Sapiens
ttggggggtgggactactcaggttcctccaacctgggagagctgaagctcctgctggaggaagcagtcatgctgcggcgcctcaagtccgacgtcctttcccagctgccttccaagcagcgcaagatagtggtgattgccccaggacggatcaatgccaggaccagagctgccctggatgctgcagccaaggaaatgaccaccaaggacaaaactaaacagcagcagaaagatgccctcattctcttcttcaacagaacagctgaagctaaaatcccatctgtcattgaatatatcttggacctactggaaagtggaagagagaagtttttagtatttgcacaccataaggtggtcctggacgcaattacgcaagagcttgagagaaagcacgtgcagcacatccgcatcgatggctccacctcatcagctgagcgggaggacctgtgccagcagttccaactgtcggaga

SEQ ID NO: 62827 - DNA, 541 bp, Homo Sapiens
gtgtctgcacaaaggatgccaagcagatgttcgaggagattgaatcattaaagaaaaagttgcaacagaaacagctcttaatactgcagcttttagaaaagatatctttcttagaaggagagaataatgaactacaaagcaggttggactatttaacagaaacccaggccaagaccgaagtggaaaccagagagataggagtgggctgtgatcttctacccagccaaacaggcaggactcgtgaaattgtgatgccttctaggaactacaccccatacacaagagtcctggagttaaccatgaagaaaactctgacttaggcactcagaggcatacactttttacagatggacaaaagctctggaaccctgtggcttcaaatcctttgggaagggtgactgttgtttcccctacacacagtgtaagccggaatgggaatcgctgaggctctgatccacttctaagacaggaaggaaagtgaaggcagagtgagcaggtaagagagggatatacaaggtcacatttcagacacccactcggg

SEQ ID NO: 62828 - DNA, 344 bp, Homo Sapiens
ctgctcaaggcataatggggccacccgtgggcatccacagtttgcagggtgttccggaaggttcttgtcactgtgattggatgctggatgccgcctgatagacatgctggcctggctgagaagcccctgagcaggtaacccagggaagagaaggaagccaggcctggaggtccacggcagtgggagtggggctcactggcttcctgtgggatgactggaaaatgacctcgctgctgttccctggcatgaccctctttggaagagtgttttggagagagccttctagaatgacagactgttgcgaggaaagcaggggcaggggtttccaggcccgggctgtgcga

SEQ ID NO: 62829 - DNA, 666 bp, Homo Sapiens
ttgggggacgtttccttttagcctctgtgatggctgataaggataccacaagaaggatccacgtttcaacagatcaaggggacacatggagcatggcccagctccccttcgtgggacaggtacagttctattctattctggcagcaaatgatgacatggtattcatgcatgtagatgaacctggagacactgggtttggcacaatctttacctcagatgatcgaggcattgtctattccaagtctttggaccgacatctctacactaccacaggcggagagacggactttaccaacgtgacctccctccgcggcgtctacataacaagcgtgctctccgaagataattctatccagaccatgatcacttttgaccaaggaggaaggtggacgcacctgaggaagcctgaaaacagtgaatgtgatgctacagcaaaaaacaagaatgagtgcagccttcatattcatgcttcctacagcatctcccagaaactgaatgttccaatggccccactctcagagccgaatgccgtacgtttggtcattgctcatggtagcgtgggggatgccatctcagtgatggttccagatgtgtacatctcagatgatgggggtactcctggacaagatgctggaaggaccccatattaaccatcctgatcctgga

SEQ ID NO: 62830 - DNA, 1130 bp, Homo Sapiens
  misc_feature (1027)..(1040): n is a, c, g, or t
gctctcgggccattatccttcagtggggctattggactgacttttcttatgctgggatgtgccttagaggattatggcgtttactggcccttattcgtcctgattttccacgccatctcccccatcccccatttcattgccaaaagagtcacctatgactcagatgcaaccagtagtgcctgtcgggaactggcatatttcttcactactggaattgttgtttctgcctttggatttcctgttattcttgctcgtgtggctgtgatcaaatggggactgcggccttgtgttggcaggcaatgcagtcattttccttacaattcaagggtttttccttatatttggaagaggagatgattttagctgggagcagtggtagcactttattctgattacagtgcattgaatttcttagaactcatactatctgtatacatgtgcacatgcggcattttactatgaaatttaatatgctgggttttttaatacctttatatatcatgttcactttaagaaagacttcataagtaggagatgagttttattctcagcaaatagacctgtcaaatttagattatgttactcaaattatgttacttgtttggctgttcatgtagtcacggtgctctcagaaaatatattaacgcagtcttgtaggcagctgccaccttatgcagtgcatcgaaaccttttgcttggggatgtgcttggagaggcagataacgctgaagcaggcctctcatgacccaggaaggccggggtggatccctctttgtgttgtagtccatgctattaaaagtgtggcccacagaccaagagcctcaacatttcctagagccttattagaaatgcagaatctgaagccccactctggacccaggacattttgatgagatccaaaggagttgtatgcacatgaaagtttgagaagcatcatcatagagaagtaaacatcacacccaacttccttatctttccagtggctaaaccacttaacctctctgggtgttacctgctcatttgtttnnnnnnnnnnnnnngtctcacctgctttcatgctgaggacaagttcagatgttcaagcctataatatttaggcagttcctcaaatttatgaaaagtgttctcag

SEQ ID NO: 62831 - DNA, 577 bp, Homo Sapiens
taagaatatacaaactattggtgatttgagtactcttacagcatctgaaataaaatctcttcctatccgttctccaaaagtgtgcaatgtaaaaaaggctctcagaatatatcatgagcagcaggtgaagactcgtgtactagaagagattccagtttttgatatttctgaaaaaacagtaaatggaatagaaaataaatctttgtcacctgatgaagaaagacttgtctcagatataattgatcctgttgctttagaaattccattatccaaaaaccttgtggcacagattagtgctcttgctcttcagctggattcagaagatcttcataattattcaggaagccaactatttgaaatgcacgagaaactaagttgtatggcaaactctgtaataaaaaatctacagtcacgttggagatcaccatcccatgaaaattctatttagtattttcagagaaaattgaaggtttttttaaacatcactggatttcttgattgaggaaacaagttctgaaataatagcacaatttcaaagaagagactctttgcaaagttgataacatttcaaaccctg

SEQ ID NO: 62832 - DNA, 534 bp, Homo Sapiens
tacagcagcctgaaagtaagttccttaagggacgtgtagactgttgcctggcaggtggttgggatgtgaacatctttttgaagaaagagaaatatcacccctaacttgccttctcgcctttctcttacagaagggcaagaaatgcagcaagtaccaagatatcccccgaacccagtcaggtttacttacgctggatgtttgagtgtgaagaaataccggcccaagtactgcggttcctgcgtggacggccgatgctgcacgccccagctgaccaggactgtgaagatgcggttccgctgcgaagatggggagacattttccaagaacgtcatgatgatccagtcctgcaaatgcaactacaactgcccgcatgccaatgaagcagcgttctccttctacaggctgttcaatgacattcacaaatttagggactaaatgctacctgggtttccaggcacacctagacgacaaggagaagagtgtcagaatcagatactggagaaaatgggtgggataccagggtaagatcctcta

SEQ ID NO: 62833 - DNA, 966 bp, Homo Sapiens
agtgactacgcacagagcgaggcgacagtttgaactgtggcaactgtgacgtagcctaaggctcctgttttggcgaggcagatttagaactgatgggatgaatttttcatgaactgccgtgatttgactttaggggttgcctttgtttttggcgtggctgacttacatcaatgtgttggggaagggcctgcccagttgccttcaggtgacatcctccagatagtgtagttggggggggcccctcccctcgccctgcattgacagagtggccgtcctaacctggggcctggtgcgcagacgtccgtctcgttaggtgtcccacatcacaagactatgccattggggtagttgtgtttcaacggaaagtgctgtcttaaactaaatgtgcaatagaaggtgatgttgccatcctaccgtcttttcctgtttcctagctgtgtgaatacctgctcacgtcaaatgcatacaagtttcattctccctttcactaaaacacacaggtgcaacagacttgaatgctagttatacttatttgtatatggtatttattttttcttttctttacaaaccattttgttattgactaacaggccaaagagtctccagtttacccttcaggttggtttaatcaatcagaattagagcatgggaggtcatcactttgacctaaattatttactgcaaaaagaaaatctttataaatgtaccagagagagttgttttaataacttatctataaactataacctctccttcatgacagccttccaccccacaacccaaaaggtttaagaaatagaaatataactgtaaagatgtttattttcaggcattgggatatttttttactttagaaagcctgcataatggttcctggattttcatactgcaaacatttcaggaaatttccttgggagaaaaatggggctttattttcaactgaaacatcctagttggccgggttta

SEQ ID NO: 62834 - DNA, 1176 bp, Homo Sapiens
ggtgatgaagagctgcaaaaatcttaagggaggtcttcaggaagttgctgatcagttggatttgcagaggattggaaggcagcaccaggcaggctcagactcactgctgacaggaatggctttctttaggatgaaagagttgttttttggggacagcattgatgatgccaagtactgtgggcggctctatggtttaggcaccggagtggcccagaagcagaatgaggatttggactctgcccaggagaagatgagcatcctggcgattttcaacaacatgcagcagtgatggcgcccggctctgcagggtgggcctgatcccagagtggtgcttactgtgctgactgtgtacttatcttccccaagagaaaatgcttcttttgagcacactgtacctaccatctgcattgagcagaaagacttttgttttactgaagacaaaagatgtttttattttagacccagaagagaggagtttgctctgaatttgtaaataagtcttccccattcctcatactcgagcctctcctctctggttgcctcctgccaccagcatccatggctcatttgacacctttttaaatatcaggacaagtctgaaacaaagtagtaaaatgtatataactcttacctgttgtcattctttttcttttaaatttgttgctaatctctgataatgaagattcttactctgattctcagctgagctgtgagggcttccagggaaaatggaacaaaatggtgttcttaggtaatgggttgtagatactgagtcttcctttccttttctgacccttctcgaggacatttgctttcctcacacttttgtagtctctctttacatattactatatggaaatgaattgctctgtgctgaaatttgaagaccagataatgaaactgaaaagcaaacaattttactgaatctgtctacccttcattcatgagaactccagaatgagtgttgaccactgaagcatcttttaagtctgtgttccattgtgccattcaggtttgctgtcacatatgcatcatctgaaatcatttgaaatttttgtacaataaaatatcctggatttgatcctgaaggatactagtaagatcagatttttgggtcatgtctgttgtattttcagtaatgtgatttcagatggtcatctgattctcccattcccg

SEQ ID NO: 62835 - DNA, 768 bp, Homo Sapiens
ggggactgtgagttctttggaattgtgaacattcttttgaaatatggagcccagataaatggacttcatttgggatactgcctgaagtacgagaagttttcgatatttcgctactttttgaggaaaggttgctcattgggaccatggaaccatatatatgaatttgtaaatcatgcaattaaagcacaagcaaaatataaggagtggttgccacatcttctggttgctggatttgacccactgattctactgtgcaattcttggattgactcagtcagcattgacacccttatcttcactttggagtttactaattggaagacacttgcaccagctgttgaaaggatgctctctgctcgtgcctcaaacgcttggattctacagcaacatattgccactgttccatccctgacccatctttgtcgtttggaaattcggtccagtctaaaatcagaacgtctacggtctgacagttatattagtcagctgccacttcccagaagcctacataattatttgctctatgaagacgttctgaggatgtatgaagttccagaactggcagctattcaagatggataaatcagtgaaactacttaacacagctaatttttttctctgaaaaatcatcgagacaaaagagccacagagtacaagtttttatgattttatagtcaaaagatgattattgattgtcagataggttaggttttggggggccagtagttcagtgagaatgtttatgtttacaactagccttcccagtaa

SEQ ID NO: 62836 - DNA, 1431 bp, Homo Sapiens
  misc_feature (805)..(805): n is a, c, g, or t
  misc_feature (812)..(812): n is a, c, g, or t
ggggtggcgggcggctccgggagccaacatgcctcggtatgcgcagctggtcatgggccccgcgggcagcgggaagagcacctactgtgccaccatggtccagcactgtgaagccctcaaccggtctgtccaagttgtaaacctggatccagcagcagaacacttcaactactccgtgatggctgacatccgggaactgatcgaggtggatgatgtaatggaggatgattctctgcgattcggtcccaacggaggattggtattttgcatggagtactttgccaataattttgactggctggagaactgtcttggccatgtagaggacgactatatcctttttgattgtccaggtcagattgagttgtacactcacctgcctgtgatgaaacagctggtccagcagctcgagcagtgggagttccgagtctgtggagtttttcttgttgattctcagttcatggtggagtcattcaagtttatttctggcatcttggcagccctgagtgccatgatctctctagaaattccgcaagtcaacatcatgacaaaaatggatctgctgagtaaaaaagcaaaaaaggaaattgagaaatttttagatccagacatgtattctttattagaagattctaccagtgacttaagaagccaaaaattcaggaaactgactgaagctatatgtgggactgattgatgactaccgcctggcttcgatttttaccttacgatcagtcagatgaagaaagcatgaacattgtattgcagcatattgattttgccattcaatatggagaagacctanaatttanagaaccaaaggaacgtgaagatgagtcttcctctatgtttgacgaatattttcaagaatgccaggatgaatgaagagtttactaaaagtaaccatctaaagagcttgtggccaaaccagcagaacattcttctcttcaaaggatgcaatagtagaaagctacttattttaatgaaaaaaagtaaacttcgttctttatcagcctcatgcctgaatcaaatttttaattattctgaaactgctgctgtttaaagtggaatcttttagtattataacagcatcactttagattttgtaagtcaaaattgaaatgaatgcacatagatttatatataaattagcacctgagctaaggttaaggctggtctaaacttattttcactttttgtattatttttgagatgcaggaattactgtaacaaaatatgtatgtccgaagggaaaaagctgcaaggatatatataagaccactgcttatctgtatcttcccattttcctatattgaaaatgtatattatttatataacttaaaaagtaaaaataactatgttttgagatatgtatgtgtatatataaaagaaacaaaggtttttaatgattcttggacctagataacaagt

SEQ ID NO: 62837 - DNA, 850 bp, Homo Sapiens
agccggtttccgtggggccggcgctccgggtgcgagagacaggtcgggccccctaggcagcgagccgcagcgcaatcccggcgctcgcccaaggaccctggaagctaccgttaccccgccgggcagcgtgggcgccatgagcagctcgggactgaattcggagaaggtagctgctctgatacagaaactgaattccgacccccagttcgtacttgcccagaatgtcgggaccacccacgagctgctggacatctgtctgaagcgggccacggtgcagcgcgcgcagcatgtgttccagcacgccgtgccccaggagggcaagccaatcaccaaccagaagagctcagggcgatgctggatcttttcttgtctgaatgttatgaggcttccattcatgaaaaagttaaagtattgaagaatttgaggtttagccaatcttacctgtttttttgggacaaggttgaacgctgttatttcttcttgagtgcttttgtggacacagcccagagaaaggagcctgaggatgggaggctggtgcagttttttgcttatgaaccctgcaaatgatggtggccaatgggatatgcttgttaatattgttgaaaactatggtgttatccctacagaaatgcttccctgactcttatacaacagaggcaaccagaacggatgactgatattctgaatcacaagatgagagaattctgtatacgacctgcggaacctggtacacagtggacgcaacgaacggagaactctcggccacacaggacgtcatgatggaggagatattccgagtggtgtgccatctggagggataacaccagcagacttcacctgggcaatatcg

SEQ ID NO: 62838 - DNA, 532 bp, Homo Sapiens
caggtcgctgatttgttggaggctctgtgtgtgggagcagcgactggacccagagccatgtggctgtgccctctggccctcaacctcatcttgatggcagcctctggtgctgtgtgcgaagtgaaggacgtttgtgttggaagccctggtatccccggcactcctggatcccacggcctgccaggcagggacgggagagatggtgtcaaaggagaccctggccctccaggccccatgggtccgcctggagaaatgccatgtcctcctgggaatgatgggctgcctggagcccctggtgtccctggagagtgtggagagaagggggaggctggcgagaggggccctccaggtcttccagctcatctagatgaggagctccaagccacactccacgactttagacatcaaatcctgcagacaaggggagccctcagtctgcagggctccataatgacagtaggagagaaggtcttctccagcaatgggcagtccatcacttttgatgccattcaggaggcatgtgccagagcag

SEQ ID NO: 62839 - DNA, 1041 bp, Homo Sapiens
gaggtcgatggtgctgttgtttcggatattggtcagtaaggttctgagcgtctcaagttccccggggttccgtcggcgcccagcataagaggtgcggtcgacgcatgtcaacgaacggcgacatctgggtgtgacgcgtgaattccagacgccgcgtctggtgtgtccctttcgccgttcctgaccttcctcagtctgcagctcttttctgccaccgcgcgcccgcctcagccgttcagccctgagctcggcgggtggacgggcatggatccaggcgttgggagcagtctgcgaagtcagggtaggaaggctacacaaaggaggcgacatgcccagcccggtcctcaggaataacgcgggcgtgcccgtgtggtgtggacggtgaggggacactgtattaagtgccttactctgcattatcacttgaatcttcatagcgatcgattgtgatgggctactggtcatctccccgggttgtagatgaggaaactgaggcctcagtaacttgtgctttagtcagtaaatgataagagtcagcaaatgaattcccaagcgtagactcggccgtacactgctgctgctaccttgcataatgacgaccatacctgtaagcgacatttttgacccaatgtcctttaaacatcttttgtgctcagactctgtattcgtgggccctccaaaggggggtacatgacaggtagaagcctccgtccctatccttataggattgtatatatctgatactggtcgagctaaagatgcacagcgaagtgctccagtgagtgtggtacaggttgttgagatgaaggagagatggcaatcagctaaagttactgaatacgtcacgaagggaggctggtttcaagctggctgtgattgggaggatccatgcgaggacattcccgagtcggaaacagcccaggcgaagactcacaggatccttcttacagtctcccatgatgcctcagagagcttggacatgatccacctggcgtttcaaatgccagtgaaatggcaactgggataagtaactgaaagaaa

SEQ ID NO: 62840 - DNA, 710 bp, Homo Sapiens
gagagcgagtttgatggcctcttcaccacccacaagggtaacttccagctgttgctgtaccagaatgatggctgcctgtggtggagcccctgtcacccccttcacggaggacctcacctgcttccctgagaagtcctctcagagcgctgctgggggacgatgctagtgcgagatggacgccaggtggtacatgatgtatgagggccccctgtctggagtcctagttgggcatgtgagctattgccgcaggtatacgctagtctggattgcttggactaaattggtatgcttgcacccgtgaacaccgagcctatgtgaagtgtactctcgccagcgcgactcgttgagttggccacggtgttagcgagcgagtacggtggtcgcaatgcgtagtagaaaggtcgctcaatggaaacgggcgatattcgcattcgcattgccgtccaatccttggcgtttcctggggcgccttcggtaattgcccgcctaaggtcccccaggaggcgggatcgccttcgttgcttttgtccctaaggctcttgtctgcaggggttatcggaccggtaattcccctttagggaacccccctgggggcgatcccacaatcgctgtccgtttggccggtgtccccaaggtggggagcgccctgtgggtggccccccgttcgaaggaccttggcccccacccgtacccccttgggaagccccggg

SEQ ID NO: 62841 - DNA, 430 bp, Homo Sapiens
gccgggccacttgtcttcatgtctgccagagggaggtgggaaggaggtgggaggagggcgtgcagaggcagtctgggcttggccagagctcagggtgctgagcgtgtgaccagcagtgagcagaggccggccatggccagcctggggctgctgctcctgctcttactgacagcactgccaccgctgtggtcctcctcactgccgtgggctggacactgctgaaagtaaagccaccattgcagacctgatcctgtctgcgctggagagagccaccgtcttcctagaacagaggctgcctgaaatcaacctggatggcatggtgggggtccgagtgctggaagagcagctaaaaagtgtccgggagaagtgggcccaggagcccctgctgcagccgctgagcctgcgcgtggggatgctgggggagaagctg

SEQ ID NO: 62842 - DNA, 492 bp, Homo Sapiens
  misc_feature (15)..(15): n is a, c, g, or t
ctgaagtattctttntgagtttcagtatatcttttctagtgtcccactttagaaaggtccaaagatgatatataataagtgaaaatacaattaatcagagctttatttgcatatccattaaatatctgaaggctattaccagttgtgcttcagcctcctttcccttgcaattctcccagggtggcatcctctacggagtcttgttgctccattgttgaccactgatgtaactcaacgtgaaaccttcccaaagctctccacatcactctctgttatggctgtgaccagcagtgaacatgaaaagaacttatttcatgccttctccaaactatattgtttctttgctaagtccagacctgctttttctacatttataggttttctattttaatcgccatgcaaaattctttatcatactcaatcattttggtttatcttcctgacttcttacctttaacatccctgttaaagattaccctgttgttgtttcaa

SEQ ID NO: 62843 - DNA, 904 bp, Homo Sapiens
cctacccactaccctccctactccacccacccgactccgagaatagattaatggggtgcgcgaaatcccgaggatgcagcagggaacaggggaagaaacctaaaggctgcaggctgccagtgtgtgcttggagagcccccttcttccgccgggcctcgcaagcagcgtaggactgtggagaacgggcggtgggcaaggagggaactcgagagcagcctccatgggcacacaggagggctggtgcctgctgctctgcctggctctatctggagcagcagaaaccaagccccacccagcagaggggcagtggcgggcagtggacgtggtcctagactgcttcctggcgaaggacggtgcgcaccgtggagctctcgccagcagtgaggacagggcacagggcctcccttgtgctgaagcaggtgccagtgctggacgatggctccctggaggacttcacccgatttccaagggggcacactggcccaatgatgacccacctattatcttttgaggcctcagtggacctggtccagattccccaggccgagggcttgctccatgctgactgcagtgggaaggaggtgacctgtgagatctcccgctactttctccagatgactgagaccacgtgttcagacagcagcgttggttcactggccaacgtgcaggtctctggagggggacctagcttctccttgtgtgatgaacgactcccagggtcgccaagaatgaggcgctctggcacccgaccgctgaacttgccacttgaggccccagggagactgtgcgaacttgcagtgaagttccaggtgatgacacatgaccaatcactgagactcctgctggggtcctcagtctccttggacctgtgggttctccatggacacggggctgggacgtcatc

SEQ ID NO: 62844 - DNA, 783 bp, Homo Sapiens
  misc_feature (29)..(29): n is a, c, g, or t
aaagcaggctggtacggtctgaggtgtangatctcaccagccggaaagtacgatgtcggctcagcctggagggacccaaccagagcctggcctgggagccaggatggccatccacaaagccttggtgatgtgcctgggactgcctctcttcctgttcccaggggcctgggcccagggccatgtcccacccggctgcagccaaggcctcaaccccctgtactacaacctgtgtgaccgctctggggcgtggggcatcgtcctggaggccgtggctggggcgggcattgtcaccacgtttgtgctcaccatcatcctggtggccagcctcccctttgtgcaggacaccaagaaacggagcctgctggggacccaggtattcttccttctgggtgacccgtgggcctcttctgcctcgtgtttgcctgtgtggtgaagcccgacttctccacctgtgcctctcggcgcttcctctttggggttctgttcgccatctgcttctcttgtctggcggctcacgtctttgccctcaacttcctggcccggaagaaccacgggccccggggctgggtgatcttcactgtggctctgctgctgaccctggtagaggtcatcatcaatacagagtgcgctgatcatcaccctggttcggggcagtggcgagggcggccctcagggcaacagcagcgcaggctgggcctgtggcctccccctgtgccatcgccaacatggactttgtcatggcactcatctacgtcatgctgctgctgctgggtgcctacctgg

SEQ ID NO: 62845 - DNA, 852 bp, Homo Sapiens
acagcccaggctccaggacagcctgcgttcctgggctggctgggtgcagctctcttttcaggagagaaagctcttttggaggagctggaaaggtgcccgactccagccatgctggcgctactgtgttcctgcctgctcctggcagccggtgcctcggacgcctggacgggcgaggactcggcggagcccaactctgactcggcggagtggatccgagacatgtacgccaaggtcacggagatctggcaggaggtcatgcagctggcgggacgacgacggcgcgctccacgccgcctgccaggtgcagccgtcggccacgttggacgccgcgcagccccgggtgaccggcgtcgtcctcttccggcagcttgcgccccgcgccaagctcgacgccttcttcgccctggagggcttcccgaccgagccgaacagctccagcctgcgccatccacgtgcaccagttcggggacctgagccagggctgcgagtccaccgggccccactacaacccgctggccgtgccgcacccgcagcacccgggcgacttcggcaacttcgcggtccgcgacggcagcctctggaggtaccgcgcccggcctggccgcctcgctcgcgggcccgcactccatcgtgggccgggccgtggtcgtccacgctggcgaggacgaccttgggccgcgggcggcaaccaggccagcgtggagaacgggaacgcgggccggggggttggctgctgcgtggtgggcgtgtgcgggcccgggctctgggagcgccaggcgcgggagcactcagagcgcaagaagcggcggcgcgagagcgagtgcaaggccgcctgagcgcggccccgcaccg

SEQ ID NO: 62846 - DNA, 746 bp, Homo Sapiens
ggctggtacggtccggagtgttaggatctgcaatgtcaagggagggggctcacccaggtctcctgtagctcaggtggcaggcctgagccctgcacccgccccacgaccgtccagcccctgacggggcaccccatcctgaggggctctgcattggcccccaccgaggcaggggatctgaccgactcggagcccggctggatgttacaggcgtgcaaaatggaagggtttcccctcgtcccccctcagccatcagaagacctggtgccctatgacacggatctataccaacgccaaacgcacgagtattacccctatctcagcagtgatggggagagccatagcgaccattactgggacttccacccccaccacgtgcacagcgagttcgagagcttcgccgagaacaacttcacggagctccagagcgtgcagcccccgcaagctgcagcagctctaccgccacatggagctggagcagatgcacgtcctcgatacccccatggtgccaccccatcccagtcttggccaccaggtctcctacctgccccggatgtgcctccagtacccatccctgtccccagcccagcccagctcagatgaggaggagggcgagcggcagagccccccactggaggtgtctgacggcgaggcggatggcctggaggcccgggcctgggctcctgcctggggagacaggcagcaagaacgaagatccgcctgtaccagttcctgttggacctgctccg

SEQ ID NO: 62847 - DNA, 1039 bp, Homo Sapiens
  misc_feature (965)..(965): n is a, c, g, or t
aagtgtggagccttctggggccacactgatccggatccctcttcgtcgagtccaccctggacgcaggatcctgaacctactgaggggatggggagaaccagcagagctccccaagttgggggccccatcccctggggacaagcctgtcttggtacctctctcgaacttcctggatgtgcagtattttggggaaattgggctgggaacgcctccacaaaacttcactgttgcctttgacactggctcctccaatctctgggtcccgtccaggagatgccacttcttcagtgtgccctgctggttacaccaccgatttgatcccaaagcctctagctccttccaggccaatgggaccaagtttgccattcaatatggaactgggcgggtagatggaatcctgagcgaggacaagctgactattggtggaatcaagggtgcatcagtgattttcggggaggctctctgggagcccagcctggtcttcgcttttgcccattttgatgggatattgggcctcggttttcccattctgtctgtggaaggagttcggcccccgatggatgtactggtggagcaggggctattggataagcctgtcttctccttttacctcaacagggaccctgaagagcctgatggaggagagctggtcctggggggctcggacccggcacactacatcccacccctcaccttcgtgccagtcacggtccctgcctactggcagatccacatggagcgtgtgaaggtgggcccagggctgactctctgtgccaagggctgtgctgccatcctggatacgggcacgtccctcatcacaggacccactgaggagatccgggccctgcatgcagccattgggggaatccccttgctggctggggagtacatcatcctgtgctcggaaatcccaaagctccccgcagtctccttccttcttgggggggtctggtttaacctcacgngccatgattacgtcatccagactactcgaaatggcgtccgctctgcttgtccggtttccaggccctggatgccc

SEQ ID NO: 62848 - DNA, 947 bp, Homo Sapiens
tgatgtaactccctcgtgacagaatgtgagccctcagaacttttccagcttcagacttactcacttccaccctttctaaaggcagtcttgagacaggaaagagtgagcttgtaccccttccagatccacagcattgcactgtcaacctttgcatctttaattggcccatctggaggcttctttgctagtggattcaaaagagccttccaaatcaaggattttgcacataccattcctggacatggtgggataatggacagatttgattgtcagtatttgatggcaacttttgtacatgtgtacatcacaagttttataaggggccccaatcccagcaaagtgctacagcacttgttggtgcttcaacctgaacagcagttaaatatatataaaaccctgcagactcatctcattgagaaaggaatcctaccacccaccttgaaggtataactggatccagagagggaaggactgacaagaaggaattattcagaaaaacactgacagatgttttataaattgtacagaaaaatagttaaaaatgcaataggttgaagttttggagatatgtttctctctgaaattactgtgaatatttaacaaacacttacttgatctatgttatgaaataagtagcaaattgccagcaacatgtcttgtacctttcctagagtgtattttctgatgtgaacttccttccccttacttgctaggtttcataatttaaaagactggtatttacaagagtcaaacactataaaatgagtaagttgacgatgttttaagattgcacctggcagtgtgcctttttgcacaaatatttactttttgcacttggagctgcttttaatttttgcaaaatgttttatgcaaggcacaataggaaagtcagttctcctgcacttcctcctcatgtagtctggagtactttctaaagggcttagttg

SEQ ID NO: 62849 - DNA, 679 bp, Homo Sapiens
ggaatttccgggatgggaatctggcttgattggcgtgctgagacgcacctggcgcaaccctcccttctgaatcgaagttcaagtcccgcggacactgcaaccatgaaggagagacgggccccccagccagtcgtggccagatgtaagctcgttctggtcggggacgtgcagtgtgggaagaccgcgatgttgcaagtgttagcgaaggattgctatccagagacctatgtgcccaccgtgttcgaaaattacacagcctgtttggagacagaggaacagagggtggagcttagtctctgggatacctcaggatctccctactacgataatgtccgtccactctgctacagcgactcggatgcagtattactatgttttgacatcagccgtccagagacagtggacagcgcactgaagaagtggaggacagaaatcctagattattgtcccagcacccgcgttttgctcattggctgcaagacagacctgcgaacagacctgagtactctgatggagctgtcccaccagaagcaggcgcccatctcctatgagcagggttgtgcaatagcaaagcagctgggtgcagaaatctacctggaaggctcagctttcacctcagaaaagagcatccacagtatctttcggacggcatccatgctgtgtctgaacaagcctagcc

SEQ ID NO: 62850 - DNA, 1007 bp, Homo Sapiens
aggctggtacgcctcggagtacgggatctcagcctcgctccgggcacgtcgggcagcctcgggccctcctgcctgcaggatcatgcgcaccaccgtggacgatgtcctggagcatggaggggagtttcactttttccagaagcaaatgtttttcctcttggctctgctctcggctaccttcgcgcccatctacgtgggcatcgtcttcctgggcttcacccctgaccaccgctgccggagccccggagtggccgagctgagtctgcgctgcggctggagtcctgcagaggaactgaactacacggtgccgggcccaggacctgcgggcgaagcctccccaagacagtgtaggcgctacgaggtggactggaaccagagcaccttcgactgcgtggaccccctggccagcctggacaccaacaggagccgcctgccactgggcccctgccgggacggctgggtgtacgagacgcctggctcgtccatcgtcaccgagtttaacctggtatgtgccaactcctggatgttggacctattccagtcatcagtgaatgtaggattctttattggctctatgagtatcggctacatagcagacaggtttggccgtaagctctgcctcctaactacagtcctcataaatgctgcagctggagttctcatggccatttccccaaacctatacgtggatgttaaatttttcgcttaatccaaggactggtcagcaaagcaggctggttaataggctacatcctgattacagaatttgttgggcggagatatcggagaacagtggggattttttaacccaagttgcctataccggttgggcctcctggtgctagcttgggtggcttacgcacttcctcactggaggtggttgcagttcacagttgctctgcccaacttcttcttcttgctctattactggtgcatacctgagtctcccaggtggctgatctcccagaataagaatgctgaagccatgagaatcattaagcacatcg

SEQ ID NO: 62851 - DNA, 1090 bp, Homo Sapiens
  misc_feature (111)..(111): n is a, c, g, or t
ctttcctgcagaataccattggatcctattaagaatgtccaaagtgtggagcattgatggaaaaatccttcttagccattttaaagatagctttccaatgattagacgaantgattcttttagtgactcatcagttcatttcctgtaaaattcatgtcttgctgttgatttgtgaataagaaccagagcttgtagaaaccactttaatcatatccaggagttgcaagaaacaggtgcttaacactaattcacctcctgaacaagaaaaatgggctgtgaccggaactgtgggctcatcgctggggctgtcattggtgctgtcctggctgtgtttggaggtattctaatgccagttggagacctgcttatccagaagacaattaaaaagcaagttgtcctcgaagaaggtacaattgcttttaaaaattgggttaaaacaggcacagaagtttacagacagtttggatctttgatgtgcaaaatccacaggaagtgatgatgaacagcagcaacattcaagttaagcaaagaggtccttatacgtacagagttcgttttctagccaaggaaaatgtaacccaggacgctgaggacaacacagtctctttcctgcagcccaatggtgccatcttcgaaccttcactatcagttggaacagaggctgacaacttcacagtctctcaatctggctgtggcagctgcatcccatatctatcacaatcaatttgttcacatgatcctcaattcacttattaacaagtcaaaatcttctatgttccaagtcagaactttgagagaactgttatggggctatagggatccatttttgagtttggttccgtaccctgttactaccacagttggtctgttttatccttacaacaatactgcagatggagtttataaagttttcaatggaaaagataacataagtaaagttgccataatcgacacatataaaggtacaaggaatctgtcctattgggaaagtcactgcgacatgattaatggtacagatgcagctcatttccacctttgttgagaaaagccaggtattgcagttcttttcttctgatatctgcaggtcacc

SEQ ID NO: 62852 - DNA, 933 bp, Homo Sapiens
agtgacctgacaagtcagaagcttgaaagcagggaaatccggatgtctcggttatgaggtggagcagtgagtgtgagcctcaacatagttccagaactctccatccggactagttattgagcatctgcctctcatatcaccagtggccatctgaggtgtttccctggctctgaaggggtaggcacgatggccaggtgcttcagcctggtgttgcttctcacttccatctggaccacgaggctcctggtccaaggctctttgcgtgcagaagagctttccatccaggtgtcatgcagaattatggggatcacccttgtgagcaaaaaggcgaaccagcagctgaatttcacagaagctaaggaggcctgtaggctgctgggactaagtttggccggcaaggaccaagttgaaacagccttgaaagctagctttgaaacttgcagctatggctgggttggagatggattcgtggtcatctctaggattagcccaaaccccaagtgtgggaaacaatggggtgggttgtcctgatttggaaggttccagtgagccgacagtttgcagcctattgttacaactcatctgatacttggactaactcgtgcattccagaaattatgcaccaccaaagatcccatattcaacactcagactgcgacacaaacaacagaatttattgtcagtgacagtacctactcggtggcatccccttactctacaataacgtgccccttactagtaattcctccttgctccaggttccacttctattccacggagaaaaaaattgatttgtgtcacagaagtttttatggaaaactagcacccatgtctacagaaactggaaccatttgtgaaaataaaagcagcattcaagaatgaaggctgctgggtttggaggtgtccccacgggtctgataatgcttggtctct

SEQ ID NO: 62853 - DNA, 553 bp, Homo Sapiens
cagttgttttggaaaattgctttaaattgagcatatttatgtatattggataaaaatgtactacagagcaaatttcaaatttttcattatatcagtctttttgaaaggatcaacttggataaaataaatatataatgctctatttgttagagctctattaaaaaggaaacagattccatagatctaagtcaatgtttctccagaagcatgattttgtctgccaaaagaaaatagctctctttggccaaaatgcaaaattacattgctataggaaagtttccaagggaaagtttgaagacacaaatgatttaattttggctcaaaaactgaatttgcttaacactgctacataatttgggtgaagtttccttctgcccgtttttcttgacctagataaatacactttgagaaatccagatctaataaatgtcaaccaacattgacattgtaattgggtgattacaataaaaggtgagcagtttgttgtttattaataattagcttttgcaggtaatgaaatagcagggaagtaacatgctgctttaggactaaa

SEQ ID NO: 62854 - DNA, 536 bp, Homo Sapiens
agagcacctccgccaagccaacatctctcagaaaggagatgtgtacagctatgggatcatcgcacaggagatcattctgcggaaagaaaccttctacactttgaactgtcgggaccgtaatgagaagattttcagagtggaaaattccaatggaatgaaacccttccgcccagatttattcttggaaacagcgagaggaaaaagagcttgttgtgtacctacttgtaaaaaactgttgggaggaagatccagaaaagagaccagatttcaaaaaaattgagactacacttgccaagatatttggactttttcatgaccaaaaaaatgaaagctatatggataccttgatccgacgtctacagctatattctcgaaacctggaacgtctggtagatgaaaggacacagctgtacaaggcagagagggacagggctgacagacttaactttatgttgcttccaaggctagtggtaaagtctctgaaggagaaaggctttgtggagccggaactatatgaggaagttacaatctacttt

SEQ ID NO: 62855 - DNA, 1035 bp, Homo Sapiens
  misc_feature (798)..(829): n is a, c, g, or t
agttggctttgctcggctacctgtggccccgcagttttgtagtccccgccttgtttctccccagaggcctctcaatcctccctccatgatcttcgcatagagcacagtaccccttcacacggaggacgcgatggctcccaagaaacgcccagaaacccagaagacctccgagattgtattacgccccaggaacaagaggagcaggagtcccctggagctggagcccgaggccaagaagctctgtgcgaagggctccggtcctagcagaagatgtgactcagactgcctctgggtggggctggctggcccacagatcctgccaccatgccgcagcatcgtcaggaccctccaccagcataagctgggcagagcttcctggccatctgtccagcaggggctccagcagtcctttttgcacactctggattcttaccggatattacaaaaggctgccccctttgacaggagggctacatccttggcgtggcacccaactcaccccagcaccgtggctgtgggttccaaagggggagatatcctgctctggaattttggcatcaaggacaaacccaaccttcatcaaagggattggagctggagggagcatcactgggctggaagtttagccctctcaataccaacccagttttacgccctcctccatggggaggggaacaactagggctggcagaccttttaaagggcaccattcctacggagtttttggccagctcaggaaaccattaacattctgggttttgtaggcccgggaatgggtcctgcctagcaagcccgaannnnnnnnnnnnnnnnnnnnnnnnnnnnnnnnaaacggggatcctgtgctggaacaatgggaacgggcaaaaaaagctttggggaatctccgcaaatgcgcccaaaaagaaacgtgggaccccatgttggcgccctcaaaacccacgggtcggggggattggggttcctcaggccaccagcgcgtatctgtatagaactcaacaagggggagaatctgtggggcacgctgcgcccccc

SEQ ID NO: 62856 - DNA, 860 bp, Homo Sapiens
agcggatcgtgccgcggcggccgagcgcagctacaggagggtgtccagaagccacaagccatggctgtggggaacatcaacgagctgcccgagaacatcctgctggagctgttcacgcacgtgcccgcccgccagctgctgctgaactgccgcctggtctgcagcctctggcgggacctcatcgacctcgtgaccctctggaaacgcaagtgcctgcgagagggcttcatcactgaggactgggaccagcccgtggccgactggaagatcttctacttcttacggagcctgcacaggaacctcctgcacaacccgtgcgctgaagaggggttcgagttctggagcctggatgtgaatggaggcgatgagtggaaggtggaggatctctctcgagaccagaggaaggaattccccaatgaccaggtcaagaaatacttcgttacttcatattacacactgcctcaagtcccaggtggtggacctcaaggccgaagggtattgggaggagctgatggataccacacggccggacatcgaggtcaaggactggttcgcagccaggccagattgcgggtccaagtaccagctgtgcgttcagctcctgtcgtccgcgcacgcgcctctggggaccttccagccagacccggcgaccatccagcagaagagcgatgccaagtggagggaggtctcccacacaattctccaactacccgcccggcgtccgctacatctggtttcagcacggcaggcgtggacactcattacttgggccggctggtaacggcccgagggtcaccaaacagcaggcatcaccatcgggccccgttgccctgaaccccctgagccccatctgttgaacc

SEQ ID NO: 62857 - DNA, 857 bp, Homo Sapiens
cgcggggggccggggccgggccgttgcctagcaacgccgagccccgcccggccggcgcgtgcctgcccccagcatggcttggcagggctggcccgcggcgtggcagtgggtcgccggctgctggctcctcctcgtccttgtcctcgtcctacttgtgagcccccgcggctgccgagcgcggtcggggcctccgcggtctgctcatggcgcacagccagcggctgctcttccgaatcgggtacagcctgtacacccgcacctggctcgggtacctcttctaccgacagcagctgcgcagggctcggaatcgctaccctaaaggccactcgaaaacccagccccgcctcttcaatggagtgaaggtgcttcccatccctgtcctctcggacaactacagctacctcatcatcgacacccaggcccagctggctgtggctgtggacccttcagaccctcgggctgtgcaggcttccattgacacaggaaggggtcaccttggtcgccattctgtgtactcacaagcactgggaccacagtggagggaaccgtgacctcagccggcggcaccgggactgtcgggtgtacgggagccctcaggacggcatcccctacctcacccatcccctgtgtcatcaagatgtggtcagcgtgggacggcttcagatccgggccctggctacacctggccacacacaaggccatctggtctacctactggatggggagccctacaagggtccctcctgcctcttctcaggggacctgctcttcctctctggctgtgggcggacctttgagggcaatgcagagaccatgctgagctcactggacactgtgctggggctaggggatgacac

SEQ ID NO: 62858 - DNA, 541 bp, Homo Sapiens
aaggctctgaaaggggtcaatggttgtcattccatagcggttacgactttggctacttaatcaaaatcctaaccaatctctaacttgcctgaagaagaacttgacttctttgagatccttcgattgttttttcctgtcatttatgatgtgaagtacctcatgaagagctgcaaaaatctcaaaggtggattacaggaggtggcagaacagttagagctggaacggataggaccacaacatcaggcaggatctgattcattgctcacaggaatggcctttttcaaaatgagagaaatgttctttgaagatcatattgatgatgccaaatattgtggtcatttgtatggccttggttctggttcatcctatgtacagaatggcacagggaatgcatatgacgcgagagggttctcacagtcaagacatgaaatagtcctttcagttctatttcgaatgacacacatgtctgagtaatggggatatctctggtcgatccctcggacatagactgtacctttccccccctgtgaccagaaccctg

SEQ ID NO: 62859 - DNA, 922 bp, Homo Sapiens
caaggtcaggtctccagcagaccctgaaagctgagctgccctgacccccaaagtgaggagaagctgcaagggaaaagggagggacagatcaggtagaccggggaagaaggaggagcagccaaggaggctgctgtccccccacagagcagctcggactcagctcccggagcaacccagctgcggaggcaacggcagtgctgctcctccagcgaaggacagcaggcaggcagacagacagaggtcctgggactggaaggcctcagcccccagccgctgggctgggcctggcccaatggcctttaatgacctcctgcagcaggtggggggtgtcggccgcttccagcagatccaggtcaccctggtggtcctccccctgctcctgatggcttctcacaacaccctgcagaacttcactgctgccatccctacccaccactgccgcccgcctgccgatgccaacctcagcaagaacggggggctggaggtctggctgccccgggacaggcaggggcagcctgagtcctgcctccgcttcacctccccgcagtggggactgccctttctcaatggcacagaagccaatggcacaggggccacagagctctgcaccgatggctggatctatgacaacagcaccttcccatctaccatcgtgactgagtgggaccttgtgtgctctcacagggccctacgccagctggcccagtccttgtacatggtggggggtgctgctcggagccatggtgttcggctaccttgcagacgggctaggccgccggaaggttctcatcttgaacttaccttgagaacagttgtgttcggggaccttgcgcagccttcgggacccaatttcccatttacttgcgccttccgggtcctcttcgggcattggtctgggtggattttccttaagtgttacata

SEQ ID NO: 62860 - DNA, 969 bp, Homo Sapiens
  misc_feature (286)..(286): n is a, c, g, or t
gcatagacaagcaaatagaaatttgattgtgagaggaagaacacatagtccttaaactgcaaagagtgggtgccaggatgtcgtgatctccatgttctgctgttaatgggtctggtgggaaagacagacctgtgggttctccgctgatgtctttattcgggaaagcgctggagcccagagctggatcccatggaccagctagtgattacagcgtacgcaggattagtaccatcagcgtagagcagacacagcgcgacggtagccgaacaaactgtagccgcagtgncgtgcagtaattcgctggagctggctatcatagcacatgtgatgtgacacagaagcatggagtcgcatgcactgaccgcatagcacgcctggtgaacgagcaggtagggagacatggccgtctgtcctatgtggagtcagcttcacgattgcagcgtgggctggcttccgtttctctgggaataagtgtcagaaagtgcaagatacgtgcaaggacaacccatgtggccggggccaattgtctcattacccagagtcctccctactaccgctgtgtctgtaaacacgccttacacaggtcccagctgctcccaagtggttcctgtatgcaaggccaaacccctgccagaatggggctacctgctcccggcataagcggagatccaagttcacctgtgcctgtcccgaccagttcaaggggaaattctgtgaaataggttctgatgactgctatgttggcgatggctactcttaccgagggaaaatgaataggaccagtcaaagcagcatgcgtgcctttactgggaactcccaagctcctcttggagggagaaattacaacatgtttatggagggatgcttgaaaacccatgggattggggaaacaccaatttctgcagaaaacccagatgccgacgaaaaagccctggtgctttattaaagtcacccaatgaccacggtgaa

SEQ ID NO: 62861 - DNA, 577 bp, Homo Sapiens
aaagaatctttgtactttaggacattaaattgtacaacttgtgtatatataaaagcttaggaactttctgttagcagggaaggcaacacattcctacacttttaatgtatatgtttgttataatgtccatgtaaaacatgccctatgtttgtgccttttaattagtttgtctcaataaacaaaatgtagagaaaaatatgtagctatgactttgttacaactgttcttatccacagtacaaaaatggtttgtttttaatatgtagagcattatgtgtggactactggaaggactcgtgtggggaaagcccaagaatgaccttgctgaggcctggattgggaggcacagtggccacatttggaggaagttcacatttcctggcatgcagacccaaaactgggttctggctctgcctgctgggatctgttatctctggtgggctggcagtcataattcacaattcagacagcccaggcttcctccacagtggtccaaggagcagtcctcagtgggggcaggtgtgggccctacccctaagctagaatgtggttgtcagaaccctgaaagtattagttct

SEQ ID NO: 62862 - DNA, 697 bp, Homo Sapiens
tgtggacaagggggagagcgcacctgttcgtaagaacacacgccaattctatgatggcgaggagtcttgctacatcattgatgccaagcttgaaggcaacctgggccgctacctcaaccacagttgcagccccaacctgtttgtccagaatgtcttcgtggatacccatgatcttcgcttcccctgggtggccttctttgccagcaaaagaatccgggctgggacagaacttacttgggactacaactacgaggtgggcagtgtggaaggcaaggagctactctgttgctgtggggccattgaatgcagaggacgtcttctttagaggacagccttcttcccaacccttcttgaactgtcgtttcctcaggaactgggtcttcctgattgttgaaccctgacccgaagtctctgggctagctactccccccagctcctagttgatagaaatgggggttctggaccagatgatcccttccaatgtggtgctagcaggcaggatcccttctccacctccaaaggccctaaagggtggggagagatcaccactctaacctcggcctgacatccctcccatcccatatttgtccaagtgttcctgcttctaacagactttgttcttagaatggagcctgtgtatctactatctccagtttgtattatttcttgaaagtcttttaacaatatgataaaacta

SEQ ID NO: 62863 - DNA, 252 bp, Homo Sapiens
gaccccaacgacttgccctgtgggaaggccgctcaaatgcccaaatcagagattaccaaagaatcggcgatgtcatgctgaagaacattcagggcatgaagcacctggcggctcacctgtggaagcacagcgaggccttggaggccctggagaatggaatcaagggctcccggcggctggagaacttctgcagagactttgagctgcagaaggtgtgttacctaccgctcaacaccttctctcctcaacccc

SEQ ID NO: 62864 - DNA, 272 bp, Homo Sapiens
cgcgggcgccgagaggagaggcgaggcggtggagcgcaagcggcggtggccacgtgccacgtagttcccggctagtggtggcggcggcggttggcggtcgccccgtcgggcatggaataactcaagtcacctgtactggaaatcagtttgctgaaacttaatcaacgattcttgaacgttgaagaaaaggaggttccagccttgcgcaagaggagtgtggcccttcctggaatccctctggacacaccctcctagcatcctctaggaaagat

SEQ ID NO: 62865 - DNA, 628 bp, Homo Sapiens
actggaccttaaaggtcgcctgtgaccccggcatgaaccactgaaagtaagattttgcccccagtagaagaggctgggatcactgagatccacggacagtgtgaaaatatgactataacccctataggtacaactgtgaccctaacaaaggaaactgtatcccttggaaagcacactgtcccctccagaaacatatcagtcacccctgaagggcagactatgcctttaagaggggagaatttgacttctgaggtgggcactcaccccaggatgggtaacttgggtcttcagatggaagctgaaaacaggatgatgctgtcctccagccctgtcatccagctcccggaacaaactcctctagcttttgacaaccgctttgttcccatctatggaaaccattcctctgtcaactcagtaacccctcaaacaagtcctctttctctaaaaaaagaaatcccagaaaactctgctgtggatcaagaagcctaagcccctctggtgtcagaaaccagggaaaacccttgtcttttcttctaagtgacatgttggaagccttctcatcccggggcaaagcaggcatcaaaaccagaataggccaatctcttttccattaaataaacaataaaca

SEQ ID NO: 62866 - DNA, 571 bp, Homo Sapiens
gccgccgattcctcgacttgggcgcatgattgattgggtccctgtggagtccctgctgcggccgcttaactccctgggtgccgttggacctctcaggcattcagacgagcgacgccgccttcctcacccagtggaaagacagcctggtgtccctcgtcctctacaacatggacctgtccgacgaccacatccgggtcatcgtgcagctgcacaagctgcgacacctggacatctcccgagaccgcctctccagctactacaagttcaagctgactcgggaggtgctgagcctctttgtgcagaagctggggaacctaatgtccctggacatctctggccacatgatcctagagaactgcagcatctccaagatggaagaggaagcggggcagaccagcattgagccttccaagagcagcatcatacctttccgggctctgaagaggccgctgcagttcctcgggctctttgagaactctctgtgccgcctcacgcacattccagcctacaaagtaagtggtgacaaaaacgaagagcaggtgctgaatgccatcgaggcctacacggagca

SEQ ID NO: 62867 - DNA, 1070 bp, Homo Sapiens
  misc_feature (595)..(631): n is a, c, g, or t
aatcgcactcccaggctcctcgggactcggcgggtcctcctgggagtctcggaggggaccggctgtgcagacgccatggagttggtgctggtcttcctctgcagcctgctggcccccatggtcctggccagtgcagctgaaaaggagaaggaaatggacccttttcattatgattaccagaccctgaggattgggggactggtgttcgctgtggtcctcttctcggttgggatcctccttatcctaagtcgcaggtgcaagtgcagtttcaatcagaagccccgggccccaggagatgaggaagcccaggtggagaacctcatcaccgccaatgcaacagagccccagaaagcagagaactgaagtgcagccatcaggtggaagcctctggaacctgaggcggctgcttgaacctttggatgcaaatgtcgatgcttaagaaaaccggccacttcagcaacagccctttccccaggagaagccaagaacttgtgtgtcccccaccctatcccctctaacaccattcctccacctgatgatgcaactaacacttgcctccccactgcagcctgcggtcctgcccacctcccgtgannnnnnnnnnnnnnnnnnnnnnnnnnnnnnnnnnnnnttgctaactgtggtctttgtggctacttgtttgtggatgggattgtgtttgttagtgaactgtggactcgctttcccaggcaggggctgagccacatggccatctgctcctcccctgcccctgtggccctccatcaccttctgctcctaggaggctgcttgttgcccgagaacagccccctccccttgatttaggggatgcgtagggtaaagagcacgggccaggggtcttccagtcttctttgggaccctggggagggtttgcaacacttatgccattcattcttccatgggactccttttcacctccttttaacaaaaaacctgggcttccctttatccccccctggatcccaaatcctgaaggggtcttctttaaacaacctggggagaatacacaaaaccacagggaagcctttggggggaacccccccacgcga

SEQ ID NO: 62868 - DNA, 1369 bp, Homo Sapiens
tggaccggtccggaattcccgggatggccttgtgcagcgggcagcgagcagcccagggagccaggccccagacaccgcactcagggccatggccgacaggggcccgtggagggtgggcgtggtgggctatggccgcctcggacagtccctcgtctcccgcctcttggctcagggaccagaacttggcctagaacttgtttttgtctggaatcgtgacccaggacgaatggcagggagcgtgcccccttccctgcagctccagaaccttgctgcccttggggaaaggcgccctgatctggttgtggaagtggcccatcccaaaataatccatgaatctggggcacaaatcctgcgccatgccaatctcctggtggggtccccctcagctctaagtgaccagaccacagagcggcagctcttggaggcctcacagcactgggaccacgccgtgtttgtggcccgaggggccctgtggggcgctgaggacatcaggagattggatgcagctgggggcctccggagccttcgtgtcaccatggccacacaccccgatggcttccggcttgagggacccctggctgcagcccacagccctgggccttgcactgtgctctacgaaggccctgtccgtgggctctgcccctttgccccgcgaaattccaacaccatggcggcggctgccctggctgcccccagcctgggcttcgatggggtgattggggtgctcgtggctgataccagcctcacggacatgcacgtggtggatgtagagctgagcggaccccggggccccacgggccgaagctttgctgtgcacacccgcagagagaaccctgccgagccaggcgcggtcaccggctccgccaccgtcacgggccttctgggcggagcctcctgggctgctgccagctcccctccagggcgggggatccatctctgctgagaagcctcctccctcccgagacaagatcatctgcctggccttcttaccaccaccatcccacccctgccctgccccacttccccagggtctcccttctgactcagtaaagatcaccgctgcctccccccgtgcaagaagaaaaggcacccagcaccacaacgcataatccaaacaaaatccagcaacagcgtagcggccaagtacgaatttaatgctgaaacacatacgaatgtcaacacaaaccctaacccacaaagaaacgcagcggcgcggtggcccgtcataattgacattgatatatctcgcaaggagggagacacctctatcttgctactacacggtgattgacgacttccttcacgtcttactctccaatagacgcgcgctgccaactatactagatagagtgctggtgttctctaataa

SEQ ID NO: 62869 - DNA, 860 bp, Homo Sapiens
tggcctgcacggctgcaagggaggctcctgtggacaggccaggcaggtgggcctcaggaggtgcctccaggcggccagtgggcctgaggccccagcaagggctagggtccatctccagtcccaggacacatgcagcggccaccatggccacgcctgggctccagcagcatcagcagcccccaggacctggggaggcacaggtggcccccaccacccggaggagcagctcctgcccctgtccgggggatgactgattctcctccgccaggccacccagaggagaaggccacccctgcctggatggcacaggccatgaggggctctcagtgaggtgctgctgatgtggcttctggtgttggcagtgggcggcacagagcacgcctacctggcccggccgtagggtgtgtgctgtccgggctcacggggaccctgtctccgagtcgttcgtgcagcgtgtgtaccatgcccttcctcaccacctgcgacgggcaccgggcctgcagcacctaccgaaccatctataggaccgcctaccgccgcagccctgggctggcccctgccaggcctcgctacgcgtgctgccccggctggaagaggaccagcgggcttcctggggcctgtggagcagcaatatgccagccgccatgccgggaacgggagggagctgtgtccagcctggccgctgccgctgccctgcaggatggcggggtgacacttgccagtcagatgtggctgactgccgtgctaggaggggcgtgctgtccccatgcgctgcgtcaatcaccgccggcctgttactggttgccagtgttgggacggggccacagcctgtctggcgtacggtacacttctgtgctgcc

SEQ ID NO: 62870 - DNA, 1048 bp, Homo Sapiens
gctggatgtgttgtgttcctggcttccctctggatgctgacagaaacaagggaatttctgctgaagtgacaaggcaagccagagccaaagcaggttggacccagcttgtccccacagagacgtgtgcttccctctctctctgagagcgacctgttaaccgcgagaatacctggaaggtctgggacatggagaacgacccctcgagacgaagagagtccatctctctcacacctgtggccaagggtctggagaacatgggggctgatttcttggaaagcctggaggaaggccagctccctaggagtgacttgagccccgcagagatcaggagcagctggagcgaggcggcgccgaagcccttctccagatggaggaacctgcagccagccctgagagccagaagcttctgcacgggagcacatgcagctgtttcgactggctcggcacaggcctgctctgcactgggcatctctgccttcctgctggtggcctgcctcctggcatttccagagggccctggctctgtttgtcctcacctgtgtggtcctcaccttcctgggccaccgcctgctgcaacacggcttctggggccaacagctgacgcgcgcgcttcttgtccccgcctcacgggccatcccccgccttgctgctctgcttccacgcaggcgatcccagcgccatgccacgcccgcacggcactgaactcacgtacctccctcagatcacctggcaccgccgtgcgcccccacacgcccgccaggcaaaccaactcccctgcgaaggcgcaggacccccaccagcagcctcgcaccgcgggcacccagcgtgcctggcgtatcccccactttcagccctccaaagggcatcctgactgtaacccaagccagccgtccctctgcgaccacacagattccgcagcatcctcgctgcctctccaacacctgcattccccttgccagcccctgcgaacaacctccacacgcaacgtcccccgggcacgcagcacgcccgcctgtgcccaccaccacctccggcactcccggcccac

SEQ ID NO: 62871 - DNA, 993 bp, Homo Sapiens
gaggaagacaggcagccggcgccacccgctcggcctcacgaagatgctccctggagcctgggtgctctggacctccctcctgtctcctggccaggcctgcccagccctgtcccatgggttgtgactgcttcgtccaggaggtgttctgctcagatgagtgagcttgccaccgtcccgctggacatcccgccatatacgaaaaacatcatctttgtggagacctcgttcaccacattggaaaccagagcttttggcagtaaccccaacttgaccaaggtggtcttcctcaacactcagctctgccagtttaggccggatgcctttggggggctgcccaggctggaggacctggaggtcacaggcagtagcttcttgaacctcagcaccaacatcttctccaacctgacctcgctgggcaagctcaccctcaacttcaacatgctggaggctctgcccgagggtcttttccagcacctggctgccctggagtccctccacctgcaggggaaccggctccaggccctgcccaggaggctcttccagcctctgacccatctgaagacactcaacctggcccagaacctcctggcccagctcccggaggagctgttccacccactcaccagcctgcagaccctgaagctgagcaacaacgcgctctctggtctccccccaggtgtgtatggcaaactgggcagctgcaggagctcttccctggacagcaacaaccatctcggaagctggcccctcaagtgttctcccaaatcttcttgctagagaggctgtggctgcaacgcagcgccatcacggcagcctgccggtctccatctttgactcccctgggttattcttggacctttctgagcttgccgtgggaacatggcttcgggtccctgcctgccggctcttggccacacccatgcctgttggctgctctgacccatacccgttgagactgtcgtgaggcccttgccaccggccactgggttccta

SEQ ID NO: 62872 - DNA, 843 bp, Homo Sapiens
  misc_feature (277)..(567): n is a, c, g, or t
ccatactgcggaggcgacaccagcatagctcccttcgtggcttcctcaaatcaggtctgggtaaaatttcatgctgattatgcacggcgtccatccgcattccgattaacttgggacagctaagtgggtaacaactcgtgttcactcagcactttccctctgcagcacgctggacagcactctgccatcctgatacatgacccctgctgatgccacagagaataagctgaacttgtatggtttttcaccaaaccatggatagaatcaatatttgtannnnnnnnnnnnnnnnnnnnnnnnnnnnnnnnnnnnnnnnnnnnnnnnnnnnnnnnnnnnnnnnnnnnnnnnnnnnnnnnnnnnnnnnnnnnnnnnnnnnnnnnnnnnnnnnnnnnnnnnnnnnnnnnnnnnnnnnnnnnnnnnnnnnnnnnnnnnnnnnnnnnnnnnnnnnnnnnnnnnnnnnnnnnnnnnnnnnnnnnnnnnnnnnnnnnnnnnnnnnnnnnnnnnnnnnnnnnnnnnnnnnnnnnnnnnnnnnnnnnnnnnnnnnnnnnnnnnnnnnnnnnnnnnnnntagaaaagaaacgaaaaaaaccagaatcaatatttgtacattttctcgaacatagaatatagcttctttagtcttggagtgtgcatttcattctaatattttgagctgaaatttaagaaaaaactttgaaagacgttggaaactgattatggcatattgtgaccatacgtctttaaaagttcataataacccaggggcagtggtcatacccataatcccagcacgcttggaggccctgatggaaggactgcttgaaccctaggagttgaagaccag

SEQ ID NO: 62873 - DNA, 763 bp, Homo Sapiens
gttagggcatgtcaaccccacacgcctttggcacaatgaagtgggtaacctttatttcccttctttttctctttagctcggcttattccaggggtgtgtttcgtcgagatgcacacaagagtgaggttgctcatcggtttaaagatttgggagaagaaaatttcaaagccttggtgttgattgcctttgctcagtatcttcagcagtgtccatttgaagatcatgtaaaattagtgaatgaagtaactgaatttgcaaaaacatgtgttgctgatgagtcagctgaaaattgtgacaaatcacttcataccctttttggagacaaattatgcacagttgcaactcttcgtgaaacctatggtgaaatggctgactgctgtgcaaaacaagaacctgagagaaatgaatgcttcttgcaacacaaagatgacaacccaaacctcccccgattggtgagaccagaggttgatgtgatgtgcactgcttttcatgacaatgaagagacatttttgaaaaaatacttatatgaaattgccagaagacatccttacttttatgccccggaactccttttctttgctaaaaggtataaagctgcttttacagaatgttgccaagctgctgataaagctgcctgcctgttgccaaagctcgatgaacttcgggatgaagggaaggcttcgtctgccaaacagagactcagtgtgccagtctccaaaaatttggagaaagagctttcaaagcatgggcagtagctcgctga

SEQ ID NO: 62874 - DNA, 897 bp, Homo Sapiens
gggagaggcgccggggctgccgcccggtgctcggcgcgctctcgggagccgcccgcccgctggtcccggagccttccgggaggaagcggtgccggcagcgtccagggcgcgctctcgggcaccctcacctgccggcgcccggccgcttacccggcagggcgtgcgcagggtagggtgcgggaccggggggacctggaggcagaggggagaaccggcctgtccgcgccgcagcacagccgctgggagcgcctcagaccccgcgcggggcgccggctccatggcgaccgggctcggggagccggtctatggactttccgaagacgagcccgggagtccatgatgcatgtcacgtctgggtcgcgcggctggagacccgggactgcggagaagccggatcgtttccccctggaactttctctctcatgattgtgtggatcagcaggcgctcagaagcctgtgcgtgcttatcccggcgggaactgggggacacgctgcgtgtgtccctcccctcgttttgcaaagtctacggccaggattgtggatttcggagcctcggtgggggaggtgttcaaggctggtggcaggtgctccttggaaacttggggaggaagcttgcagccctgccattttttcctcccgaggattcaaagcccggcacctccggggtgggtggggagaggaaagcttaattgatctctttaattattagagcgactgaataagtccacgcctcccaggccggtcggtttcactggacaagggcttttgtctttaccttcacctctcttctttccgtgtcttccattccccccttttgaaacagtccttgctaaattaactgcctagtcctctctcgaccgagccacgctcgggtcctatgggattgttggtctgcca

SEQ ID NO: 62875 - DNA, 526 bp, Homo Sapiens
cccctctgatgcccaatgggaatgaccaagtgtcgggaactcacatcggtgatcgtcccctcgtcttaagacccagcccgctctgtgtgagcctctggggctccctcgctcagtgagcacagttccccggggttcatgccagagctccggctgaagcaagaagtcctccagctgcgtcgtttgccgcctgtggacgagtgcgccccagtttctgccctggcagctcctggccacaccttctcagagctcacctgtgcacttctaaattgaattggcccacggtgtccaaccaagaaggagcatctgcactccgagaaagatgtgttctgtaactgccccagtgtgaccccgcagtggctctcggtgctagatatgcatgactaagattgatgctgggcaaaatgtagatgatctttcattatgttgtgggcagcgtctttctctgcctttgctatatgcagtcagcagtaagccttttgctaaaagagttttgtttgacttctgagatccaaggctgattgttgtt

SEQ ID NO: 62876 - DNA, 502 bp, Homo Sapiens
gggcctatttccctcaaaacccggagtggggcctttggggtcaccccttccaattgaaccgactggggagtccccatccgggaaaattgggggttcgttcccggggaagaatgtgactcctgagacaattccggaagggacccattggcttttgcgagacctggaagctatggcccagaatcacaggcgcagagcccatcttcattgatgccaacttccagagcacagtccctggaggacccattggagggcaaaccagagttactctgaggaacgagcatctgcagtacatcgtgacctggtatggactctctgcagctacatcctacctgtggtttaagaaattcctacgtgggacacctggtgtgtgacagatcagctgctgaagccctgtccctggataatgcagtatttcaagactgcctttatgctggatcatgtgctactggtataaagttctggccttctaccttaaatgagctcatgaccggttcatcataaa

SEQ ID NO: 62877 - DNA, 483 bp, Homo Sapiens
atggggagcccttttgggatattaaacttgagtaagatatgagcatatttgcatcttgaaaaatcattatgggaagatggctgggaagagaggaggagtggcagaagaaagataggttggagacaattgattgctcgatgatataaaatgttaagtaccatgaatgatgctgttaggctggaatgcgccaagcataaaggtggggcatggcatcaaaaggtaggtcaacatattaaataattccatgtattgaaatatccagaaaatatatagacagatctatagagatagaaactggtctgcccaggactaggggttgtctaaggataaggagcttcttttttggatggtgaaataacctaaaatatattgtgccattgtttgcacaactttgtgaatatattaaaaacctgttaattgtactcactaaatgtcctccttttaaattaagctgttcttgacaagaaaaggaaagaaacaaag

SEQ ID NO: 62878 - DNA, 576 bp, Homo Sapiens
ttgcttttttcatgggggaggcggggttagtatttatagtcctaacaagtccagtaattttttataaatcttcagattataaacagcccctaaaaactttacaacgtttacacagttttttaaaaagagactgtatacacttgatttgctttcaaaataaataaggtcagctagtctaggaggttaacgtcgggtaggaatgctgatcatgataggtttggttttctacagattctgttccggtgcctttcctatccaggcaccacctgagaaagttgtcatttgaggtcgcacttggaagttacatctgtgaagtttctgtcattcgtccagatctgtgtgtgtagcatgtgctgaggaagcacgtgctgggctgtgcctcagacagtgcatcaccgggcacccagaggcttgcctggctattcctgttctggtgtgtgtggagtgttggggaggaacagatgcagatcaacctgtggctgttttcccgtctaggttctcacaggtatctcctgacagaggtacttaacaatggctctgctggaaatttctataaataaaatgtccaaaatggtg

SEQ ID NO: 62879 - DNA, 376 bp, Homo Sapiens
gttcccatggaatctgtcctaaactggtgtttttgtcagtgacagtcttgccagtcagcaatttctaacagcattttaaatgagtttgatgtacagtaaatattgatgacaatgacagcttttaactcttcaagtcacctaaagctattatgcaggaggatttagaagtcacattcataaaacccaagtgctatgggtgtattattcatgatagctggcccacaggtcatgaattgaggaggaatttgctttcaaaaagcaagaatgtccaacactgaaagtttatagttttatatttggaccttgaaaggtaagaaaaaaccaggttctccaaagttaggaatagggaactaatttatgaaacagccatcttaaa

SEQ ID NO: 62880 - DNA, 521 bp, Homo Sapiens
  misc_feature (54)..(70): n is a, c, g, or t
tgcacacattttgtaccttttgatatttttctaaagatcactgaggctattaannnnnnnnnnnnnnnnncttctgttctctagattttgtaatttctatggatataacatcaagtttctgtgtccttcttctgaccataagctgttggtttctttcagggtgcctttaattagattgaagaagtccttttttccagcaccatttattgaagatactattctttcctcattcttgttcttgacacctttgtagaagattagttaaaccttatatgagtgggtttatttctgtgctttcaattctgttccattgctctatgtgtgtttttatgccagtactctattgttttgattgctatagctttataatataatttgaacacaggaagtgtgatgcttctggctttgtccttcctgtgtggttctctttgtgttttttaaaattcagtgttggttgagctttttttaaaaaaatctgcaattcaatattttcatcaatatttttttctctccctttttgg

SEQ ID NO: 62881 - DNA, 235 bp, Homo Sapiens
tagatgagatttgcccacatagatggagatcatctgacactgctgaacgtctaccatgcttttatactaaatcatgtatcggttcagtggtgttatgacaacttcattaactagcaggtccctgatgtccgcagacaatgtatcgccagcagctatctcgaattatggacagatttaatttgcctcgtcgaagtactgactttacaagccaggggactattatattaatataaga

SEQ ID NO: 62882 - DNA, 591 bp, Homo Sapiens
  misc_feature (30)..(30): n is a, c, g, or t
ggcctcaagtcttgtatgggactcaagatnggagacacggtgagcttcagcattggggccaaggtgcgagtctgtccccaggagaaggagaattcctttaccataaagcccgtgggcttcaaggacagcctgatcgtccaggtcacctttgattgtgactgtgcctgccaggcccaagctgaacctaatagccatcgctgcaacaatggcaatgggacctttgagtgtggggtatgccgttgtgggcctggctggctgggatcccagtgtgagtgctcagaggaggactatcgcccttcccagcaggacgaatgcagcccccgggagggtcagcccgtctgcagccagcggggcgagtgcctctgtggtcaatgtgtctgccacagcagtgactttggcaagatcacgggcaagtactgcgagtgtgacgacttctcctgtgtccgctacaagggggagatgtgctcaggccatggccagtgcatctgtggggactgcctgtgtgactccgactggaccggctactactgcaactgtaccacgcgtactgacacctgcatgtccagcaatgggctgctgtgcagcggccgc

SEQ ID NO: 62883 - DNA, 379 bp, Homo Sapiens
tcatgacaaatcaactgtgaccctcgctccttccatttctgtccattagaaaccagccttttcagcatctcacccattagcagccccatcacccagtgatcagtcgcctcagtaaagcagatctgtggatggggagcctacgggtggtaagaagtggtgtattgtgtttcatctccagcttggctattccatcgacccctacggcgaggtgatcagggagctaggcaccaatgggcccccggccctggatttgggaccttgtgatagagggatgatttgctcacatgacctttgagtaaacttaacacgttcccagtcatggaacgggacactcttcaagacccagtcccctgtatgcctcttctaatatcagggtacc

SEQ ID NO: 62884 - DNA, 453 bp, Homo Sapiens
catcattttggtattaacaaaccagagaagatcataccatctcctgatgactcaaagtttctactgaagacctttacgcatattaaatccaatgtgtctgctcctaataaaaagaaagttaaggaaagtaaagagaaggagaagttggagaggagattacttgaagagttgctgaagatgttcatggactcagcatccttttattatagcttgacctatgacctgcccaattccgtgcagaggcagagcactggggagagggacggtcggcccctctggcagaaggtaccactcacagctcgtagagcagggtttgcacttgggaagaagtgatggcctgttttggcttttgtaggaaaactgaaataatgtgtttctgaactattgttcctgcaccttttctaggttgatgaccgatttttttggaataaatacatgatacaagatcttggg

SEQ ID NO: 62885 - DNA, 1744 bp, Homo Sapiens
  misc_feature (727)..(727): n is a, c, g, or t
cgataggatcttgcgaccctgagacctgcagctgcagcctggcaggcatcaagtgccagatggaccacacagcattcccctgtggctgctgcaggagggctgtgagaaccccatgggccgtgtggaatttaatcaggcaagagttcagacccatttcatccacacactcacccgcctgcagttggaacaggaggctgagagctttagggagctggaggcccctgcccagggcagcccacccagccctggtgaggaggccctggtccctactttcccactggccaagccccccatgaacaatgagctgggagacaacagctgcagcagcgacatgactgattcttccacagcatcttcatcagcatcgggcactagtgaggctcctgactgccccacccacccaggcctgcctggccctggcttccagcctggcgttgatgatgacagcctggcacgcatcttgagtttcagtgactctgacttcggtggggaggaggaggaagaggaggaagggagcgtggggaacctggacaacctcagctgcttccatccagctgacatctttggtactagtgaccctggtggcctggccagctggacccacagctattctggctgtagcttcacatcaggcgtcctggatgagaatgccaacctggatgccagctgcttcctaaatggtggccttgaagggtcaagggaaggcagccttcctggcacctcagtnacccagcatggacgctggccggagtagctcagtggatctcagcttgtcttcttgtgactcctttgagttactccaggctctgcagattaataagtctggggcctcactacacatcacagaaggtgtctgacagcctggacaacatcgaggcacctcacttccccctgccttggcctgtctccacctggggatgccagcagttgcttcctggagtccctcatgggcttctccgagccagccgccgaagccctagatccctttattgacagccagtttgaggacactgtcccagcatctctaatggagcctgtgccggtgtgaggaccaggatgtcttttcccagccccaagagacctgttgctgctttcttgtaattatggggctccccagagtctgcgtaacagtctcccactggctggctcacccacaggtgccatgtgcacaactcctggttttcaaacaattctctggatttatttatttgttttaacttttctgtgctgaagagaggactagggggagggggcttcccctttcagctgcccggccccccacacccacagcttgctcttctatctccacaacgtgagcctggaagaggagaaaatgtggctcctctggagcttggcagaccacttttcggtctttgcgtgatgttccttagcccaaagacggtgagacagggctgaaatcaggtggcttctgccaccctgagccctagacccatgggtggctaaatccactggactgtgaagactataatttatttccataatttatttggagattgaggaggctttggttgcacttctttggctggtgggtaatgccaggggtggggtgggcacaggccctcaagagccccttttgccttgtagtcctacaccttgccctgcactgggctttggtgcagactaggtgtggatttgagctctgtgatctatgtctgctgcctggctcctagatggctctgtgggcaggtgcttgccaaggacatatctatgcaaggggagagcc

SEQ ID NO: 62886 - DNA, 256 bp, Homo Sapiens
atacccctattccttggcttatcgggcttctgcactcatctatggccagcagcagcagcataagacgtaccatggctcccaggtctatgtcaccttacgccgttaggctatctacctggtggcaggagctggtggcgcctcaatacctggccacggcaggccaacctcctgcgccactaccccacagaggaagcggagcaggcgctggagctgctctcagagatggaagagaacgagccctacccggcggaatatg

SEQ ID NO: 62887 - DNA, 626 bp, Homo Sapiens
aagactctgttcatgccttaggcccagtctcaaaggaagccacaaggcgcgggggccactgaggaaggaaatgttcattttcatttgtccaaaaccaccttaagttttaagtatattaatcttgatgctttttaaatattgctttttaacttgctgagatttagaaatactgttataaaaacttttttaatttctgtatttttttctgtattgtatcttcatgggacattaggggttttctatggtaagcacacctatggttttggtaaaaacattatcaaatatatatccagacggttcttccctagaagaaaaacaagtctttacacctgataaaatattttgcgaagagaggtgttctttttccttactggtgctgaaaggaaggatggataacgaggagaaaataaaactgtgaggctcaaggctggtgttctccacttatttcagcgacaagctggggccaggcctcaggggcacgcctgggggcaggggagggagttcctgcccccaactgcaggacaggcactgcccaagtctgccctgaatccgaggacaccggaactctgctcatacaggcggctcggctggcctggcacaagcctcaccttctaagctgcgagcca

SEQ ID NO: 62888 - DNA, 920 bp, Homo Sapiens
ggaggagtgaggtcaattgccctttagtcccaggactaaccggaagcttctgcaacaggaggacattgaaaataagatggaacccatccacataaggatttgcctcaaagggcactgcaaaaattgaacagaggaatcccaaggaagctgcctgaatttgcctgtatactctcgttctgcgacttataaaggaccagacaaatcaaattagtggttttggtttccgccagctgtggatgcctttgacattatgaccgcagaggattccaccgcagccatgagcagtgactcggccgccgggtcctcggccaaggtgcccgagggcgtggcgggcgcgcccaacgaggcagcactgctggcgctgatggagcgcacgggctacagcatggtgcaagagaacgggcagcgcaagtacggcggcccaccgcccggctgggagggcccgcacccgcagcgtggctgcgaggtcttcgtgggcaagatcccgcgcgacgtgtacgaggacgagctggtgcccgtgttcgaggccgtgggccgcatctacgagctgcgcctcatgatggactttgacggcaagaaccgcggctacgccttcgtcatgtactgccacaagcactaggccaagcgcgcagtgcgtgagctcaacaactacgagatccgcccgggccgcctgctcggcgtgtgctgcagcgtggacaactgccgcctcttcatcggcgggatccccaagatgaagaagcgcgaggaaatcctggaggagattgcccaggctccccgagggcgtgctggacgtgatcgtctacgccagcgcggccggccagatgaagaaccgcggcttcgccttcgtggagtacgagagccaccgcgcggctgccatggctcgccgcaagctcatgcctggcgcatccagctgtggggcc

SEQ ID NO: 62889 - DNA, 291 bp, Homo Sapiens
taggcgagccgatccagaccgtagagtccatccgagttcctgggaagggaaatagaggacatgggcgtgaggcttcaagggtgggttggtttgatctgagcacatcaggtagctcttttgacaatggcccttcaagtgcctctgagttggcatcccttgggggtgggggcagcggaggcctcactggctttaaaacagcaccatacaaggaacgggcacctcaatttcaggagagtgtcggcagctttcgttccaacagtttcaactcaacatttgagcatcatcttcccc

SEQ ID NO: 62890 - DNA, 304 bp, Homo Sapiens
accgtatgagagtgacacggcctgcacctttgatcccctgacagcatcattaagggcagattgtcattcctgttttacaggatgagaaagctgtggcttggtaaagtgattcattgcctagaggagttatagtaagtggtgaggctgaagccctgattttcagcccccacacacctggattttttccatgttttcatgtttgtctgttctttctgtatttcaagtctcttcaaatcccgactgctgccttctgccttcaccactcgtgtgcactgtaaatgcgtgtgcactcaaagtgcgggtc

SEQ ID NO: 62891 - DNA, 706 bp, Homo Sapiens
gtggccaggaacacatttaagcgtgtgaggaacggattcctaatgaggaaagtggctgttttcttctgcaacacacccacaagagcatccccacagctcagagaggctgtgctcaaactctcagatgcggggatcacccccttgttccttacaaggcaggaagaccggcagctcatcaacgctttgcagatcaataacacagcagtggggcatgcgcttgtcctgcctgcagggagagacctcacagacttcctggagaatgtcctcacgtgtcatgtttgcttggacatctgcaacatcgacccatcctgtggatttggcagttggaggccttccttcagggacaggagagcggcagggagcgatgtggacatcgacatggctttcatcttagacagcgctgagaccaccaccctgttccagttcaatgagatgaagaagtacatagcgtacctggtcagacaactggacatgagcccagatcccaaggcctcccagcacttcgccagagtggcagttgtgcagcacgcgccctctgagtccgtggacaatgccagcatgccacctgtgaaggtggaattctccctgactgactatggctccaaggagaagctggtggacttcctcagcaggggaatgacacagttgcagggaaccagggccttaggcagtgccattgaatacaccatagagaatgtctttgaaa

SEQ ID NO: 62892 - DNA, 788 bp, Homo Sapiens
  misc_feature (586)..(715): n is a, c, g, or t
gtttgcatgccactttgaatgtcatgtatgggagatgaatagaaagcggcaagttatccgccaacatgcagtttaaaaccgaaaccataccagaaaaatcaaaaataacattgactcttccaaccactgacatgttgtttaataatctaagcggcagtcctggaggctaccagacttactgagttctacctgagaaacagccaagcaaagtgtgagagaagggttaagactggcttacaatgagatgcttcaaatgaaaagggaattatgagtaaaattgaactttgatgggggattcagttctggaaaagaatttggtattttccagtctgctaggaccaattaccttgaaatattttaaaatctcagtaaatagttattgctgaaatggctgttggcagttcttattaatgattcagagaagagcaaatagaccttaacttcattttgacatagaccacattaccatacccgagtgagtaatgacaggactacaacttttacattaacaacattaatgatgaccataaaaagtcactaaattgctaaatgttataatttagagttgacataaaaattgatgtcnnnnnnnnnnnnnnnnnnnnnnnnnnnnnnnnnnnnnnnnnnnnnnnnnnnnnnnnnnnnnnnnnnnnnnnnnnnnnnnnnnnnnnnnnnnnnnnnnnnnnnnnnnnnnnnnnnnnnnnnnnnnnnnnnnttactcgggcatggtggtaggggcctgtcacccagctactcgtggagccaaggcaggagatgtatacgacggc

SEQ ID NO: 62893 - DNA, 544 bp, Homo Sapiens
  misc_feature (150)..(150): n is a, c, g, or t
gaaggcgcaggggcagctgaggtcaagaagagggttcccagctgagaacgaagaggcccccgagaagaacgagaatgagagtcagccgggcacagctcggggcaggagctcggctccgaggcccggggcctgcgctcaggcacctcggcngaccgcagggagtccaaggcctacggctccgtcatccacaagtgcgaggactgtgggaaggagttcacgcacacggggaacttcaagcggcacatccgcatccacacgggggagaagcccttctcgtgccgggagtgcagcaaggccttttccgacccggccgcgtgcaaggcccatgagaagacgcacagccctctgaagccctacggctgcgaggagtgcgggaagagctaccgcctcatcagcctgctgaacctgcacaagaagcggcactcgggcgaggcgcgctaccgctgcgaggactgcggcaagctctttaccacctcgggcaacctcaagcgccaccagctggtgcacagcggcgagaagccctaccagtgcgactaatgcggcc

SEQ ID NO: 62894 - DNA, 508 bp, Homo Sapiens
tggttccgctgctgtgggccccggctgcggtccgggccggcccagatgaagaccttagccaccggaacaaagaaccgccggcgccggcccagcagctgcagccgcagcctgtggctgtgcagggccccgagccggcccgggtcgagaaaatatttacaccagcagctccagttcataccaataaagaagatcctgctacccaaactaatttgggatttatccatgcatttgtcgctgccatatcagttattattgtatctgaattgggtgataagacattttttatagcagccatcatggcaatgcgctataaccgcctgaccgtgctggctggtgcaatgcttgccttgggactaatgacatgcttgtcagttttgtttggctatgccaccacagtcatccccagggtctatacatactatgtttcaactgtattatttgccatttttggcattagaatgcttcgggaaggcttaaagatgagccctgatgagggtcaagaggaact

SEQ ID NO: 62895 - DNA, 822 bp, Homo Sapiens
  misc_feature (664)..(664): n is a, c, g, or t
gggacctcacacagcaactaggcatggcctctggacctcaaagtccctctggaggaccacagctcaactagggcctaccaagccacagaccccagttcagttgtctctgtaggcggaggctcaaagactgttcgcgcagccacacaggtgtgatcagagccagtggtctgccctgcacagggcgttttgggccagaacttcctatttcactccagcagcagccagggcctgctatgactgagggttggaccctgaaagtgggactttctgtctccctctcttgctgcagaagaagagtcttcctgtatttgtgcaagtaaggagatgtgacttcttggctgggaaactcttgctgatctaactgtgtggtttgcacaacctccaagcctctgcagcagacaggcagggcttgctgtgttgctctgagctagagagggagcttggccatgttctctgaaaaggtccccttacattcactttgccacctgtaggccacaccccatccagctcccagcatcttcatcttaaaacagatcagatcatgtcactcttctctttaaacgcttctacggcctgtgcatttcccttcagatattatccaaactcatcgtcgtgaccttcaaaacccttgtggtctggcctctgttggcctcgctgacctccncctcccaattctttctctgccccccggactccagtatgacagtctgtctctccgccacaatttatttttgcccctaaagtttgctgtgcttataacacttcttttttccatatgtcaattcatttctcaagtcttagaagtagcagttaccaatcttg

SEQ ID NO: 62896 - DNA, 594 bp, Homo Sapiens
attgtttgagtctgtattctttcactttgatgtatttatgaatactgacaccattactactgttttaaaattactgtagctttaaaatcaggtttgaaatctagcagagtaagtcctccaacttattgcttcttcaataccgacttgcttattctaggttctttgattttcaaatacattttgaaactagctttcaaatttctctaaaatctcctactagaaatattaagcagtattgtgttgatgtaatatgctaacaaaattgagtcttccaagcaatgaacatgatatatatttatttagccttctttaatttttctcaccaattgcttttaggggccttgtacctgcttcattgcatgtattgttaagcatgtaatgattctggctgttaatctctattatgttttattgaatttcattttctagctgctaattgctagtatggagaaattaagatgatgaaatcaactttataaaggcataatttcggtacaacagactgcaccactttaaaatgtgtaattcattgcacgtttacaaatggatacactaacggaactactgccacaaccaagatagaggaaattccct

SEQ ID NO: 62897 - DNA, 515 bp, Homo Sapiens
gaggagggggcgacagagaaaaagagaggctgacttaataaagtttcctgaaacaacaactaccaccgaaaaggcccaaggtggggggagacccccattttcctccgcccctctcctaaagcctgagggaccgttgcaggtggagcggcgctggtgggacccgggttgcggcggcagccgttgccccggcgagggaagcctcaggtcctgcccgctccggttccggctccttcggtggtggcggcggcagctgctgccgggcggttcctcctgtcaactgcctccgcccgcgcgcctcccgcctagccacacagcgcggaggacgccgtgagccgccgccgcagtcgtctcggcccgcggagggacgtggtgagctgtggcgcttccgcgtcagcgccggcggggactctttgggagcgcgtcgggcccgagtccgggttcccccgcgtggtcagcggaggctgcgccaggtggggcccgcagccgcctcccacgccaggctgtccccgcggccg

SEQ ID NO: 62898 - DNA, 965 bp, Homo Sapiens
ctggcgtagggccgccatgttgcagcaggatagtaatgatgacactgaagatgtttcactgtttgatgcggaagaggagacgactaatagaccaagaaaagccaaaatcagacatccagtagcatcgtttttccacttattctttcgagtcagtgcaatcatcgtctatcttctctgtgagttgctcagcagcagctttattacctgtatggtgacaattatcttgtgttgtcgtgtgacttttgggcagtgaagaatgtcacaggtagactaatggttggcctacgttggtggaatcacattgatgaagatggaaagagccattgggtgtttgaatctagaaaggagtcctctcaagagaataaaactgtgtcagaggctgaatcaagaatcttttggttgggacttattgcctgtccagtactgtgggtgatatttgcctttagtgcactcttctccttcagagtaaagtggttggcggtggttatcatgggtgtggtgctacaaggtgccaacctgtatggttacatcaggtgtaaggtgcgcagcagaaagcatttaaccagcatggctacttcatattttggaaagcagtttttaagacaaaacactggagatgatcagacttcctgaatagagaaagcttatgtgctttgttacattggggaacaactgaagagattcttgactcaaccttttagagcttagtccatgttgcaacgaggagtgttggctttgtttttccacttaaaaactttatttataaaaaggaaaagtagttttcatattaagtttttatttcctttccagcagttggggctagaaagtatgtgttggcactaggaaacattgtcaaggtttgttctgtggtgtaggtatgcacattccataggtatgcacacggccatgtaatatcagtatatcccaagttaatgaaagtgttcatttacataggtaatggagac

SEQ ID NO: 62899 - DNA, 410 bp, Homo Sapiens
catcctacaaatgcagctggctacatcttcacaatcggagcatgcttgagcacctgcttcttcagtttgctgttcagcatggccaagtatttccggaacaacttcattaatccccacatctactccggagggatcaccaagctgatcttttgctgggacttcactgtcactcatgaaagagctgtgaagctaaaacagaagaatcttagcattgagataagggagaacctgtcagagctccgtcaggagaattccaagttgacgttcaaacagctgctgacccgcttctctgcctacatggtagcctgggttgtctctacaggagtggccatagcctgctgtgcagccgtttattacctggctgtgtacaacttagagttcctgaagacacacagtaaccctggggcggt

SEQ ID NO: 62900 - DNA, 951 bp, Homo Sapiens
cagaagcgatagcttcttaccgcacggtctgaaacttaagcctgattttcctgatgcttattgtaacttggctcattgcctgcagattgtctgtgattggacagactatgatgagcgaatgaagaagttggtcagtattgtggctgaccagttagagaagaataggttgccttctgtgcatccctcatcatagtatgctatatcctctttctcatggcttcaggaaggctattgctgagaggcacggcaacctgtgcttagatcagattcatgttcttcataaaacaacatatgaaacatccaaaagacttgaagctcaggtgatggtcggcttgcgtgtaggaatattgtgagttccgactttggggaatcatccttacttctcaccttattcaggtctatttcaaggcatgcacaatcctgataaatttgaggtgttctgttatggcctgagcccagacgatggcacaaacttccgagtgaaggtgatggcagaagccaatcatttcattgatctttctcagattccatgcaatggaaaaagcagctgatcgcatccatcaggatggaattcatatccttgtaaatatgaatggctatactaagggcgctcgaaatgagctttttgctctcaggccagctcctattcaggcaatgtggctgggataccctgggacgagtggtgcgcttttcatggattatattatcactgatcaggaaacttcgccagctgaagttgctgagcagtattccgagaaattggcttaatatgccccacacttttttccattggctgctcatgctaatatgttccctcccctgcggcccccagcagtcatcgatttttaacgtccaatgggcacatttatgacaatcggatagttctgaatggcatcgacctcaaagcatttcttgatagtctaccagatgtgacaattgtcaagatgaagt

SEQ ID NO: 62901 - DNA, 689 bp, Homo Sapiens
gatcccccgaacacgtcgtggctcctctgctcagattgagttttaagttacctaatttatgtattcagaatctattctaggtggccgtcaacgtaaactgtgtttccctattatatccctctggagactgagaatcaaattaaatagtctttcttcaaagcagtactgtaacatgaatgtatttatctcagtcaacagaacttatatgcccactgtatgtggagcttatttcaatgctaatttggcttagttagcagacctagaatctgcccaggtgagacctagaacaaaaatagctggggtgaaatggataagagaggtagaggtatatgtcaaggcagagccctatgaggaaggaagagttttcaaagaatatgaggaacatagtgctgagagtgtggctgccttcagcaccgtacacctaatctagagaaaatatttcccatgtgggaggtcctgtctgcattcagtccacccttttctgcctgcttcttcctccaagtgcctcaacctctacatgctcactctcctccccttccctcagcccatcttggtctaagcagctttcacaatccaaaccaaacatcaccagccacccgctgataagtcacctagcatttactttcctgagttactttttctccattcattgagactatggattcatcccaactccttctaaatccctc

SEQ ID NO: 62902 - DNA, 192 bp, Homo Sapiens
aatttttaacaatgagatgataccatgttacagcggtattacattaagatacatttaatatagccacaattaaagtatgtattatgtatttatgctggtgttctttcatgttatttcttctagtgaaaatttccaagtaaactgttattgagcatatacatttttaaaaaaataaaaccatacacccctaaa

SEQ ID NO: 62903 - DNA, 448 bp, Homo Sapiens
  misc_feature (61)..(69): n is a, c, g, or t
gggcctactggatttttttctattaacattgaaaggtaaaatctgattatttagcatgagnnnnnnnnntccaactctgcttttggtcttgcttctataaatatatagtgtatacttggtgtagactttgcatatatacaaatttgtagtattttcttgttttgatgtctaatctgtatctataatgtaccctagtagtcgaacatacttttgattgtacaattgtacatttgtatacctgtaatgtaaatgtggagaagtttgaatcaacataaacacgttttttggtaagaaaagagaattagccagccctgtgcattcagtgtatattctcaccttttatggtcgtagcatatagtgttgtatattgtaaattgtaatttcaaccagaagtaaatttttttcttttgaaggaataaatgttctttatacagcctagttaatgttt

SEQ ID NO: 62904 - DNA, 513 bp, Homo Sapiens
aaggagttttctggttcagaccgtagacagagaggccgagagggaccagttcagtttgaggaagatccttttggtttggacaagtttttggaagaagccaaacagcatggtggctctaaaagaccctcagatagcagccgccccaaggaacacgagcatgaaggcacgaagagggggaaggaataggcacaggtctctccaaagtgaatgaactgttacccataaccctaatgatgcacgtcatatgggggaacactttgtaaatggtcaggataaaaaccaaatctgggtgccagatcccagcactactttttattactggagaaatggggggggatagaaaattctactttgaattatttagttttttttaaagagatgggtgtgtttgtgcttctcccacctttcagcatttatagaacatgctgccccacatacaaagtcaagaccacttacttttatgtgacactagtagtttggggataatgttttgtgtaagaacagctgcatatg

SEQ ID NO: 62905 - DNA, 1120 bp, Homo Sapiens
  misc_feature (108)..(209): n is a, c, g, or t
caccgcagccttgaaatcctgggtttaagtaatcctcctgctttagtttgtcaaatagttgggactacagttgtgtgccaccatggctggctaagttctttaattttnnnnnnnnnnnnnnnnnnnnnnnnnnnnnnnnnnnnnnnnnnnnnnnnnnnnnnnnnnnnnnnnnnnnnnnnnnnnnnnnnnnnnnnnnnnnnnnnnnnnnntgagccactgtacccgccctaaaacatgtcaggtcttagcatttttatatttaagttcaactctaggcacttgtttaaaaaactccgtgttcagccaccaccctgcaaaaatcaaatcaacaaatttgttaataatttaaagcattgcaaacatttgtaagttacatttctagacaagaactgacaaaaccagtctcctctgaatttcataccagtagtaataaacataatgattacagaaaatatgacttttttcttcattcctaggccttgtcagcttcaaggctttaattgaagaatctgaaatgaagaaattcccagacaatgatcttttgcgacaccttcgcctagtcacacaggatgcagagaagtgtgcctctgttgcgcagcagttgcttaatggcaaaaggcaaactagatatcgatctggtggagggaaatcccaaaatcagttgacagtgaatgagctccggcagtttgtaacacagctgtatgctcttccatgtgtcctcagtcagacaccattactaaaggatctcttgaatcgtgtagaagattttcaacagcatagtcagaaactactctctgaggaaacgcctagtgctgcggagctgcaggacttgctagatgtcagctttgaatttgatgttgaacttccacagcttgctgagatgcgtatccgtttggaacaagcccgttggctagaagaggtgcagcaagcttgcctagaccccagctcccttactttagatgatatgagacgtctcatagacctaggggtagggctggccccgtattcagcagtggagaaagctatggcccggctgcaggaactgctcacagtgtcagagcactgggacgacaaagccaagagtctcctcaaggccaagccacggacatgttcgggggat

SEQ ID NO: 62906 - DNA, 719 bp, Homo Sapiens
taccccgatcttgtcgtggctcccccagagtcaaacagctataattgttactattaccgtaataataaaaaataagagcagctcacaggtactgttactgtgcacaggcacttttacacctgtgggaaaagattattttcgtcctcattttatagatgatgaaagtaaagcttcaagtcagttaaataatttgtcaagggttgcacacatttctaagtcccttctggctggcaccagtgcctggctcttaactggtattgtaagatgactcttcagtcctttcagtccttgtccagaaggattgaaggcctaaatatgccaagggacaggattcccaggcttaatccttcctttcccctgactggcaggacaagccttcagtggtatcgctgcagaatctaatcgtacgagacattgccaaccaggagaaagggatgtttctgatcagcgcagccccacctgagatgtacgaggtgcacacagcatcccgggatgaccggagcacctggatccgggtcattcagcagagcgtgcgcacgtgagtgtctgcctgccgcctgcatgtgcttatgacctcagggtacctgcagcattagatcccaaccatagaactccctgggaacagaatccagcattcagaggtgggggaagaggttgagggagagacaaaatggcccaagactggaaaggtcacctatgttcttatgtcctgtaaagcc

SEQ ID NO: 62907 - DNA, 901 bp, Homo Sapiens
  misc_feature (664)..(664): n is a, c, g, or t
  misc_feature (835)..(835): n is a, c, g, or t
  misc_feature (865)..(865): n is a, c, g, or t
gggggcagggccgcgtaggtccccgcccccagagtctggctttccacggctgcccgcctcgcgcgtcttccctgcccgggtctcctcgctgtcgccgccgctgccacaccatggccttcgtcaccaggcagttcatgcgttccgtgtcctcctcgtccaccgcctcggcctcggccaagaagataatcgtcaagcacgtgacggtcatcggcggcgggctgatgggcgccggcattgcccaggttgctgcagcaactggtcacacagtagtgttggtagaccagacagaggacatcctggcaaaatccaaaaagggaattgaggaaagccttaggaaagtggcaaagaagaagtttgcagaaaaccctaaggccggcgatgaatttgtggagaagaccctgagcaccatagcgaccagcacggatgcagcctccgttgtccacagcacagacttggtggtggaagccatccgtggagaatctgaaggtgaaaaacgagctcttcaaaaggctggacaagtttgctgctgaacatacaatctttgccagcaacacttcctccttgcagattacaagcatagctaatgccaccaccagacaagaccgattcgctggcctccatttcttcaacccagtgcctgtcatgaaacttgtggaggtcattnaaacaccaatgaccagccagaagacatttgaaatctttggtagactttagcaaagccctaggaaagcatcctgtttcttgcaaggacactcctgggtttattgtgaacccgcctcctggtttcatacctcatggaagcaatcaggctgtatgaaacgagtgacgcatccanagaaagacattgacactgctatgaaaatangaggccggttaccccatgggcccccatttgagcctc

SEQ ID NO: 62908 - DNA, 722 bp, Homo Sapiens
  misc_feature (48)..(48): n is a, c, g, or t
gaccagagttcagtttggcggttatgtgtggggaagaagctggaagtncaggggctgtttctgtggacagctttccctgtcctttggaaggcacagagctctcagctgcagggaactaacagagctctgaagccgttatatgtggtcttctctcatttccagcagagcaggctcatatgaatcaaccaactgggtgaaaagataagttgcaatctgagatttaagacttgatcagataccatctggtggagggtaccaaccagcctgtctgctcattttccttcaggctgatcccataatgcatcctcaagtggtcatcttaagcctcatcctacatctggcagattctgtagttggttttgtaaaggttggtggagaggcaggtccatctgtcacactaccctgccactacagtggggctgtcacatcaatgtgctggaatagaggctcatgttctctattcacatgccaaaatggcattgtctggaccaatggaacccacgtcacctatcggaaggacacacgctataagctattgggggacctttcaagaagggatgtctctttgaccatagaaaatacagctgtgtctgacagtggcgtatattgttgccgtgttgagcaccgtgggtggttcaatgacatgaaaatcaccgtatcattggagaatgtgcccccccaggtcacgactactccaattgtcacaactgttccagcagcct

SEQ ID NO: 62909 - DNA, 611 bp, Homo Sapiens
  misc_feature (102)..(102): n is a, c, g, or t
  misc_feature (226)..(226): n is a, c, g, or t
acttctgcatccatggagaatgcaaatatgtgaaggagctccgggctccctcctgcatctgccacccgggttaccatggagagaggtgtcatgggctgagcntcccagtggaaaatcgcttatatacctatgaccacacaaccatcctggccgtggtggctgtggtgctgtcatctgtctgtctgctggtcatcgtggggcttctcatgtttaggtaccatagganatggatggttatgatgtggaaaattgaagagaaaagtgaagttgggcatgacctaatttcccacctgaagagatacttgtgctcaaggaatcggctggggactgctacctcttgagaagacacaaggtgatttcagactgcagaggggaaagacttccatctagtcacaatagactccttcgtccccagttgccgtctaggattgggcctcccataattgctttgccaaaataccagagccttcaagtgccaaacagagtatgtccgatggtatctgggtaagaagaaagcaaaagcaagggaccttcatgcccttctgattctcttccaccaaaccccacttcccctcataagtttgtttatacacttatcttctgattagtat

SEQ ID NO: 62910 - DNA, 379 bp, Homo Sapiens
tggctggcatttattgaatgttcctcgcgtggagacattgttcgatctttcctgatttcatcgtgtgctgctgaccctgcaggcaggccttcacgttttaatcgggtttctcaccttctgcactaacaggagtatgtccagagagtgctgctggttgtcacagcattgtctgtccctgtcctcttcttgggaaagccactgtttttgttgtggcttcacaatgggcgtagttgcttcggggtgaaccgggtaagtgcgggtttggatgcatttacaactgtgagcaaagcttgctttcggttatacaaggattggtgtagaaaacacctcctggagggtccctgtctcttgatttaaaagccacgacagttcggggtgc

SEQ ID NO: 62911 - DNA, 833 bp, Homo Sapiens
  misc_feature (697)..(697): n is a, c, g, or t
ggtacatcactcataggtgctcaaaagtcacaatccattattacagcatcaactctaaatccaaaatcttatctgagtctcaccaactcaaaagtctcaaatctcacattgaagccatctaaattaagtttgggagaggatctgtgtgtgatttctgggacataattccaactgtgcacttgtgaacctagaaaacaagttatctgttcccaagtatgatggcatgacaggcagacaataatagttacacacgttcctgttcaaaaagcagaaacagatggaaaaaggagccatcagcaccaatcaatttacaaaaccagcgaggcacccttctttaagtttcaaggcctgggagtaatcttcagctcactgctgttctctgggcttgttgactgtctcagagtcatctttactttttcacaaaaggtagcacacgtttgcagctgagtatcaacttatcagtttgttcttcttttatattctctaaagctttctgttaaaaatggtggtgcttctgctgctataacgttgtcaagaaacttgtgggtcttttacatatgtcacagggatgcactcatttagataggaggctcctcacgtatctttcctggaaaattctgtctctgtttttgggctttttctgaaatagctgagaggatctatgattcacacctttaatatcttccaagagtcttgntgtgtgacctgatattcagacctttttgatgtttctgaagtattagcaaaaggttattacgccctaatcttcatcactttccctaaaagtaaaggcttgtcctgacgggggaaaccttagttttaaatgggctttt

SEQ ID NO: 62912 - DNA, 1271 bp, Homo Sapiens
agaccccgaggctggtcccattggaaaggaacgttcattaaaaaaatagaaaagtaaaagatgcccaacaggtggagccagaaggacaagagaaaccaagcccagctacagtcagaagcacagatcctgtcacgacaaaggagactaaagcagtctcagaaatgtctactgaaataggaacaatgatctcggtatcatctgcagaatatggtactaatgcaaaggagtctgtaacagactatactacaccctcttcttctttgcctaacaccgtggctactaataatacaaagatggaggatactttggttaataatgtgcccctgcccaacacccttcccctccctaagagggagactatacaacagagctccagcctaacttcagttcctcccactactttcagcctcaccttcaagatggagtctgcacgcaaagcatgggagaattctccaaatgtaagggaaaaggggtctccagtaacttccacagcacctccaattgcaactggagtcagcagtagtgccagtggaccaagcactgctaattacaattcgttctcaagtgcatccatgccccagattcctgttgcttcagtcactcctacagcatcactatcaggagctggtacatacactacctcttctttgagcaacaaaatctacaaccacatcggacccttcaaatatttgtaaagtgaaacctcagcagttacagacaagcagcctgccttctgcacgtcatttttcacagttaagctgtatgccttcccttattgcccagcagcaacagaatccgcaagtttatgtgtctcagtctgcagcagctcaaatcccagccttctatatggacacaagtcatttattcaatacccaacatgcacgattggctccgccatccgttggctcaacaacagggtttccaaccaggtctctctcagccaacttcagttcagcagatgtccaatccctatttatgcaccactgcaagggcagcatcaagcccaactgagtttgggggctggccctgctgtttcccaggctcaggaattgttcagctcctcacttcaaccatatagatctcagccagcttttatgcaaagcagtttatcccagccatctgtggtcctttctggtactgctattcacaactttccaactgtccaacaccaagaacttgccataggcacatatccggtcttgcctttcagcaaacatcaaatactcagcccattcctatattgtatgaacatcaactgggcggcatcagga

SEQ ID NO: 62913 - DNA, 627 bp, Homo Sapiens
ctatctgtctcagcttgggtttgacgtggtgggctatggctgcattgactgcattggcaacagtgggcctttacctgaacctgtggtagaagccatcacacagggagaccttgtagctgttggagtactatctggaaacaggaattttgaaggtcgagttcaccccaacacccgggccaactatttagcctctccccccttagtaatagcatatgcaattgctggaaccatcagaatcgactttgagaaagagccattgggagtaaatgcaaagggacagcaggtatttctgaaagatatctggccgactagagacgagatccaggcagtggagcgtcagtatgtcatcccggggatgtttaaggaagtctatcagaaaatagagactgtgaatgaaagctggaatgccttagcaaccccatcagataagctgtttttctggaattccaaatctacgtatatcaaatcaccaccattctttggaaacctgactttggatcttcagccccctaaatctatagtggatgcctatgtgctgctaaatttgggagattcggtaacaactgaccacatctccccagctggaaatatttgcaagacacagtcttgctgctcgctacttaacta

SEQ ID NO: 62914 - DNA, 303 bp, Homo Sapiens
  misc_feature (46)..(54): n is a, c, g, or t
attcttttactaccgttccactcgaaagaaaatttttaaagctttnnnnnnnnncgtatttcagaagtgtaatttttgctgtcttctctatcattaccattaaattttatcagacgtcaggaacttcgggaattaagatttcttcagaaagaagagcaaagagcccaacaacagctcaatagcaaactacagcaacaacgagaacaaattttccggcgctttgagcaggaaatgatgagtaaaaagcgacaatatgaccaggaaattgagaatctagaaaaacagcaagacagactatcgact

SEQ ID NO: 62915 - DNA, 801 bp, Homo Sapiens
gggagcggaggggaggtcgtgatggcggcgccggaggcggaggttctgtcctcagccgcagtccctgatttggagtggtatgagaagtccgaagaaactcacgcctcccagatagaactacttgagacaagctctacgcaggaacctctcaacgcttcggaggccttttgcccaagagactgcatggtaccagtggtgtttcctgggcctgtgagccaggaaggctgctgtcagtttacttgtgaacttctaaagcatatcatgtatcaacgccagcagctccctctgccctatgaacagcttaagcacttttaccgaaaaccttctccccaggcagaggagatgctgaagaagaaacctcgggccaccactgaggtgagcagcaggaaatgccaacaagccctggcagaactggagagtgtcctcagccacctggaggacttctttgcacggacactagtaccgcgagtgctgattctccttgggggcaatgccctaagccccaaggagttctatgaactcgacttgtctctgctggccccctacagcgtggaccagagcctgagcacagcagcttgtttgcgccgtctcttccgagccatattcatggctgatgcctttagcgagcttcaggctcctccactcatgggcaccgtcgtcatggcacagggacaccgcactgtgggagaagattggtttcgacccaagcttcactatcgagtgcccagccggggccataaactgactgtgaccctgtcatggtggcaaacctttcattcgaacccacgggttgggaagact

SEQ ID NO: 62916 - DNA, 650 bp, Homo Sapiens
ggataaccaccagggccactgccccccgtgcccctgcacctgaggaacgcgcccactagggtgatgaaggatttgggctatggcaaaggctacaagtacaaccccatgtacagcgagcctgtggatcaggagtacctgcctgaagagttgaggggggtagatttcttcaagcagaggaggtgctgactcctcagggcacgacagcagaaggatgttgcttttttaagggagggccagaaagaaagttagtggattgcaaagttggttgcctggtggaagttagaacagaccaacattttgtgccagaaatttaagagttccataggtggaggcgcagttctttcgaataaatgtgtaactttgaaattgtgttcatttgcactcggtgcagcggttatgcttatgaaaatacctggcagctttgtgcaatgaattaatgttataaggaattatctattttgtcatagtatttaagtcataatgtcatttcagaattcagttctgtaggattttcttttctttaaaaaatgtatattctgggtagttttaattggtaaaaaaatgtaattgtgatttaatactgcatagtgttttgggtattttttttatatgcaaaggtcttacgagccaataaaaactatttcaaacta

SEQ ID NO: 62917 - DNA, 1654 bp, Homo Sapiens
  misc_feature (70)..(70): n is a, c, g, or t
  misc_feature (146)..(146): n is a, c, g, or t
  misc_feature (180)..(180): n is a, c, g, or t
  misc_feature (958)..(1205): n is a, c, g, or t
  misc_feature (1237)..(1278): n is a, c, g, or t
  misc_feature (1512)..(1562): n is a, c, g, or t
  misc_feature (1587)..(1599): n is a, c, g, or t
gctttgctccccaattttttccttggaggacatccccaactcaacaacctggtcatcacgcaaccactancgggagagctggggtgaagagctcggaagccgcccatcagaagcgtggagctgcagctggtgcgcgtggaaacgtngcgggtgtgcagaaggctatgcccgcgacgcccncggagattcagaacattccagatcgccgacggggatgtggcaggggcctctctgtccccatctacatggtcttccctaggctgttcacctgccctacactggagaccaccaacttcaaagtggaatttgaggttaacatcgtggtgctgcttcaccctgaccacctcatcacggagaacttcccgctgaagctctgcaggatatagcccggaggagggaagcatagagaacgggagtggccatctggaaatccagctggttatccaaatcctaaggggagctacagccagcggcatatacttgtttttgtgattattctgtatcagaaatgaaacagaccctcaaattaactttccttcctcatttcttgaggcttctgcttccaacaggcacctctaatcagaccttttctttgaaattcaacaagatttcttaatgctatttgccaagaccatttcacagaaaacattgactgtggctcttgccttatctgttcctttttaggtacagtaaaacaattgtgacagcagtttgagcttgctggagagtggcatcatggggacaaaaggaaacctctgacttgctaatggatgtagccagggactccccatagcaaagggtctgtggccagttgacatccaggatggctgcaagcgcacttgatggtcaggaagtttgcagatactcgccaaggcagagcgcaaagtgctagccactggaaatgcatgacttccctccacccctactctattctgtagttttttggttttgtttctgnnnnnnnnnnnnnnnnnnnnnnnnnnnnnnnnnnnnnnnnnnnnnnnnnnnnnnnnnnnnnnnnnnnnnnnnnnnnnnnnnnnnnnnnnnnnnnnnnnnnnnnnnnnnnnnnnnnnnnnnnnnnnnnnnnnnnnnnnnnnnnnnnnnnnnnnnnnnnnnnnnnnnnnnnnnnnnnnnnnnnnnnnnnnnnnnnnnnnnnnnnnnnnnnnnnnnnnnnnnnnnnnnnnnnnnnnnnnnnnnnnnnnnnngtgtgagccaacacacccagcctctgtaagtnnnnnnnnnnnnnnnnnnnnnnnnnnnnnnnnnnnnnnnnnngcaactggaaaaatggttccttgcttccccttgggggggatttgccttgtggcccaaatggtttcttgaagtctctcaaacatgcccataaaaattctcccgctgggcaattttcccgggaacgggtttccttcctttgaaaagagacacgggtttttccaaaacggggggtcaccccacgggttgaagaggccctggggcagggaatacaagggttccacgggagagccccannnnnnnnnnnnnnnnnnnnnnnnnnnnnnnnnnnnnnnnnnnnnnnnnnntggagaaaaactgtgaaaaacacannnnnnnnnnnnncgccccaaaatttagggattaaattttccaaaattttttttgtgaaaaaaggggg

SEQ ID NO: 62918 - DNA, 448 bp, Homo Sapiens
ctgtctacttggacgctcgtggaaacatgttgttttctttgattggagagggacacaaagataaattatttttatatacttcagttgctttaaagtattacaaagacagggggcagatcagagataataaaattggaataaaactctataaagattctttgccaccttcaccattgctatttcctggcaaagtaacagtagaccaagttactgatagattggtaatagcagacactggacatcatagaattttggtcgtttggaagaatggacaaattcaatatagcattggaggtaaaacttgcttctgattacgatagataacgtgttttacagtaaaaaaatagttcaaggtaaatataaaagttgaaatgtctaaatgaaaactaattatagaaaagtgatatacattgacttaatttcctaataaaaattttttgttaattaa

SEQ ID NO: 62919 - DNA, 1108 bp, Homo Sapiens
  misc_feature (41)..(119): n is a, c, g, or t
  misc_feature (714)..(724): n is a, c, g, or t
  misc_feature (909)..(935): n is a, c, g, or t
gggaaagtatactacttttttaaaaaagtgggcagaattcnnnnnnnnnnnnnnnnnnnnnnnnnnnnnnnnnnnnnnnnnnnnnnnnnnnnnnnnnnnnnnnnnnnnnnnnnnnnnnntttttttaaggagaaactagaatgtttagctagaaaattccacagcctgtgaagaaatatttcaaaatggccataaaggaggtaaaaatgaaaaccataacctaacttttatagaggctttatctttaatttaacgatgtgcggaggactttcttgcttgaatctgttccgggctgtctgctctgtccatcaaatgggcaggtctggaatggggcaccttcggccgttcagaagtggcctgaacagaatgctggaacccaggctggactcggacacactaaggttttgattttgaatttcagccttattagaagatctaacctaagagtaagctaaccacagggattcttttgtagaacactttttatgcagatgaagctattttttccagcaagtagattcttccagtttttccaaggagtaatttccccgaattggcataccacggcgtggacagctgatatttcacccagctgctggcttgtgggtgtggctctttgctttatatatatatacacacatgtgagtctggctgggctggtattttgtttgatcttcctggaaatgagcagtgactaacgctcacataactggnnnnnnnnnnnatctgggctgatgaatacatttacctaagaaactcatttcgttttacttaagaggggaagtgcagttttcttttggcagttcagaatccaagcacttgatttgctgggtttggaaaactccttttttggccttctatgtgcttagccataacaattccattaagcaagaaggtaagcaaaagacnnnnnnnnnnnnnnnnnnnnnnnnnnncttgcactggcttgtctcacttacgaaacatgtcggagctgtttgcctgggtggggctgggtaccgtacctgtcaatgcctgtgattttcataattagcacgtacataaagaagtacattctgttcaggtgataactgagcctcaatcaagcagaaactttttgcttgaaatt

SEQ ID NO: 62920 - DNA, 1140 bp, Homo Sapiens
atttccagcagtgaggagacagccagaagcaagcttttggagctgaaggaacctgagacagaagctagtcccccctctgaattttactgatgaagaaactgaggccacagagctaaagtgacttttcccaaggtcgcccagcgaggacgtgggacttctcagacgtcaggagagtgatgtgagggagctgtgtgaccatagaaagtgacgtgttaaaaaccagcgctgccctctttgaaagccagggagcatcattcatttagcctgctgagaagaagaaaccaagtgtccgggattcagacctctctgcggccccaagtgttcgtgttcatccatggctggttgatcatgtcttcactgatgctgctgttcctcttcacctatatctaccttggggaagtgctcaagacctacaatgtggccatggactaccccaccctcttgctgactgtctggaacttcggggcagtgggcatggtgtgcatccactggaagggccctctggtgctgcagcaggcctacctcatcatgatcagtgcgctcatggccctagtgttcatcaagtacctcccagagtggtccgcgtgggtcatcctgggcgccatctctgtgtatgatctcgtggctgtgctgtgtcccaaagggcctctgagaatgctggtagaaactgcccaggagagaaatgagcccatataccctgccctgatatactcatcctgccatggtgtggacggttggcatggcgaagctggacccctcctctcagggtgccctccagctcccctacgacccggagatggaagaagactcctatgaacagttttggggagccttcataccccgaagtctttgagcctccctttgatggctacccaggggaggagctggatgaagaggaggaaaggggcgtgaagcttggcctcggggactttcatcttctacagtgtgctggtgggcaaggcggctgccacgggaagcggggacctggaataccacgctggcctgctacgtggccatcctcaattggcttgtgtctgaaccctcctgctgtttgctgtgttcaagaaggcgctgcccggcctccccatctccatcacgtccgggctcatcttttacttcttccagggacaaccttggtgg

SEQ ID NO: 62921 - DNA, 474 bp, Homo Sapiens
  misc_feature (306)..(319): n is a, c, g, or t
  misc_feature (343)..(352): n is a, c, g, or t
ggcaaaaaggacagtttaattttgtacagattatgcttacctcaggtttctttagtgtgcttgaatgcccttctttccatataacacttatcttcttcttaattcggcaatggaatatcttttcagttttaaaacaactggcatcattatatctatcttttttgccgtttctatttaggggtttttgttgatcaaatcaagtcttggttgtggcttgctgaattaaatatttatgagtggtgcatttttaagtatcgtgaccaagacaccatattaagtacagtgataaagcatctatattctgtnnnnnnnnnnnnnntctgcctatgcatgttttttaagnnnnnnnnnntggctgtatcggcctgtatgggactgtaatgcgcttagtggtctgacatatactggaaatgtatgtatactggcgtactttatattctctaaaatgcttaatgcctttgaaattttgtaatc

SEQ ID NO: 62922 - DNA, 499 bp, Homo Sapiens
tggtgcagaacatgcgtgcgtttggcgggatcctggtggtggtctactacgtatttgccatcattgggatcaacttgtttagaggcgtcactgtggctcttcctggaaacagcagcctggcccctgccaatggctcggcgccctgtgggagcttcgagcagctggagtactgggccaacaacttcgatgactttgcggctgccctggtcactctgtggaacttgatggtggtgaacaactggcaggtgtttctggatgcatatcggcgctactcaggcccgtggtccaagatctattttgtattgtggtggctggtgtcgtctgtcatctgggtcaacctgtttctggccctgattctggagaacttccttcacaagtgggacccccgcagccacctgcagccccttgctgggaccccagaggccacctaccagatgactgtggagctcctgttcagggatattctggaggagcccggggaggatgagctcacagatag

SEQ ID NO: 62923 - DNA, 815 bp, Homo Sapiens
  misc_feature (224)..(234): n is a, c, g, or t
tccattgttgacattgccccagggttggctttttggagaaagcactatcgttgtataaattaaagggatggtaaattcaggtaatcgtgtttgatgttaatagttcagtttacaggagagtgactgttttaagtttaaaagaaaaaagaggttagtgcaggttataaagtgctctttcttgtccctaaaaagaagtagtcatattttgaaaaaataactataannnnnnnnnnncagagtatgatttcatccattgtaaatagcacatattatgccaatgtgtcagcaaccaagtgccaggagtttgggagatggtataaaaagtacaagaagattaaagtggaaagagtggaacgagaaaacctttcagactattgtgttctgggccagcgtccaatgcatttaccaaatatgaaccagctggcatccctggggaaaaccaacgaacagtctcctcacagccaaattcaccacagtactccaatccgaaaccaagtgcccgcattacagcccatcatgagctctggtcttctttctccccagcttagtccacaacttgtaaggcaacaaatagccatggcccatctgataaaccaacagattgcagtgagccggctcatggctcaccagcaatcctcaagccatcaaccagcagttcatgaaccatccacccgtccccagagcagttaagccagagcctaccaacttttccgtgcgaagtctctcttgatatctaccagcaagttagagatgagctgaagagggccagtgtgtcccaagctgtctttgcaagagtggcattcaaccgtacacag

SEQ ID NO: 62924 - DNA, 546 bp, Homo Sapiens
gggtctgtctgtccctaccacaggcagtgaacggcggctgtcaggggacctcagctccatgccaggccctgggactctgagcgtgcgtgtctctcccccgcaacccatcctcagccggggccgtccagacagcaacaagaccgagaaccggcgtatcacacacatctccgcggagcagaagcggcgcttcaacatcaagctggggtttgacacccttcatgggctcgtgagcacactcagtgcccagcccagcctcaaggtgagcaaagctaccacgctgcagaagacagctgagtacatccttatgctacagcaggagcgtgcgggcttgcaggaggaggcccagcagctgcgggatgagattgaggagctcaatgccgccattaacctgtgccagcagcagctgcccgccacaggggtacccatcacacaccagcgttttgaccagatgcgagacatgtttgatgactacgtccgaacccgtacgctgcacaactggaagttctgggtgttcagcatcctcatccggcctctgtttgagtcctt

SEQ ID NO: 62925 - DNA, 1576 bp, Homo Sapiens
  misc_feature (277)..(289): n is a, c, g, or t
  misc_feature (413)..(424): n is a, c, g, or t
  misc_feature (520)..(541): n is a, c, g, or t
  misc_feature (548)..(567): n is a, c, g, or t
  misc_feature (577)..(578): n is a, c, g, or t
  misc_feature (608)..(621): n is a, c, g, or t
  misc_feature (659)..(659): n is a, c, g, or t
  misc_feature (664)..(665): n is a, c, g, or t
  misc_feature (668)..(668): n is a, c, g, or t
  misc_feature (670)..(695): n is a, c, g, or t
  misc_feature (1210)..(1221): n is a, c, g, or t
ccccaaaaaatagtacccgcggcagagcaagagggaaggggcttgtttgttaggcgccgtgccgcgtgtttttttcggataggggaagataattgtatatatgggagggatgggcgaaaagtgggtgtgtgaatagaatcgccctggtacgattattgggggggttcatatggcaaaagttggtgggggaagagaagggtctccgtgtcttgggggggagaaatgtggtgggagagagttttgtaccgaatttttttgtggcgcattagcgcccccnnnnnnnnnnnnnatatgctggtgattgggggggcgggacggaagaccctggggtgatgagtccccccaagagggccctcgagagagagcgttttgggaattttggtggaaaagcaccggggtttaaccgggggggnnnnnnnnnnnngtgggaataaccagaccctttttggttgcccgggttttttgttgggagaagaggaaaaagcaaggttttcgataactttgggggggcgggggcccnnnnnnnnnnnnnnnnnnnnnnttttttnnnnnnnnnnnnnnnnnnnnagattgtttnntttgggtggtttggggttgggttgtttgtnnnnnnnnnnnnnnttgtttgggtttgggtggtggtggtggttggtgggtgnggggnnggntnnnnnnnnnnnnnnnnnnnnnnnnnncagattttagtattttattatttccttgtaaaatggctgaactaaattaaacccttgtttcccatttgttctataatttatagtgaaactgagaacaaaactatctttataaatgatagctaaaagtatttccagatatttaaacaatttaaaataaatttcttctgcagagatgcaaagcatctcaacactggaatgaacaaatgccttaaattcaatggagtaaacctttagaatgaagaggaactgtcatttcacccaagccgaagacaacagccttatgcacttgtgtgctctgtctttgctgcttctcgtgtttcaagcctttcctgtgggatcagcacagcaaagtgcaacttaccaaatggtttaatgactggttaattctttcttctcccaatggaaaagcaatggcaacacaacagtagactgctggcttgacaatcttaaacgtgagcctttgcacatgtaggtttatcatcatttgagtatacgactaagcaagtcaatgaacnnnnnnnnnnnnagcagtttaatttggtcctgagaatgttgcagtctttattaccccttttgcattaatccacttttctaaccaccttttaagctttaatttttaacactatacaccaagtctttgaaatcagtgatctgttatttaactctaaagcatttgacacttcttgccttaacagttttaaaaaccacacacaaaaaaactctgtaagtaatacagtaggccaaaagtttcatcctatctatcttgcagtttacctatctgatctgatctctgtaattatagttctgtcatttaaaatatactatttaaatctaatttttacatttcaaaaattatcttcagtagtaactaagtatatttt

SEQ ID NO: 62926 - DNA, 746 bp, Homo Sapiens
ggggtgggtgttggaggctttaaggtagctttaaattcgtgttgtcctgggagctcgcccttttcggctggagtcgggctttacggcgccggatggctctggacgtgaagtctcgggcaaagcgttatgagaagctggacttccttggggagggacagtttgccaccgtttacaaggccagagataagaacaccaaccaaattgtcgccattaagaaaatcaaacttggacatagatcagaagctaaagatggtataaatagaaccgccttaagagagataaaattattacaggagctaagtcatccaaatataattggtctccttgatgcttttggacataaatctaatattagccttgtctttgattttatggaaactgatctagaggttataataaaggataatagtcttgtgctgacaccatcacacatcaaagcctacatgttgatgactcttcaaggattagaatatttacatcaacattggatcctacatagggatctgaaaccaaacaacttgttgctagatgaaaatggagttctaaaactggcagattttggcctggccaaatcttttgggagccccaatagagcttatacacatcaggttgtaaccaggtgggtatcgggtcccccgagttactatttggagctaggatgtatgggtgtaggtggtggacatgtggggctgttggctgtatattagcagagttactttctaagggttcctttttttggccaggaa

SEQ ID NO: 62927 - DNA, 938 bp, Homo Sapiens
acaacagtaccaaacacgattgttgtttcttggactgcagaaattggaagaaactattccatggcagtatatcttgtaaaacagttgtcctcaacagttcttcttcagaggttacgagcaaagggaataaggaatccggatcattctagagctttaattaaagagaagttgactgcggatccagacagtgaaatagctacaaccagcctaagggtttctctactatgtccacttggtaaaatgcggctgacaattccgtgtcgggcccttacatgttctcatctacaatgttttgacgcaactctttacattcagatgaattgagaaaaaaccaacctgggtttgtcctgtctgtgataagaaggctccatatgaacaccttattattgatggcttgtttatggaaatcctaaagtactgtacagactgtgatgaaatacaatttaaggaggatggcacttgggcaccgatgagatcaaaaaaggaagtacaggaagtttctgcctcttacaatggagtcgatggatgcttgagctccacattggagcatcaggtagcgtctcaccaccagtcctcaaataaaaacaagaaagtagaagtgattgacctaaccatagacagttcatctgatgaagaggaagaagagcccatctgccaagaggaccctgtccttccctatctcccacatcaccactaaataataaaggcattttaagtcttccacatcaagcatctccagaatcccgcaccccaagccttcctgctgtagacacaagctacatttaataccctccctcctcccagaactataggccatcctttttccacatgaaccccccatggcctttacggactttaacaaggaatttagaatttccctttccctttcccttaatccagggagaaccaatcccgcaatttacaaaccaaccttcccc

SEQ ID NO: 62928 - DNA, 1414 bp, Homo Sapiens
  misc_feature (91)..(112): n is a, c, g, or t
  misc_feature (172)..(190): n is a, c, g, or t
  misc_feature (464)..(464): n is a, c, g, or t
gttcaagcctaaccccctcccaccttttgcctctagccccttttccaacggggggcctacccctattgggtctcctccggttaattttttnnnnnnnnnnnnnnnnnnnnnntttgcttaaatttttgctaatgtgggggggggaatgaattatttaaggggatcttttccnnnnnnnnnnnnnnnnnnntctcccgttccagtttgccaggaggtttgaaatcatccttggaaggacgattgagccagtggagtgcactgaagatgattaaaataatcttggtcatcctgatattaagagccaaacaccgaccccactttgggcgaaggacaaggttgccctttttgatagaaataatgaattaccgggagcacccccaagctcaaagcttcctttggtggatgtgtacgaattgactaacttactgagacagctggacttcaaaagtggtttcactgttgantcttactgaatatgagatgcgtaatgctgtggatgagtttttactccttttagacaagggagtatatgggttattatattatgcaggacatggttatgaaaattttgggaacagcttcatggtccccgttgatgctccaaatccatataggtctgaaaattgtctgtgtgtacaaaatatactgaaattgatgcaagaaaaagaaactggacttaatgtgttcttattggatatgtgtaggaaaagaaatgactacgatgataccattccaatcttggatgcactaaaagtcaccgccaatattgtgtttggatatgccacgtgtcaaggagcagaagcttttgaaatccagcattctggattggcaaatggaatctttatgaaatttttaaaagacagattattagaagataagaaaatcactgtgttactggatgaagttgcagaagatatgggtaagtgtcaccttaccaaaggcaaacaggctctagagattcgaagtagtttatctgagaagagaagcacttactgatcccatacagggaacagaatattctgctgaatctcttgtgcggaatctacagtgggccaaggctcatgaacttccagaaaagtatgtgtcttaagttttgactgtggtgttcagattcaattacgattttgcagctgagtttttccaatggtcatgatcatctatacaagtatagtttacaaaacccccggaagataataatggggtgatgccctacgtttactgaattttccacttggatcctagatattggatcccaaaagatggcaaattaaagggcacaccctgaaagaaacctgggaagctaacttgggtattccaaaggaatttttccccaaggcatttgcccttctatacccaagacttcaggttcccctggcaaaaaatttaacaggaaaccattttagatccttccccc

SEQ ID NO: 62929 - DNA, 1173 bp, Homo Sapiens
  misc_feature (991)..(991): n is a, c, g, or t
agctgttggaagctgaggaccatcgttgcaacgatggtcctcagctaagacttacgagagcagaaaatagaataaaacaacttgaaactgactcctcagaagaaatatcacgttaccaagaaatgattcagaaacttcaaaatgtattggagtctgagagagagaactgtgggcttgtcagtgaacaaaggctaaaacttcagcaagaaaataaacagttacggaaagagactgagagtttaaggaagattgccctggaggctcaaaaaaaagccaaagtaaagatcagtacaatggaacatgaattttcaataaaggaacgtggatttgaagttcaattgagagagatggaagacagtaatagaaattccattgttgaactgaggcatctcctagcgactcaacagaaggcagccaataggtggaaagaagaaacgaagaaacttactgaaagtgcagaaattagaatcaataatactaaagagtgagctgagtcgacagaaacttcatacccaagagctgctttctcagctggaaatggcaaatgaaaaggtagctgagaatgaaaagctaattctagagcatcaagaaaaagccaacagacttcaaaggcgtctaagtcaggcagaagagagagctgcttcagcttcccagcagctcagtgtgattacagtgcagagaagaaaagcagcctccctgatgaatctggaaaatatttaaaaatattcatagttcactcacagaactttagagttgggaaagcagttggactagaagtgtattgaaatggtaaagcctgcaaagtataatagttaaggcttgtgttatttcgcgtaagcattgttgttctgttttgagggttattggaaaacagagcagtgaccacttcctgtaagtaaagaaaatataatcctatattgagcttcagtggagaataaaccagctgagaagaactcattgccttcatcaatgtgtctgttttttaattccntcctttttcccttgaaaggacataataattttcaaactatgcaaatttctctttcataagaaagagtttttaaagaaaattctaagaatttaatatttcaggtttccaggattttgagaaattttacattctaattggttaccttctaaactcattttttaaaggttcctaaagtatccatt

SEQ ID NO: 62930 - DNA, 272 bp, Homo Sapiens
atacaggcgtggtgaagattgtagtgagacaagcccctcgggatggactgactcctgttcctccattggccccagcaccccggcctccgagctctgggcttccagctgtgttgaatccacgccccacgttaacccctggccggctacccacacctactctgggtactgctcgagcccccatgcccacacccactctggtgaggcctcttctcaagctggtccacagtccttcactctgaagtcagtgcttcagctccccggagctgcacacc

SEQ ID NO: 62931 - DNA, 1054 bp, Homo Sapiens
  misc_feature (603)..(812): n is a, c, g, or t
  misc_feature (925)..(925): n is a, c, g, or t
  misc_feature (997)..(1005): n is a, c, g, or t
  misc_feature (1014)..(1014): n is a, c, g, or t
tcttgccccactccatccccgcttcccccacaatgcaatagtgactatagacccagtgttttaaaaaagcaggctggtaccggtccggaattcccgggtatatacgtcgacctcacgtcgtacgaccaagcgtacggtgaaatcatttacgttggaagcttggatctcattaaacttcatgtctctattccatttgtgccacacacttaacaagcttagtgtactgacatgggaagcatgagcatttctagttctacacttcttcttttaccgccctcatgtgtaaaatgaaaagaaactaaactttgccctaataccaaggcgctaccgtttattgcctcgtctatattcactgacctattgtaatgatacacagtgaatatctttttgacacaagagaaactgcagtgtagtatgcagagctgctgttttaatgcctatgcatttactctttcctgatttaggcagaggtggcattttctttattgcatttctctatttttttaatgtaccctaccttcagtattctctttgtaagttggtgacttgcatctgtggccttgaatattttattatcacatgtggcataacagtatccacacnnnnnnnnnnnnnnnnnnnnnnnnnnnnnnnnnnnnnnnnnnnnnnnnnnnnnnnnnnnnnnnnnnnnnnnnnnnnnnnnnnnnnnnnnnnnnnnnnnnnnnnnnnnnnnnnnnnnnnnnnnnnnnnnnnnnnnnnnnnnnnnnnnnnnnnnnnnnnnnnnnnnnnnnnnnnnnnnnnnnnnnnnnnnnnnnnnnnnnnnnnnnnnnnnngtgtgggagccaccatgcctgacccacacactttttacttgtatagatgatttttggcttggacataaaagccaagccacccatttgcttttaatccaaagaacatgtatagntttttgtacccagagactatgatttatatttgatttgcaccttgccctgcccattgattttagaataaaaannnnnnnnngccatgggntttttaattcccttccccaaaaggggaatcccgggttttt

SEQ ID NO: 62932 - DNA, 488 bp, Homo Sapiens
cggaagttcacttctgctagtgatgtctggagctacggaattgtcatgtgggaggtcatgagctatggagagcgaccctactgggacatgagcacccaggatgtcatcaatgccgtggagcaggattaccggctgccaccacccatggactgtcccacagcactgcaccagctcatgctggactgctgggtgcgggaccggaacctcaggcccaaattctcccagattgtcaataccctggacaagctcatccgcaatgctgccagcctcaaggtcattgccagcgctcagtctggcatgtcacagcccctcctggaccgcacagtcccagattacacaaccttcacgacagttggtgattggctggatgccgtcaagatggggcggtacaaggagagcttcgtcagtgcggggtttgcatcctttgacctggtggtccagatgacggcagaagacctgctccgtattggggtcaccctggccggcca

SEQ ID NO: 62933 - DNA, 759 bp, Homo Sapiens
  misc_feature (378)..(378): n is a, c, g, or t
caggacttgtctgcaacagagaaactcactccaagagcaagaagccaaagaaagaaaaactaaagatgatgaaggagcaactcccattaaaaggcggcgtgttagcagtgatgaggagcacactgtagacagctgcatcagtgacatgaaaacagaaaccagggaggtcctgaccccaacgagcacttctgacaatgagaccagagactcctcaattattgatccaggaactgagcaagatcttccttcccctgaaaatagttctgttaaagaataccgaatggaaagttccatcttcgttttcagaagacatgtcaaatatcaggtcacagcatgcagaagaacagtccaacaatggtagatatgacgattgttaangaatttaaagacctccacttgttccaaggattctaccctagccgaggaagaatctgagttcccttctacttctatctctgcagttctgtctgacttagctgacttgagaagctgtgatggccaagctttgccctcccaggaccctgaggttgctttatctctcagttgtggccattccagaggactctttagtcatatgcagcaacatgacattttagataccctgtgtaggatcattgaatctacaatccatgtcgtcacaaggatatctggcaaaggaaaccaagctgcttcttgacattaggtgtagcatgtctacttttaagtccctcacccccaacccccatgctgtttgtataagttttgcttatttgtttttgt

SEQ ID NO: 62934 - DNA, 932 bp, Homo Sapiens
tctataagatctttgatgacagcccctgcccatttactgcgaaaacctgcaacccagagaccttcccctcctccaatgagtcccgccaatgccccaatgcccgttgccagttcgccttctacggtggtgagtcgggctaccaccgggccctgctgggcctgcagatcttcaatgccttcatgttcttctggttggccaacttcgtgctggcgctgggccaggtcacgctggccggggcctttgcctcctactactgggcccttcgcaagccggacgacctgccggccttcccgctcttctctgcctttggccgggcgctcaggtaccacacaggctccctggcctttggcgcgctcatcctggccattgtgcagatcatcccgtgtgatactcgagtacctggatcagcggctgaaagctgcagagaacaagtttgccaagtgcctcatgacctgtctcaaatgctgcttctggtgcctggagaagttcatcaaattccttaataggaatgcctacatcatgattgccatctacggcaccaatttctgcacctcggccaggaatgccttcttcctgctcatgagaaacatcatcagagtggctgtcctggataaagttactgacttcctcttcctgttgggcaaacttctgatcgttggtagtgtggggatcctggctttcttcttcttcacccaccgtatcaggatcgtgcaggatacagcaccacccctcaattattactgggttcctatactgacggtgatcgttggctcctacttgattgcacacggtttcttcagcgtctatggcatgtgtgtggacacgctgttcctctgcttcttggaggacctggagaggaatgacggctcggccgagaggccttacttcatgtcttccaccctcaagaaactcttgaacaagacggcaagcgg

SEQ ID NO: 62935 - DNA, 466 bp, Homo Sapiens
aagggaaaaacctgtggtccgcccagaagagattcctccagtgcctgagaaccgatttttactgagaagagatatgcctgttgttactgcagaacctgaaccgaagattcctgatgttgcacccattgtaagtggtcagaaaccatctgtatcaaagtctggacggaagattaaagggaggggcacaattcgctatcacacacctccaagatcaagatcctgttctgagtcagatgatgatgacagcagtgaaactcctcctcactggaaagaggaaatgcagagattaagagcatatagaccacctagtggagaaaaatggagtaaaggagataagttaagtgacccgtgttcaagccgatgggatgaaagaagcttgtctcagagatccagatcatggtcctataatggatattattcagaccttagtacagcaagacactccggccaccataaaaaaacgcag

SEQ ID NO: 62936 - DNA, 916 bp, Homo Sapiens
  misc_feature (421)..(436): n is a, c, g, or t
ggtatcttgaaaatatggtaataaagctagccaaggaattaccgcctccttctgaagaaataaaaacaggtgaggatgaagatgaggaagataatgatgctctactgaaggaaaatgaaagtcctgatgttcggcgagacaaacctgtaacaggagaacaaatagaggtatttgccaacaagctgggtgaacaatggaagattctggctccctacttggaaatgaaagactcagaaattaggcagattgagtgtgacagtgaagacatgaagatgagagctaagcagctcctggttgcctggcaagatcaagagggagttcatgcaacacctgagaatctgattaatgcactgaataagtctggattaagtgaccttgcagaaagtctaactaatgacaatgagacaaatagttagcttcnnnnnnnnnnnnnnnnattaaaactgtgatagattttgttaccaagcagcatttgataagaggtccactggttttggtaaacaataaacatttttataacaattgttgtacagtcggctggtgctctgagaacaatagaacacatattggctcaaaccagagtttggggaggttgggttgagataatgacctaaacgaagtgacctcaagatcacaaaatatatttttttgttaagtagatgtatttataatgaagttaaataagcactatttagggatatgtcgtttcttataccaaattagtttcctgtgtgttgtttgttagtagttttacaaaatttatcctgaaatcccagaataacactttctgaaaccatatgactggtctgttcttacttattcgtgctttcaagcagaggttcaacaaatgatggtttgttctgccgccacggttctgatcttaaaattgtacgggaaccagcagggtcactcaaac

SEQ ID NO: 62937 - DNA, 948 bp, Homo Sapiens
  misc_feature (859)..(859): n is a, c, g, or t
  misc_feature (885)..(885): n is a, c, g, or t
cgtcgccatcttggatccgcgggacaagaaaattcatgcgagggagacgtggtgggcggtccttcctgtgacacgacccttgagtgacagttctatttgattgcctccggtactgtgaggaaaggacacgactctatggtgaggactgatggacatacattatctgagaaaagaaactaccaggtgacaaacagcatgtttggtgcttcaagaaagaagtttgtagagggggtcgacagtgactaccatgacgaaaacatgtactacagccagtcttctatgtttccacatcggtcagaaaaagatatgctggcatcaccatctacatcaggtcagctgtctcagtttggggcaagtttatacgggcaacaaagtgcactaggccttccaatgagggggatgagcaacaatacccctcagttaaatcgcagcttatcacaaggcactcagttaccgagccacgtcacgccaacaacaggggtaccaacaatgtcacttcacacgcctccatctccaagcaggggtattttgcctatgaatcctaggaatatgatgaaccactcccaggttggtcagggcattggaattcctagcaggacaaatagcatgagcagttcagggttaggtagccccaacagaagctcgccaagcataatatgtatgccaaagcagcagccttctcgacagccttttactgtgaacagtatgtctggatttggaatgaacaggaatcaggcatttggaatgaataactccttatcaagtaacatttttaatggaacagacggaagtgaaaaatgtgacaggattggaccctttccagattttcccagcattagcagaccgaaacaggaggggnagggaagttggttaacccaactcccnttaattaaaacccctttggcttgggaagaggctccctaatgtttgaaatggttaccaaaaacc

SEQ ID NO: 62938 - DNA, 803 bp, Homo Sapiens
  misc_feature (682)..(682): n is a, c, g, or t
  misc_feature (705)..(705): n is a, c, g, or t
gggtttgaccccaaatcttcttttcagagagtagctggagtgtaccttttcatgatcatctggcagctgactgagttgaataccttcttcttgaagcatatctttgtgttccaagccagtcatccattaagttggggtagaattctctttattggtggcatcacagctcccacagtgagacagtactacgcttacctcaccgacacacagtgcaagcgcgtaggaacacaatgctgggtgtttggggtcattggtttcctggaggccattgtttgcataaaatttggacaagatctcttctctaagacccaaatactctatgttgtgctttggcttctttgcgtggctttcaccactttcctctgtctgtacggcatgatttggtatgcagaacactatggtcaccgagaaaagacctactcggagtgtgaagatggcacctacagtccagagatctcctggcatcacaggaaagggacaaaaggttctgaagacagcccacccaagcatgcaggcaacaacgaaagccattcttccaggagaaggaatcggcattccaagtcaaaagtcaccaatggcgttggaaagaaatgaaaaaccctggttaatcaaagatgttccagagtgcctagaactgagagggaaatggaactcatttggaacttccccgtgagggaggtcngaggcgcacaggggcaagcaggnaagaaggcgagggcacttggggggtcatttatttgagatcgtaagtcttgttttcccacaggacctggcccgcgtcaggcagatcatcgcctgggggg

SEQ ID NO: 62939 - DNA, 364 bp, Homo Sapiens
ctaggcatattgatcattttagacactgggagaagagaacctcaaactaggaggaaaagacagagcctccacttatttttgggaggggatggcagacagtcaaggagatgagcgtcttaaggcattttgggatagggtcagatgcaccacccatggagaggtttttcaacacaaagacatggaaggttagaggtttgtcaacaaaaagacatggaagtttaggtttttcaacacaaagacatggaagattagaggtttgtcaacacacagacacaggaagaatgggctgcagaagatttagatgttttccatttgggcacattttacttagctggagaactaggtttaaaacagcctgggtagg

SEQ ID NO: 62940 - DNA, 452 bp, Homo Sapiens
gcgagactcaatctcaagagaaaaagtgactatacaaaaagatagcatatgtggtcaaaccagagactgtcagaaactttaggtatatttttatcagtggagcttttccttaatggaaatccattttgaaagttaaattcttgtccttatcataataaggaaaatctcatgggacctaaaatcagtcacccagattctcgaactgctttgagaagtgaaagcatcttaggagactttttagtcatgcagaagaggtggaaaacttgagatggaaagcttttcaggaggtggattttgtcctactggttgttactaaaatgattcttttttcaattcccagttcaactttagttggcttaccaagagtgaagcgtgacaagtactcagtcttcaactttctgacgctcccagagacagcttccttgcccaccactcaagcatcagcctgtatc

SEQ ID NO: 62941 - DNA, 268 bp, Homo Sapiens
ctgaaggacaaaaaaggtgactgctgaactatgtgtggtttattgttgtacattcacaatcttgcaggagccaagaagttcgcagttgtgaacagaccctgttcactggagaggcctgtgcagtagagtgtagaccctttcatgtactgtactgtacacctgatactgtaaacatactgtaataataatgtctcacatggaaacagaaaacgctgggtcagcagcaagctgtagtttttaaaaatgtttttagttaaacgttgaggag

SEQ ID NO: 62942 - DNA, 834 bp, Homo Sapiens
ggggactcctggagcttgccaccagcttggacttctagggactttcctctcagccaggaaggattttgatattcatcagaaatacctccagaagattcaaggagctgtagaggtgaagtaagcctgtgaaggaccagcatgggaatcctatactctgagcccatctgccaagcagcctatcagaatgactttggacaagtgtggcggtgggtgaaagaagacagcagctatgccaacgttcaagatggctttaatggagacacgcccctgatctgtgcttgcaggcgagggcatgtgagaatcgtttccttccttttaagaagaaatgctaatgtcaacctcaaaaaccagaaagagagaacctgcttgcattatgctgtgaagaaaaaatttaccttcattgattatctactaattatcctcttaatgcctgttctgcttattgggtatttcctcatggtatcaaagacaaagcagaatgaggctcttgtacgaatgctacttgatgctggtgtcgaagttaatgctacagattgttatggctgtaccgcattacattatgcctgtggaaatgaaaaaccagtctcttatccctctgctcttggcaagcccgtgcagaccccacaatataagaataagcatgggtgaggagctcactgggatattgcacgggaggattaaaattttcccccgattgaattaatgctaaggaaagccttggtaatccctggggacccacccgaatggaggataacgaaaaaaagttacgaactgggattctatcctccacttttagaccttttgggcctggggggccccctttaccctggaatg

SEQ ID NO: 62943 - DNA, 859 bp, Homo Sapiens
ggctgaagtccctgtgggaggctgttttctgagggagctgagtgtttacagccactcgagccctgctctgctcagctgaagcagaaaacagagaccttttgcattactttggttcaagagcaagacaggaggcgactgcatgagaccatggctgagacacctagtcctccaggcactgaggaactccagggcattctgtgggtctcatgggaagccagcacctctacctgttcctcagaagatcgtggccacctgggaagccatcagcctgggaaggcagctggtgcctgagtacttcaacttcgcccatgatgtgctggatgtgtggagtcggctggaagaggctggacaccgccccccaaatcctgccttctggtgggtcaatggcacaggagcagagatcaagtggagctttgaggagctggggaagcagtccaggaaggcagccaatgtgctggggggtgcatgcggcctgcagcctggggacagaatgatgctggtactcccacggctcccggagtggtggctggtcagtgtggcttgcatgcggacagggactgtgatgattccgggtgtgactcagctgacagagaaggacctcaagtaccggcttgcaggcgtccagggccaagtccattatcaccagtgactccctagctccaagggtggatgccatcagtgccgaatgcccctccctccagacccaagctgctggtgtcagacagcagtcggccaggctggtttgaacttcaggaaaactcctccgggaatgcttctacagagcacaactgcttgaggaccacagagtcgaagaccgcttgggccatctacttttaccagcggaaccagcggggggccc

SEQ ID NO: 62944 - DNA, 663 bp, Homo Sapiens
cgctggtacggtcggaggtttttggatgccccgtgctccagaggaaactctgtgcccaactgggggctccccgccccgctgaggggcgccgccagtgagggtcccccggctgccccgcgggccctggcaggatgcacgcctgcctggcggggccgctgctcgccgccctcctcgccaccgtcgtgcctcgcccgcagcccccggacggaggacagtgccggccgcccggatcgcatagggacttgaactccttcctgtggacgattcggcgtgatcctccggcctacctgtttggcactattcacgttgccctacacccgtcgtctgggacttcatcccggacaagctccaagggcaggccttccaggactagcacccgatgtctactttgaggctggagccttacagagcccctagcacgcatctcggcccctgagccaggctgccatgctgcatgccgcaacggcggaaatacctgacaggaccgtgctgccccaacgaaagctttactggcagcttgaagaggccacactggagctactgtgaagcttgcatgatgcccttcctgtgatgacgccgcgctcagcggggcaaaggggctcatatgcgtgactacactattcaagtgccatcgcagagcaaactgggagcgcaaagaggccc

SEQ ID NO: 62945 - DNA, 915 bp, Homo Sapiens
gtatctggtgttgggaattctgtgcctaaagaattccgactcagatccgaaggggatctggtggaatcgagggtgaaagaccagagggacaatgttctactatcccaacgtgcttcagcgccacaccggctgctttgccaccatctggctggcggcgactcgcggcagccggttggtgaagcgcgaatacctgagggtgaatgtggtgaaaacctgcgaggaaatcctcaattacgtgctggtacgagtgcaacccccgcagcccggcctgccgcggtcccggcttctccctctatctctcagcccaacttcagatcggtgtgatccgcgtctattctcaacaatgccagtacctcgtggaggacatccagcatatcttggagcgcctccaccgtgcccagctgcagatccgaatagatatggagactgagctacccagcctgctgcttcctaaccacctggccatgatggagaccctagaagatgctccagatcccttttttgggatgatgtctgtggatcccagacttcctagtcctttcgatatccctcagattcgacacctcttagaggctgcaatcccagagagagttgaagagatccctcctgaagttcctacagagcccagggagccagagaggattccggtcactgtgctgccacctgaggccatcacgatcctggaggcagagcccatacggatgctggagattgagggtgaacgggagctcccagaggtcagccgccgagaactggacctgctgatcgcagaggaagaagaagctatcttgtttgaatatcccgcggctcccatctcgcagctcctgcagaggtggaaggaataggagaggcactgggtgcctgaggagctgaggcgtgaaggctgggaatgtgggtgcctatcatggatggtgg

SEQ ID NO: 62946 - DNA, 371 bp, Homo Sapiens
cctgtttcccaggaacggtccccggcttcgcgccccaatttctaacagcctgcctggcgcccgggaacgttctaacatccttggggagcgccccagctacaagacactgtcctgagaacgctgtcatcacccgtagttgcaagtttcggagcggcagtgggaagcatgcgggactacgacgaggtgatcgccttcctgggcgagtgggggcccttccagcgcctcatcttcttcctgctcagcgccagcatcatccccaatggcttcactggtctgtccttcgtgttcctggtggggaccccggagcaccgctgtcgggtgccggacgccgcgaacctgagcagcgcctggcgcaaccacagtgtcccact

SEQ ID NO: 62947 - DNA, 342 bp, Homo Sapiens
  misc_feature (154)..(165): n is a, c, g, or t
ttttaataaaaatgagttggaaaaaaaataagatatcaactgccagcctggagaaggtgacagtccaagtgtgcaacagctgttctgaattgtcttccgctagccaagaacctatatggccttcttttggacaaaccttgaaaatgtttatttnnnnnnnnnnnngatgacaaagaaaaacagagagagagaatattggagatgtcctgaattttaatagggtactgcgccattagggctttttgcgctaaaggatgaacatgtactggtttatgtggacaagccattataccaccagactgcaatgccagtttcctctactgcaaacagtgttctgtgaca

SEQ ID NO: 62948 - DNA, 986 bp, Homo Sapiens
ggcctgagccacagaagctgctcagggactatccatggcctccccgtggccaacttgagatctgctctgcagctttagtgcccgacttggaaggcccatgggctgcagatgaggaaactgaggtccagacagccgaagagtggtagtgtccaggacacacaactggtgcctgtgcggccggcggctgccccgagggacgcggccctaggcggtggctgatggggaccgcccggatcgcacccggcctggcgctcctgctctgctgccccgtgctcagctccgcgtacgcgctggtggatgcagatgacgtcatgactaaagaggaacagatcttcctgctgcaccgtgctcaggcccagtgcggaaaacggctcaaggaggtcctgcatgaggccagccagcataatggaatcagacaagggatggacatctgcgtccacatcagggaagcccaggaaagataaggcatctgggaagctctaccctgagtctgaggaggacaaggaggcacccactggcagcaggtaccgagggcgcccctgtctgccggaatgggaccacatcctgtgctggccgctgggggcaccaggtgaggtggtggctgtgccctgtccggactacatttatgacttcagtcacaaaggccatgcctaccgacgctgtgaccgcaatggcagctgggagctggtgcctgggcacaacaaggacgtgggccaactacagcgagtgtgtcaaatttctcaccaattgagactcgtgaacggggaggtgtttgaccgcctgggcatgatttacaccgtgggctactccgtgtccctggcgtccctcaccgtagctgtgctcatcctggcctactttaggcggttgaactgaacgcgcaactacatccacatgcaccctgttcctgtccttcatgctggcgcgccgtgagcatcttcgtcaaggacgctggtgctcatactctgggcgccacgcttgaatgaggg

SEQ ID NO: 62949 - DNA, 416 bp, Homo Sapiens
acattaaggagtcagccgcctacctggccctcttgactcggggcctgcagagactctaccagggccacaccctacgcagccgcccctggggaacccctgggaaccctgaatcaggggccatgacctctccaaaccctctctgctcactcctcaccttcagtgacttcaacgcaggagccatcaagaataaggcccagtcggtgcgagaagtgtttgcccggcagctgatgcaggtgcgcggagtgagtggggagaaggcagcagccctggtggatcgatacagcacccctgccagcctcctggccgcctatgatgcctgtgccacccccaaggaacaagagacactgctgagcaccattaagtgtgggcctctacagaggaatctggggcctgctctgagcaggacctatcccgag

SEQ ID NO: 62950 - DNA, 613 bp, Homo Sapiens
tcaccccccccgccgcagagtccgctggcacgggagtgtaccccccgtgtgggcccggtccggaattcccgggatcggttccccggcccgcgccgctcccggccccccggctcgggcgcctcccgccgctagcgcagtgctcccccgccggcctgtggctcctgcgctggcgcggctcggctcatgcccccgggcgcggggcacacaggccggccggcagccgctgtggaaataggcccccggtgggcggtggcgtgctggcggggccatggctgcggagacccctgggcgccggccgcctccggggaggagttctccttcgtcagcccgctggtgaaatacctgctcttcttcttcaacatgctcttcttgggtgatttccattggtgatggtggctgtgggtgtctacgctcggctaatgaagcatgcagaagcagccctagcctgcctggccagtggaccctgccatcctgctgatcgtggttgggtgtcctcatgttcctgctcaccttctgtggctgcattgggtccctccgcgagaacatctgcctcctgcagacgtctccctctgcctcaccgctgtgttcctgctgcagctgggccgctgggatc

SEQ ID NO: 62951 - DNA, 1119 bp, Homo Sapiens
ggttcttttccaaacttgttccctggcttccaagtgacgaaaccagctgtaatttgagagcggagagatcctcaggatatctttagccaaaggaaaagctccgcattcccacccagtccagaaattgaaatactatcagggggcaagagcctttctctccagctacacactccatctcccgggagcaaggggaaactccgagaggagggcaacagagccagcatcttgccaggccccggaggaggggttccccgctacgcctgtgccggaggagttccagtcaccgagcgaggggcgcaagggtgggtgcatcctgcgctgcggcgggcgcgctacccagacgctggtgtgcagagccacatgaagcctgctggggactgggggccagggagcagcaagccagctgggactgaggcggacgctgtctcagggagacgctgactcgcaaagacactcccttccttgtgcctgggtaaaaagtctcctcctggggtccctggccatcctgaatatccagaatggtgtttctgaagttcttctgcatgagtttcttctgccacctgtgtcaaggctacttcgatggccccctctacccagagatgtccaatgggactctgcaccactacttcgtgcccgatggggactatgaggagaacgatgaccccgagaagtgccagctgctcttcagggtgagtgaccaccaggcgctgctcccagggggaggggagccaggttggcagcctgctgagcctcaccctgcgggaggagttcaccgtgctgggccgccaggtggaggatgctgggcgcgtgctggaggggcatcagcaacagcatctcctacgacctagaccggggaagagagctatggcaagtacctgcggcgggagtcccaccagatcggggatgcctactccaactcggacaaatccctcactgagctggagagcaagttcaagcagggccaggaacaggacagccggcaggagagcaggctcaacgaggactttctggcgaatgctggtccacaccaggtccctgctgaaggagacacttggacatctctgtggggctcagggacaaatacgagctgctggccctcaccattaggagccatgggaa

SEQ ID NO: 62952 - DNA, 956 bp, Homo Sapiens
gctaaaggaaacaacagcggctaggggtgaaaggacagccaggttagatgttctgagggggcgggagcaaccgatgagagcacgtgagcatctgtcctttctacccgttcctctttatctttagtgttcagtagcagcgggggatagcccggggcccggtgtatggccacggagttacatgtgtccggactccagtgccctgtcgacaacgcagcaatgtaaactctgcctctaaccaccaagtcccgagcagctgcgaccgtggcgatctgatcctggaccacgcagggggaaacgagagcctccagggccaaggtgattctcctcacggaggtacgcccattctagcctgccggccgagcttggactctgtgggcctgcggcgtgctccagcctcaactcagagggcaacagtggtacgtggtgacagtagcagctatagacgcaccagctggcaactccttcctagaggactgcgaactctcccggcagatcggggcgcagcgttaagctgctgcctatgaatgatcagatacgggagctacagaccatcatccgggacaagacagccagtagaggtgacttcatgttttctgcggatcgttgtgatcagacttgttgtggaacgagggatgtgaatcagcgtgccatatagacagaatgcatggtgaccactccaacagggtacagagtatgaaggagtgaaatttgacgaagggcaattgtggggtcagcataatgagaagcggtgaggcaatggaacaaggtttacgagactgctgtcgatccatacgaattggcacagatcctgattcagagtggtgaggagacacaaagagccaaagtatattatgcccaaattccccccagacattaaccggagaacagtccttctgatgtatcccagttctcagcactggaaatatggtacttgaaggcgtgaaggttcttaagga

SEQ ID NO: 62953 - DNA, 1139 bp, Homo Sapiens
  misc_feature (922)..(922): n is a, c, g, or t
cggtccggaattttccggatggtctgtttgagttgggtgattaaggcgggaagttaatcctcttccaatcagctccccatctcgccctctggcggctccggaccacaggccgagttactctgattaccgccatgctccaagacccgcactgacagtccccacgtgagggaccgcggtgggagtcctaaatgggggaggaggggacgggcggcactgtgcatctgctgtgcctcgcggcctccagcggggtccccctattctgcaggagcagtcgcggcggcgcccccgcccgtcagcagctcccgttctctgtcatcggttccctcaatggagtccacatgtttgggcagaatctggaggtgcagctgagctctgcgaggaccgagaacacgactgtggtgtggaaaagcttccatgacagcatcaccctcattgttctgtcatctgaggtgggcatctctgagctgaggctggagagactactccaaatggtgtttggacgccatggtccttcttgtgggacttgaagaactgaccaatatccgcaacgtggagagactgaagaaggacttgagggccagttattgcctcatcgacagcttcctgggggactcggagctcatcggggacctgacccagtgtgtggactgcgtgattcctccagaggggtccctcttgcaggaagccctctccgggttcgctgaggccgcgggcacgaccttcgtcagtctggtggtgtccggccgggtggtggcagcaacagagggttggtggcggctggggacgcccgaggccgtgctgctccccttggcttggtgggggtcccctgccgccgcaagaccgctcgcgaactacccggtgtacctgccgcacgggagccccccggtcccacaccgggctcctgaccttgactctgctgccnagcctggagctggggtctactctgcgggccgaggcccgccccttagccagttgtatccacaggcttctggaagcgcctggtggcagccacctgctggaacccttttgcgggccttgctctgccgtttgggaaccccgggcgcctggcccaggtggggttcccccccctttccacagaaaaatcccttcggggtttggtgggtcccttccaccctggg

SEQ ID NO: 62954 - DNA, 502 bp, Homo Sapiens
tgtgcagtgagacctaacgcaggtttccccgcaaatgactggtcacgcgggactgaacaccgcacaggcaggaggcatggccaagatgggaataactgggaacacaagtccatttggacagccctttagtcaagctggagggcagccaatgggagccactggagtgaacccccagttagccagcaaacagagcatggtcaacagtttgcccaccttccctacagatatcaagaatacttcagtcaccaacgtgccaaatatgtctcagatgcaaacatcagtgggaattgtacccacacaagcaattgcaacaggccccactgcagatcctgaaaaacgcaaactgatacagcagcagctggttctactgcttcatgctcataagtgtcagagacgagagcaagcaaacggagaggttcgggcctgctcgctcccgcattgtcgaaccatgaaaaacgttttgaatcacatgacgcattgtcaggctgggaaagcctgccaa

SEQ ID NO: 62955 - DNA, 1103 bp, Homo Sapiens
  misc_feature (1008)..(1008): n is a, c, g, or t
ggaattttcgggatcaggaccccagcttccatcctcacgttgtgtggacatggtccagcttcctgccgcggaccatgagcaatccaagggtaggggagcctcaagagggagacactgagcctttacgtaatgaggcagggaggggttcaagcaattaattgagaaaggatgtgacaggactggcacctggtcactttgtggccgtgagcaccagctccgcctatcccctctgcagggcagaagggacagtgctgcgggaggcggaggtgctgtggctctgggaaggctgaaaagggacggctgcaaaggagaagagcttcgagtcctttccatcaggagaaaaacccggtcagctgtggaggagcactgcacaggagtcagaaagtggagtctgggcgtgaccttgcatctgaccagcctggggctctaggtccgccacatctggactaatctcctgtgtcctgagctcccaggaccccagaggcaagcatggaggggccacgctggcaggtaaagttgaacccacagtggcttaggacgagctcctgcacagcggcctgtttcccaattgcatcgtgtatctctttgcctctcttggctcagccatggccccagccccaggccatccaaggggcagcctggtgaggtttcttcaactttgctaatgacttgacctacagtcttaagtcaagaaggtgtcgctctcctttgtgatggctggacgcacaggagctgtggtcaggatggggctagaggagctgaaatcccagggcaacaaagggtatttaaaaaacacatcgcaggagaaacaagctaaagagtcttggaaccaggaaatcataagctgtttgatgggatgaactatcttgggagtgatgaggtcccccatcactgaaagtattcaagcagagagagtcttggaattatggagaccggaagagcatcagacactggattgaagtctgccctacatgagatggaagaacccttccaaaccctgaagccgancaaccactttctttggaagcaggctggcccatctatgtcccagaaggccaaccccaaggctagctttttaacaccgggggaacttaaacctttcc

SEQ ID NO: 62956 - DNA, 1117 bp, Homo Sapiens
  misc_feature (906)..(995): n is a, c, g, or t
aggctggtaccggtccggaattttcgggatggcgaggatggcggcggagaacgaggccagccaggagagcgccctgggcgcctactcgccagtggactacatgagcatcaccagcttcccgcggctgcccgaggacgagccggcgcccgcggccccgctgaggggccgcaaggacgaggacgcctttctgggagaccccgacaccgacccggactccttcctgaagtctgcacggctgcagcggctgccatcgtcgtcgtcggagatgggcagccaagacgggtcgccgctacgcgagacgcgcaaagacccgttctccgccgcagcggccgagtgctcctgccgccaggatgggctcacggtcatcgtcacggcctgtctcaccttcgctaccggtgtcaccgtggcgctggtcatgcagatctacttcggggacccccagatcttccagcagggtgccgtggtgaccgatgctgcccgctgcacttcactgggcatcgaggtgctcagtaaacagggatcttctgtggacgcagcggtggcagcagccttgtgtttgggtatcgtggctccacacagttctggcctgggcggtgggggcgtgatgctggtacatgacatccgacgaaatgagagccacctaattgatttccgggagtccgcaccaggggcccctcatggaagagaccctgcaaagatcctgggagacccaggtggggaccctggtgagaaaagagagttcagggcactctccctccctgcccttccgctaacccacccactggttcgcctgccctctcaccgccggaacgcgcacccacaggtgcccccggaatcccgtggccctaatggacgacggcccgccacacgccccgggacacaataatggacctggacaacgtttgnnnnnnnnnnnnnnnnnnnnnnnnnnnnnnnnnnnnnnnnnnnnnnnnnnnnnnnnnnnnnnnnnnnnnnnnnnnnnnnnnnnnnnnnnnggtggcggccacacggtgtggataagcgaagttgcacaccacgcatgtgccctgtgggcccacactgcggcgtgtcaaccccccacacgcccgtctatgggtacccctcctggcacccccca

SEQ ID NO: 62957 - DNA, 522 bp, Homo Sapiens
gatatgcacctgccctccttccatctgaaggacgtcctcactaccatcggggagaaggtgtgcctggaggtgagcagctgcctctccctgtgtagggtcctctcccttcaccacggacaaggagaccgtgctcaagggccagatccaggccgtggaccagtcccgatgaccccattcgcaggatcatggaatctcgaatcctgaccttcttagaaacctaccttgcctcgggtcatcagaagccattgcccaccagtcccctgggggactcagtccagttcagagagagctggaggccgttgctattaaatttgctcgcctggtcaactataacaagatggtgttctgtccgtactatgatgcaatcctgagtaagatcctcgtccgatcctaacgtgtatgcaccctacagcagcagtattatctcactagccacagaatacctgttctgtactctaatgttgcattggaaatggctatatagtacatgtctattacccgcagcgattccaaggggggata

SEQ ID NO: 62958 - DNA, 460 bp, Homo Sapiens
agtgactaaccacattctttaaatatcaatagcttagtcagattgattattgtgctatattgtgaattgagaggtattaagtttcatgaggctttgtcattagtattcctgcttctaccaagaaggtatttaatatatgtgttggcctattattgatgtaaaagttatttaaataagttaatgttagaaacattattcaatttaaatactgaaaacatttcaaagagattttgtttttgttatagcatagcaaagtaaattggaacaatcatacaatgacattttttaaaccaaaattttgtaacttttataacttggagttaagttagcttgagtaacaaaaaggtaaagtggtttttgtttagagttaacgaaatgttagtactttttctatgtttaacaaattggcagtttgtcagttatgacatttttgtgtaataaatattttgtatttgtttga

SEQ ID NO: 62959 - DNA, 462 bp, Homo Sapiens
ctttctttactgtaacgtggacactttctatgttagttttgatgcataattctttgaatccttttatacaaactagaatgtatgtgtaagaatacctgtccctgcaatgtagtaactacaaacttatttttaaataaatagaaaacttgtttttctaagctattttgtagagcctcatgatttattatttgctttttaaagttttttggcatcacataaagcacttagtacataatctcaacaagctgcttaccaaagtggtcatatggcagataccattatgtaaatgctggttcattagagtttccagtgccctgtgtgttttgcaaagtgtgaaaactgtcagttaaaagatatttgggtgccgaaatgtaatttaattccaaaacaactgaaggtcaaaaacttatatgcctttttatgtgtacatttaataaaacaattttattgatttcttaccgt

SEQ ID NO: 62960 - DNA, 506 bp, Homo Sapiens
  misc_feature (424)..(425): n is a, c, g, or t
aagagctcccttggccctgttccccactccctccactggcctctgctgttcctgtctttgctcacaccctcacagctgctctctggcagaggttgcatagcctaggagcagctgcaattgcacctgagggacaggccctagagtttggtggcccaagtcctgaacccctcttagaccaggtgaggtgcagaggtggttgctgcttccagtttcccttcagacttagctgtgtgaaccccactcctatcctttggccttagttttcccatctgtaaaactcagaaacgcagttggaaagtccttattcatttagtaagcgaatatattataatatgtatagagcgccttttgtgtaagtcactggtcagaatcctcactgagctcccagtccagagagaagccagacaattaaaacagtaactgnntgatgtgtgtggcctttgtctactcaaggtccctttctgctcccctcttctagtctcacttcccaaggctgtgagctctaa

SEQ ID NO: 62961 - DNA, 677 bp, Homo Sapiens
tgctaatgagaaagtggctctgcagaaagctctgttatattatgaaagcattcatggacggccggtaacaaagaacgaacggcaggtgatgaagccactatacgacaggtaccggctggtcaaacagatcctctcccgagctaacaccatacccatcattggttccccctccagcaagcggagaagccctttgctgcagccaattatcgagggcgaaactgcttccttcttcaaggagataaaggaagaagaggaggggtcagaagacgatagcaatgtgaagccagacttcatggtcactctgaaaaccgatttcagtgcacgatgctttctggatcaattcgaagatgacgctgatggatttatttccccaatggatgataaaataccatcaaaatgcagctaggacacagggctttcaaatctccatgctgcctcaatacctgaactcctgggacacctccaggaaatgagagaagaaaagaaaaggattcgaaagaaacttcgggattttgaagacaactttttcagacagaatggaagaaatgtccagaaggaagaccgcactcctatggctgaagaatacagtgaatataagcacataagggcgaaactgaggctcctggagtgtcattcagtcataggggagacatccacctcttcagggatcctctgat

SEQ ID NO: 62962 - DNA, 1076 bp, Homo Sapiens
tggctgccctgcgcggggacactcagagcccggtgggcgggaggaaggcggcatgccccagacggtgatcctcccgggccctgcgccctggggcttcaggctctcagggggcatagacttcaaccagcctttggtcatcaccaggattacaccaggaagcaaggcggcagctgccaacctgtgtcctggagatgtcatcctggctattgacggctttgggacagagtccatgactcatgctgatgcgcaggacaggattaaagcagcagctcaccagctgtgtctcaaaattgacaggggagaaactcacttatggtctccacaagtatctgaagatgggaaagcccatcctttcaaaatcaacttagaatcagaaccacaggaattcaaacccattggtaccgcgcacaacagaagggcccagccttttgttgcagctgcaaacattgatgacaaaagacaggtagtgagcgcttcctataactcgccaattgggctctattcaactagcaatatacaagatgcgcttcacggacagctgcggggtctcattcctagctcacctcaaaacgagcccacagcctcggtgccccccgagtcggacgtgtaccggatgctccacgacaatcggaatgagcccacacagcctcgccagtcgggctccttcagagtgctccagggaatggtggacgatggctctgatgaccgtccggctggaacgcggagtgtgagagctccggtgacgaaagtccatggcggttcaggcggggcacagaggatgccgctctgtgacaaatgtgggagtggcatagttggtgctgtggtgaaggcgcgggataagtaccggcaccctgagtgcttcgtgtgtgccgactgcaacctcaacctcaagcaaaagggctacttcttcatagaaggggagctgtactgcgaaacccacgcaagagcccgcacaaagcccccagagggctatgacacggtcactctgtatcccaaagcttaagtctctgcaggcgtggcacgcacgcacgcacccacccacgcgcacttacacgagaagacatatactgggtttg

SEQ ID NO: 62963 - DNA, 274 bp, Homo Sapiens
gatggacctcaacagctgccttactattttaccatctgacgtttttagtagggagctggggaaacgactgctccgaggaatgcggtcggaggatttgtgttgctgtggacgtggttccaacattctctcctatctcattagaagaaataggtagcagcatcactcaccagtcttatgccatgacctgctgctttaacatctcctggaatgttctgggagagaacgtttcgtttgcttgtgcacgactctgttcatttatgctgtttattaagtc

SEQ ID NO: 62964 - DNA, 1072 bp, Homo Sapiens
ctctggggcaggcccgctttctgtcaaaatggcagcgcccagcgtgcgcgggtatctctgaagttggggtttaagattcttgcccgtgagagcgaacgagcctgccgtacttctgattttgaaacacctgggtctgggcttcccgggcgagcggtggaacctgtgagaagtttctacaatggtgggctcagctctcaggagaggtgcccatgcatatgtctacctggtgagtaaggccagtcacatctccagaggccatcagcaccaggcctggggatcgaggcctcctgcagcagagtgtgccacccaaagagctccaggcagtgtggtggagctgctgggcaaatcctaccctcaggacgaccacagcaacctcacccggaaggtcctcaccagagttggcaggaacctgcacaaccagcagcatcaccctctgtggctgatcaaggagagggtgaaggagcacttctacaagcagtatgtgggccgctttgggaccccgttgttctcggtctacgacaacctttctccagtggtcacgacctggcagaactttgacagcctgctcatcccagctgatcaccccagcaggaagaagggggacaactattacctgaatcggactcacatgctgagagcgcacacgtctgcacaccagtgggacttgctgcacgcgggactggatgccttcctggtggtgggtgatgtctacaggcgtgaccagatcgactcccagcactaccctattttccaccagctggaggccgtgcggctcttctccaagcatgaggtgagtcttgagatgtttctcatcgctgaaggatgtcatagacattttatgttgaggtcactaacatttagctcgatgagaccagcatagtcatccttgcttgccttattttgccttagtgaatcatccatacttaatgacgtcttgtgtataggtgtgccccagtactttttgaccgctttgttgtgttagtaactacagaaattggtaagccttagtttccagttgtctgtccttatcctttctctcaatactgacccgccattctctgggttacttctt

SEQ ID NO: 62965 - DNA, 383 bp, Homo Sapiens
aagaatgaaattaaacagggcttggcacagtgaagcacgggaaaggctttctacagagcagtgactgttgttactcgctgttacaccttagttaatgcgttttcctctctgggtgcctcccattttctggctcaagtccctgcccaggatcaagcttggaggagggccccgagggaggggccacagagactgggtgaagagcaagggtgtttgccccaggagcatggcgaaaattgctgctgggtggccttgggaagcacaaaggggacccaactaagggcctgatcctactgcctggggtgtcagtgccagccccccacaaatcttttctgccccccccaggaggctgaccagtgtgtggcctgtgcccacgataagaccaa

SEQ ID NO: 62966 - DNA, 276 bp, Homo Sapiens
ttaatggagggagtgagaagggatttggtatttttgttgaaggagtagaacctggtagcatagctgctgattcaggactgatacgtggtgatcagattatggaagtaaatggacaaaactttgagaatattacatttatgaaagccgttgaaattttgaggaataatactcatcttgcacttactgtgaggaccaacatttttgtgttcaaagagttacttgtttaggactggactagagaaatctggtgttcctcatatccccgaagattgctgc

SEQ ID NO: 62967 - DNA, 442 bp, Homo Sapiens
gtttgggacaggttgactgtgtaggtgacagggagggaatgatgatggccaggggaaagagcatcgtataggctaggggattgaactatggactgattcagtgtaaataaaaacaaattaacaggtagtagttcccgtcagttctgttggaagcagcccactccctcacttttactccttcctccaaccctcaatcagagctacttacagccaggcaggatggggctttccccaaagcaattggccgtttgtccagtggcagacaatggtggctacagcctttgtgcttttaagagtgggctgggattgtggagactgcccaggggcttggctttgtcagaacttggacaatcttcttttgaaataattatctgaactcaacatctagcacatagaatgtgttcgacaaatgcttgttgaatgaataaattatggctgcaaa

SEQ ID NO: 62968 - DNA, 319 bp, Homo Sapiens
tggaactctaagaagaattcccctttaagagaattcccgccaaagggccaaaattggcctgggtaaacttttgcaggaacggtcactcggctctcagtgtcctggacgtggacggtatgaaggtgaaaggcagagcagtgaagattagaccgaagaccaaggactggctgaaaggtttgcgagaggagatcattcggaaacgagacagcatggcccccgtgtctcccactgccaactcctgtttgctggaggaaaactttgacttcacaagtttggactatgagtcagaaggggatattcttgaagacgatgaagacta

SEQ ID NO: 62969 - DNA, 1509 bp, Homo Sapiens
  misc_feature (807)..(902): n is a, c, g, or t
  misc_feature (1261)..(1318): n is a, c, g, or t
caagagaaggcgtgtgagcaacccacccactggaagatcacctactgaggagtgatcctccagggccgctccccggacccgacaggcgcgggtggatgcaggttctgtcgccgtggagtcaccgtctactgccagccgggagctgggctggacatgtgaccgtccctcgcagggtcccaggcccagaatgaggccccacgcctctagagctggcgctctgtcctcggcgttgccagccgccatggctgatgaaggaggctccgctgctctcgggggtggcggttgttttcaggcagcgtctgtgaacccacagctcggttgccaggagtgctcgcgtggtgacccagaagcaggagtgtttgtcaggctcccgctctggcctttccagccacctttcatgtcttcatattttaagtgcattgaggatagatgcaggcgggtgagctgccctccgtcaggtggacccgggcttgacatttccctgggagctggtgcaaggagaagcgtcattttaaatgtctgcagagcgaccaggggcctcatgaatctctccgttgccctccgcgcagcaggaggctgcctgtgtgtttcctcctgggatgcgtgcaaggcagacctggtgctgcaaaggaaagggcctgaggcctcagggaggcccgtggagggatgacagttcaggccctactgctggcacgtcagagcactgggaagtttttcagtgacgtctctggggcactcagtggattgtctgtaggaaacttgcagctctgctcctcacaccaggcccggctggccacccaccctcgnnnnnnnnnnnnnnnnnnnnnnnnnnnnnnnnnnnnnnnnnnnnnnnnnnnnnnnnnnnnnnnnnnnnnnnnnnnnnnnnnnnnnnnnnnnnnnnncggctggcaggtgcacatggggcctccaggtctaccattcgctattgagaactacaaatgaggaaggacagttacgctaactccaaaaggctgtctaagatgagctgctttatcagggagctccttgtacccattttacagaaatcatttttaggtctttgggcccacacccccaggggcatctgcaaagagggcaacgctagacccagaatccgtggaaggtgcagcagtgcccccggggtcctccgggtcagggaagcccccttcccctcttggcccgtacccttttgtgacttcccacccaggggccgggggtccctccattaatgctggaagtggccccagcatccttccgccannnnnnnnnnnnnnnnnnnnnnnnnnnnnnnnnnnnnnnnnnnnnnnnnnnnnnnnnngcaggacagctcattttatattatcaaatcccgttcttttaacacgcgacagtcgcgcagtttaatcttccctccccccctatgcctcgcccattgcccgttggcggttatacgcagtatcctgataacgtagtacccgcgcccacctcttcaactttccctattctctttgcagtagtttccacactcgc

SEQ ID NO: 62970 - DNA, 505 bp, Homo Sapiens
agtttctgtttttttaaaggaaactatttgtgggctataggaaactttctgatgcctccggattgtgttagtagtagccatcaggagggtctccaactaaaacacttgttcctgcttgctcctttcccctctcattgttcagcattcttgtcaagttgcccagcttggagttgtctgtcacgcacatgtgtcctgtggttatagctagaaggacaggagtctcctgctgatgcgtgatagcttaagcttggggagaaggtcttttccactgcctagctaagcagtctggggagagcatggggatcatttctatgtgtgtgggtaatctggtcagtaagattgagacttagttaagattccccttggaaattccttaatgtttattagcttctaactagtgttgtaagtccgatgccagaatttggagatttgagttcttcttttcatggcttttattcactgtgactaataagcttcctaataaatccttgccagacttaaaaaa

SEQ ID NO: 62971 - DNA, 677 bp, Homo Sapiens
gcagcaacagcatcgattaagtgtagatgccaatcttcagattcctaaagagttaactcttgcaagcaaaagagaattacttcaaaagacgagtgaacgtttagcatctggtgaaattacacaggatgacttccttgttgttgtgcatcaaattcgacagctatttcagtatcaagaaggtgtgcgagaagagcagagatctccattcaatgatcgttttccacttaagcgacctcgatatgaagattcagataaaccatttgtagatggtccagcatcaagattcgccggcctggatacaaatcagcgacttacagctttagctgaagacagaccgttatttgatggacctagtaggccatcagtagcaagagatggcccaacgaagatgatttttgaaggacccaataaattaagccctcgaattgatggacctcccacaccagcttctcttcggtttgatgggtcaccaggacaaatggggggaggaggccctttgagatttgaggggccacaaggtcagctaggaggtgggtgtcctttgagatttgaaggtcctccaggaccagtggggacacctctgcggtttgagggcccaattgctcaagcaggaggaggtggttttcggtttgaaggttccctggtctgagtttggggtaaccagggtaccccaaacc

SEQ ID NO: 62972 - DNA, 354 bp, Homo Sapiens
cttgtctttgtgtggtatgtgtgtgtgagtgtgcatgtatgcacacacacaggggttaaccacccctcacctagggctccagactccagttgtccctctcctcctacctgtgtctccttgttttggggtcctgactgaagaaggtgtccagggggcagagtcagggccaagcactggggtgcctcctctcacctggccagactctgacccacctacctcagctggggtgaggggcacccctcaaactcagtcatgtggttccaaactaccccattccccactccagactctgacccagcctcagtcctaactcctggggctgggctgaggggaacaagcatttgctgaaacttg

SEQ ID NO: 62973 - DNA, 761 bp, Homo Sapiens
  misc_feature (174)..(174): n is a, c, g, or t
acagccccagttccaccttccaagccggtgcggccctgggagggggtgatgtgccccacaagacacatcaggcccctgcctctgcttcgtcactgcctgggaccggggcccagttacccccccagccccgataccttggtcgtcccccatcaccacctcacccccacccccggnagctgatggatgtgagcctggtgggcggccctgctgactgctccccacctcacccagctgcctgcccccctatcgacgccggcttgcctcgagccctccggactcggatgactggaggtcgtccaccccttcccagcctccttgtatgaccactgtccactcttggggccttcaccttgggcctccgtggtgtaccccagagcacatgcagccagctcgtgaccctgccccctccctggggcccctcctgaagccataccctcccccatctgggggccctgggctcccatcctcatctctctccttgactggaattgctgctacccagctggggtgggtgaggcctgcactgattggggcctggggcaggggggtcaaggagagggttttggccgctccctccccactaaggactggacccttgggcccctctccccctttttttctatttattgtaccaaagacagtggtggtccggtggagggaagaccccccctcaccccaggaccctaggagggggtgggggcaggtagggggagatggccttgctcctcctcgctgtacccccagtaaagagctttctcaca

SEQ ID NO: 62974 - DNA, 538 bp, Homo Sapiens
  misc_feature (191)..(227): n is a, c, g, or t
gaggctagattctcagcagctttattgaatattgagaggtggtctcacctcccactggacatgtgtcctcaagttcataccagaacttctttgggacagacagacaggtggcagggcagggcaggtgtccacgagggtggggccagtgcaccaggggcagctcagctctccaaaggggccagcatctgcannnnnnnnnnnnnnnnnnnnnnnnnnnnnnnnnnnnnttgctccagctcagggagggagagagtcttgtcctggctctctttctccttgaaggtgctgaagaaggagttgaccttgtccctcaggtccttctccaggaagctcaagtggccttccacgtcccccgcatggggcccagtttctgcctgagctgttccatctgctgcaccagggctttgttgaagttttccccgtaggctccacccggcgtcggaactcctccacctgctggtccatggtgcccaccagctctgccagttgacttctgcagccctcggtgtttggccctcaggttgcacgctcggtctcg

SEQ ID NO: 62975 - DNA, 341 bp, Homo Sapiens
gttcaagagtgaaaataagatgttctgtctgaaggctaccatgccggatctgtaaatgaacctgttaaatgctgtatttgctccaacggcttactatagaatgttacttaatacaatatcatacttattacaatttttactataggagtgtaataggtaaaattaatctctattttagtgggcccatgtttagtctttcaccatcctttaaactgctgtgaatttttttgtcatgacttgaaagcaaggatagagagacactttagagatatgtggggtttttttaccattccagagcttgtgagcataatcatatttgcgttatatttatagtcatgaac

SEQ ID NO: 62976 - DNA, 454 bp, Homo Sapiens
taatttaatacttaaagatgggcccagtggataagcggaagggtttatttgcaagacgacgaccagctgttgctcaccagaaggaccacatttatattatgtggatcctgtcaacaaagttctgaaaggtgaaattccttggtcacaagaacttcgaccagaggccaagaattttaaaactttctttgtccacacgcctaacaggacgtattatctgatggaccccagcgggaacgcacacaagtggtgcaggaagatccaggaggtttggaggcagcgataccagagccacccggacgccgctgtgcagtgacgtcgtgcggccgggctgcccttcgctgccaggacacctgcccctaagcgcttggccgccatccgggacgcttccagaccacctgccagccatcacaaggggaatgcagaggcggaaaccttgcagcatttttatttaaaa

SEQ ID NO: 62977 - DNA, 562 bp, Homo Sapiens
actttgtcccagtccaatacttttgatgtacaaaacaaaaacagtgacttaggctcgtctaagtctgtagaagtaaaagaagaagattccagaattaaagatcaggaagacaaaggaggaactgaaccaagtcctctcaatgaaaacagcacagatgagggttcagagaaagctgatgcttcatctggatctgatagtacatcgtcgtcatctgaggattcagattctagtaatgaagactgattcccagactctgcacttaaaatatgaactgattttggattttttctttaataattaattgtaaataccccagtgttgagtgcatcaataacttactgaccgaacatttcagttatttgtttagaagtgcaaactgctttcagagactttttgcatgtaatatttcttaagattcataagtttctgaactcgtatgtactatcaaatacataaaggtgtaaaattacaacaaaaggcattataattttgttgggggttaattttatgaaaattatgctcaataagagttgtatatttaatatatttgcagtgaacacag

SEQ ID NO: 62978 - DNA, 531 bp, Homo Sapiens
agagacatgtcccagattctgttttcccaaggagcagggttgagcaggcagtctcccctcccgagtcctgagtccctggatttaggaagatctgatgggctctaacagtgcttactgcagccttgtgtccaccaccaacttctcagcatgtttctctccttggaccttgggtttccaactctgcagccttcaggtctggggccaggagtgggacccaccatttgtggggaaagtagcattcctccacctcaggccttgggtagatttggcaaaagaacaggagcagcataggctgtttgagctttggggaaatgaactttgctttttatatttaactaggatacttttatatgatgggtgctttgagtgtgaatgcagcaggctctcttgtttccgaggtgctgcttttgcaggtgacctggttacttagctaggattggtgatttgtactgctttatggtcatttgaagggccctttagtttttatgataatttttaaaataggaacttttgataagaccttctagaagc

SEQ ID NO: 62979 - DNA, 426 bp, Homo Sapiens
aattttggttgatacttttgctactatgggcaattaacttgaaaaaaataatcgatcccaactctgtgctctgatgtacctcttctgccccttttatgacacctttgaccaaatgccttctatggttcacagtgcaggcacaaaactacctctgatacagaagggttctttacaagcttattttacataccgtgaatccctcacctaaagggagaggtgaaagcaaagactgctttgaatgggtattgagggagattgtgtccataccaagccaccctgaaagtagtatttcacttgcagtagaactgtggatttgtgctgtcatttcaccttggaataaacacctatctctaagcaggaccaagaatgacttgcaatctatatgtaatggctacttacttattcaataaagttaagatatacgtt

SEQ ID NO: 62980 - DNA, 1119 bp, Homo Sapiens
ggggctgtgctgacgccggcccagcgtgcaagcctgtaggcgcagtgcagggggtggatacgtgaaccgcccggtgtcgtgggagagtttaggacaccgggacagcgcacctgccccataatgaggcggggacttggtggggcgctcacggcggctagcggtggagtctctaatgacagaggcaggggacagggttgttacctctaattaaggagaaagactcagttatgtgttaagtgggccgtgtggttgcgttaagggtgtgagcaggggtgtgcttgagaaggagtaaaggcagcttggattgtaaaaggggacagacggctttgggtaggtgggatgatggttgatgggcgtgccttaaaatggggtttactttggtgaatttagtaaatatgtgcctctgtgtgtagctcgtgaagtgccatggctgcggttgtacgcggtgtggatgattgtgggaagtagcagagccaggctgcggctctggccgttagagttagatcgtgggcctcagtcagctgcgctgaattctcacaactgtcctgggaagttgcggccccagtttccgcgctttacgggtaaggaagctgggctccggcgaggacagtttacccagggccaaccaggcaaggcgtacagcagagagcctctgcgcaaggccaccgccttccctggccgactgtctcagtccaccccatgtcacggtggcctcggtagccagccccttgcggccgggggcgtccctagctcagcgtcgggagccctgtgggcgctcaagtgctgcagtgagcctggccgataccacgtggcagacgtcttgctgcagagtggcttcctgctccctggatctgcagccagctttcatcatgtgctgtcgatgaactgcaagggatttgtctaactcagaaatgtctatttcccctctggaaatactcattttgttgtggcgacttccagcaccaacacgtcaactcagtgcagttatttttactcctctggaggatgaggggcagctggacctggtggtgaagtacctgcagggcgtctaccaggaggtgggggccaaggtgctccagcgcaccaacggcgaccggatccggttcattctggacgtgc

SEQ ID NO: 62981 - DNA, 1165 bp, Homo Sapiens
acccaatcctggtgatcagggaactaaaagtctgagggggacacaaatgtcacacctaagaggacaatcaatcattttgtatgattttgtaagtaaatgacagaatgcttttaggcacattcaatggaaggaggagatgtaggtctgtatatgttaccctgaaaagagaataagacttacttaaaaaaatgaattatgacctgttaggctgagctcaggaattgtccaaaaaggaaaaagcaaaataattaattgagagtattttttagtgagtgtaatgtataatgtacgtatgcaaagttcaactcaataggttattgatcaccatgaagtattgatcattttctatctcaaaagtgtaagccataaggctgttttacagaatagcacttctgataagctgtattaaatagccatgagcttcactgcttagagggagcagaaaggtcaacatctaaaagcaccttacaactagtttttgaacctgtcttgataagtgcttgaattcaagactggtcagtccaagagcagacaaaaatatcacaagtcagtcagtcactgggtttccatttctgaattttatgcactccaaccatgaatttaaactaaatttttagaaatcaagtatctttctaagtgtccttggatttatagacaatgtatgtacaatccaaatagaggagcttaatggaatccttttaggagactggttggtttttttccctctttcccaacatgtttaagaaatgtaacattctaagtattggatctcttttcttgacctagtataatgacaactgcagtgacttaagtttttgctgttttcgttttcccgctttgcaatttcctccttttgccaaaaatgttttcctacagaagactgtcgtgactcacgctacttgggaaactcactctggccactcctcctctggtggcatgagctgcttcccagtagctattccgattggatattccgttcgtcgtcacatagctggcttttctctcctcatgatgtaccttattttcttaggtaaataattccaaactctcatcgggtcataaagaggaggagaaacagggtgagtcaaggtaaaggagcagaaatgtagttacaagccaggtcgtcttcagtggcacaaaccaacccgttgagccctgacaacat

SEQ ID NO: 62982 - DNA, 628 bp, Homo Sapiens
acctatgcagtcacctgttgactgagcaagtaagaactggatgaatccgctttttctaacagcattcttaagagtctacactcacttctgccatttcctaaaaactcagccataacattatggactggaggtggtgggagaaacagctcgatttgtggtacagacgttgttgggggcaccactctgtgtggcagctgcagctgacagctccaaggcactttccatattaactcatttattcctcacgacaggtacttctttgatagtgcctccatgcatgcagaagatgacgtggagagctccgcgcggcacagggcaggaagctggtgtgcactctcatggatccgaagccaacacacgcctctcaactgaggactctgcccctctggcattcttccagccaccagccctgggggccaggagccactgagtgggtcacacagccttagagggcaacgagggcaggagctcgccctggcggtccccatgcagacaagaggtacacactccctggcatgcagagccacccgactgggtttcactgaagggtgaggggcggggtgtctaccgtgctttccaaataccgctcagtcacccagagcttgaaacttacaatgagccaccccat

SEQ ID NO: 62983 - DNA, 448 bp, Homo Sapiens
  misc_feature (160)..(185): n is a, c, g, or t
ctgcttaccttgtttccttttaattgataagctccaagtagttgctaattttttgacaactttaaatgagtttcattcacttcttttacttaattttttaagtatagtaccaataatttcattaacctgttctcaagtggtttggctaccattctgccannnnnnnnnnnnnnnnnnnnnnnnnngcttgagcacactgatcaaccactgaactgccttcttccattgtcctgcaatgatataagggttacatttttgtgtatatggctttcatagttgggatttcagagcactgataccagatattttcagtttgttctctgggggaatttcatttgcatctatgtttttagctatctgtgataacttgttaaatattaaaaagatattttgcttctattggaacatttgtatactcgcaactatatttctgtaaacagctgcagtc

SEQ ID NO: 62984 - DNA, 523 bp, Homo Sapiens
ttgtcagtgtgtcagtttttcctccccgaagacactccttccccaagtaattgtaggaagataaaaaaactgttaccagataacaaacactgaactcctatttgaccagaactttttcctctcgagatagttttttctttttaatgaaaaaagcataggaattggagattggcttgtctcacgcagccagtgcacatttggaattgacggaaacaacgttgctatttccacccatttgttttcggcagccttaaggccctcattctcatttcgggtgaatctgtctatctgtgaacgtggcccgcatgtgcattcttttttttatatatataaagtcagtgacgaggaactcccgagacgtgtaatgacaccacacttgttttctttgtttctttgttttatttaggcaagaagaggtgtgagtaattgaggaaaaactgacagatgcttttgctaataccaaaattgagcttacaattaggaactgagtatgtgtaacaggatacaggtgacagtgaagata

SEQ ID NO: 62985 - DNA, 636 bp, Homo Sapiens
atggagtgtgtgggctccttggagcaactttggaaagccttttctgacctctccatcgtgtaggatctcgagaacagctactcctgtacctgcccacccggcttctacggcaaaatctgtgaattgagtgccatgacctgtgcggacggcccttgctttaacgggggtcggtgctcagacagccccgatggagggtacagctgccgctgccccgtgggctactccggcttcaactgtgagaagaaaattgactactgcagctcttcaccctgttctaatggtgccaagtgtgtggacctcggtgatgcctacctgtgccgctgccaggccggcttctcggggaggcactgtgacgacaacgtggacgactgcgcctcctccccgtgcgccaacgggggcacctgccgggatggcgtgaacgacttctcctgcacctgcccgcctggctacacgggcaggaactgcagtgcccccgtcagcaggtgcgagcacgcaccctgccacaatggggccacctgccacgagaggggccaccgctatgtgtgcgagtgtgcccgaggctacgggggtcccaactgccagttcctgctccccgagctgcccccgggcccagcggtggtggacctcattaagtgg

SEQ ID NO: 62986 - DNA, 543 bp, Homo Sapiens
  misc_feature (61)..(61): n is a, c, g, or t
tttaatgcttatgagtttgcagtttttgtacttggtggtctctgtggttcacatttttttntgtgttgtagtgtctcctgcctcggttggctcagaaaataaggcctaggaactgcaattagctcatgatttgtcaagttcagttagtaccaagctaagagtttacttacagatgacagcaagcagatgctctagtaattcgtcagacattgcagggatattgtgtagtcagatattaccctcttgtggaaagaactacctcacatcattatttatttcccttctgttaccaacagccaaggaattacttagtgtggctccctgcatcaatactgggatatgcttaaacaagggaatgccataagagttcccaattgcttcgtcatagcctgggccatagatttttgttactgctaatcttgcttcttaaagttcacacccagtgcaaaaaacccaatcagcaaactaaccccaaaatctaatatatttagaaatgtaagtgttaagagatgtgcattatgtacaaaattgaaaattggtgct

SEQ ID NO: 62987 - DNA, 463 bp, Homo Sapiens
gggagctgggacaactatagacagttaggcccacaagcatcttttcgtgggacaaaaacttacctttttcagaacgtatttttctgttttcacttctaaacaaattttatatttaataagatgagggaaaacttggactgctcactaataagctttgtggcaaggactctttgttgagggcactaaacaatttattgcatgagtattccatgagtgaacaaacagtttggatcttaattcccattgggctttgaatgcgtatgcagcacaggaggaagaatgtctgtcgtggctaaacaggcagcattttagtgctgatttgtacccttcacgtgacttaaacaactgagtgagcactcaattattattgaatgaaggagtgagcaaggtaataaatgaaccaatgaaccagacaatcccagaactaatgctgtagcccatgcaccagcaaggcagccacgac

SEQ ID NO: 62988 - DNA, 370 bp, Homo Sapiens
aggatgcgtttgctggctaagctgttgatggatatgtgtaaccacagatcaagcaagtggtccctgagtttgtgaatgcatctgcagatgctgggggcagcagcgccacgtacatggaccaggccccctccccagctgtgtgcccccaggctccctataacatgtacccacagaaccctgaccatgtactcgatcaggatggagaattcgacctggatgagaccatggatgtggccaggcacgtggaggaactcttacgccgaccaatggacagtcttgactcccgcctctcgccccctgccggtcttttcacctctgccagaggctccctctcatgaatgtttgaatcccacgcttctctttggaaaca

SEQ ID NO: 62989 - DNA, 288 bp, Homo Sapiens
tttctctctggcttctctcttttcctcctccacccaccccctttggtttgacaattttgtcttaagtgtttctcaaaagaggttactttagttagcatgcgcgctgtgggcaattgttacaagtgttcttaggtttactgtgaagagaatgtattctgtatccgtgaattgctttatgggggggagggagggctaattatatattttgttgttcctctatactttgttctgttgtctgcgcctgaaaagggcggaagagttacaataaagtttacaagcgagaacccg

SEQ ID NO: 62990 - DNA, 489 bp, Homo Sapiens
cagagaagctaagaaaagcacctctccgcgcgccccacctcctccgcctcgcgctcctcctgagcagcgggcccagactgcgctccggccgcggccctcgccccgcggagccctcctaccccggcccgacgctcggcccgcgacctgccccgagccctctccatggaggcagcccgcccctccggctcctggaacggagccctctgccggctgctcctgctgaccctcgcgatcttaatatttgccagtgatgcctgcaaaaatgtgacattacatgttccctccaaactagatgccgagaaacttgttggtagagttaacctgaaagagtgctttacagctgcaaatctaattcattcaagtgatcctgacttccaaattttggaggatggttcagtctatacaacaaatactattctattgtcctcggagaagagaagttttaccatattactttccaacactgagaaccaagaaaagaagaaaata

SEQ ID NO: 62991 - DNA, 429 bp, Homo Sapiens
gcggccgctgcacacgcccatcattgtgcactgcagctctggtgtgggccgcacgggagcctttgcactgctctatgcagctgtgcaggaggtggaggctgggaacggaatccctgagctgcctcagctggtgcggcgcatgcggcagcagagaaagcacatgctgcaggagaagctgcacctcaggttctgctatgaggcagtggtgagacacgtggagcaggtcctgcagcgccatggtgtgcctcctccatgcaaacccttggccagtgcaagcatcagccagaagaaccaccttcctcaggactcccaggacctggtcctcggtggggatgtgcccatcagctccatccaggccaccattgccaagctcagcattcggcctcctggggggttggagtccccggttgccagcttgccaggccctgc

SEQ ID NO: 62992 - DNA, 841 bp, Homo Sapiens
  misc_feature (770)..(770): n is a, c, g, or t
tcctcttttgggtcccctttaagtagttgggatattttggacctggagataacaccagttacccatccttaccagggaatgttgccatcaattccagttgaaaataatagaaaagactgaatttttatatgcttcacttaggctttcatttgagtagactctaaaaattctgccttgcttaagttctaacactgcctctcagatttcagttttggacattgcacaactaagaccttttaaacgcatttgcttgctaactcggaagacacatagtctgcagcaagacattcctatattgaagaaatgagagaaaattttatgctgcatcacgtggagagcaaagctcaacggtggttgcattagttcccctcggaagtattgaaaaaactttgaaatggaaaacaattttttgcacctatgttctggagtaccagatgtctgggttctttcttctgccttagataaaatgatcatgctcagtgtaacaaagggaattaaaagttttccccacagtcccccttcttagggggagaacacaccacacatcccaaaagacacataacggcaccccaccaaccaacacaaagtggataaagacggagaaaacagctaaccaagtaagagcggagaagaggtcccacccaccagttggtacggggcaccctcctctttcgggcgctcccctccaaaaataaaagaatctctttcttctttaaaaaaaccactttatccgccaattatttggaatggcggaccgccgcgccgggggnggcgccctcccccgcgcatggtgggggtggaaaaaatagcgcggggaaaaaacaactactggtgggggtgt

SEQ ID NO: 62993 - DNA, 604 bp, Homo Sapiens
gaggacccggcttaggaggtatacataaaatgtaaagtataggtgtttattcattttgaaatgccttggtatttcaggtgctaaaatgatgtattttctggacaagtcaaggcaggagaaagcaattgctatagccactagactagatgaaactataaaagataaagatgtaaagacattaataaaggtttctgaagcactgcttgatggcagctttgggaactgtagttcccaatatgaagaatataggatggcctgtcataacctgcttccttttacatctgccttcttgcctgctgtgaatgaagtcgacaatcctaatgtggcactgaaccatacagctaattatgatgtcttggcaaatgaaatttgaaatcttctagaaagtagactcctatagactcaaagctgaattgagatcagggtttcttttccaggttgcattttaatatacgtatgaaatgaaatatttggttaggatttttaaatggcatattctgtaagcttattttgttctttacccgacctgccaatttacataaccatctgttaaattacctgtttattcttacacagttttgtaacctccttagccggaccggct

SEQ ID NO: 62994 - DNA, 869 bp, Homo Sapiens
catgctggttttcccactgcagtgtcttctgtggcttcagcgtcacctagtgcaggctgccattcaacaaacgcattgtcaacagtcaaccaaaagaaacccattggccaccataccctgaggactaaccctgacacagatgcccttccagatgccctcaatagtctaactgattccatcgccccagccttgggggagaagcactgctacctatgcactccatttacaggtgagactgggagaggtttagggagtggccaagtcccctgcctacacagctgcctcccaatctatcttctcaccctcccccttctcaggctaaaatcacactcgatgtttttatgggatcatttgatctggacattgtcaaagaaaaaattgcaccagacaagttaaaccttcaaggaaggactcagtcaggactactgcaatacggaagagaggagcttaacttcattgaaacaaaaggctggggagtttttaagtgccggggtgagatgctgagaaggaactagagacatcaggaagaggttaggaaatgccgtaaagctatctgcgttggctcattggaatttttcaaaactgggaatctgcccttctacaaaaactgagacacagatgtatcatctccttcaataattgcattttaaagggatggctctgaagtcttgagaaaggcattcctgggttgcaaaactaggaggaggctagaagaaaatttgggagaagatttgcctctcaaagaggtagagaaagaactcacaattgccagtttcctaaaataaatcctccgtgaaaaaaggaggcctgatggatggaactggaggtcattatgttaagtgaaatcagccgcgacatgttcggggaat

SEQ ID NO: 62995 - DNA, 639 bp, Homo Sapiens
  misc_feature (553)..(597): n is a, c, g, or t
tcactgctgggagtattgtatggtgtaggttttctgcttccaaaatatttatttctgcattagccatggaaggacagctacttttagtagcatatccttgcgctttgttatatggagtctttgccctgatttccgtcttttgaaaatttatctgggatgtggacatcagtgggccagatgtacaaaaaggaccgttgaactcttaaattggaccagcaaactgctgcagcgcaactctcatgcagatttacatttgactgttggagcaatgaaagtaaacgtgtatctcttgttcatttttatagaacttttgcatactatattggatttacctgcggtgtgactagctttaaatgtttgtgtttatacagataagaaatgctatttctttctggttcctgcagccattgaaaaacctttttccttgcaaattataatgtttttgatagatttttatcaactgtgggaaaccaaacacaaagctgataacctttcttaaaaacgacccagtcacagtaaagaagacacaagacggccgggcgtgctagctcannnnnnnnnnnnnnnnnnnnnnnnnnnnnnnnnnnnnnnnnnnnnaagggcagagatcgagaccatcctggtaacacgtgaccccac

SEQ ID NO: 62996 - DNA, 1250 bp, Homo Sapiens
  misc_feature (724)..(882): n is a, c, g, or t
  misc_feature (927)..(961): n is a, c, g, or t
gctgggactgaagtccctatgacctttccactagacgctagcattctggaggacagttgggacttgttttctctcccaggtttcttttttcttaaactcctggcctcaagtgatcgtcttacctcagcctctcaaagtgtcgggattacaggttcttcctgcaatacagtggatacaatttgtcatggctactctgagataagaccacttttttatctagagcttctgtgacctgctcctgggactttgctggctcacggagacacttctctatggagcttcagtagcaaataaggacatcatctgctataacctacaagcagttggacagatattctacatttcctcatttctctacaccgtcaattacatctggtatttgtacacagagctgaggatgaaacacacccagagtggacagagcacatttccactggtgatagattatacttgtcgagtttgtcaaatggcctttgttttctcaagcctgatacctctgctattgatgacacctgtattctgtctgggaaatactagtgaatgtttccaaaacttcagtcagagccacaagtgtatcttgatgcactcaccaccatcagccatggctgaacttccaccttctgccaacacatctgtctgtagcacactttatttttatggtatcgccattttcctgggcagctttgtactcagcctccttaccattatggcggtgtctcggtcnnnnnnnnnnnnnnnnnnnnnnnnnnnnnnnnnnnnnnnnnnnnnnnnnnnnnnnnnnnnnnnnnnnnnnnnnnnnnnnnnnnnnnnnnnnnnnnnnnnnnnnnnnnnnnnnnnnnnnnnnnnnnnnnnnnnnnnnnnnnnnnnnnnnnnnnnnnnnnncaccgtgctggtcaggctgtcttgaactcctgacctcgtgatctnnnnnnnnnnnnnnnnnnnnnnnnnnnnnnnnnnngcgtgagccaccgcaccgggtgcaaagtgactttctaaaacttctgttgcttagagttgagaatttaagctcagccatggtgctgaagtgttaagcatagaacactttctaaacaaaatctctaataaagtgtcccaagaggaactagttagagcttactattcaacttcctgggtaaactgtgattagcctcagtggggggaaatgcccagaggttgactgtaaggttcatgtgtcaaaccgtgatacacaaagttacggctagttacctgtccatttccctagccta

SEQ ID NO: 62997 - DNA, 914 bp, Homo Sapiens
  misc_feature (559)..(567): n is a, c, g, or t
gggtgttttcacctgggtcctctaactcacgaccaccatctccaatggatccatatgcaaaaatgcggcagaagttacgtgaaatcattctccagcagcaacagcagaagaagattgcaggtcgacaggagaaggggtcacaggactcacccgcagtgcctcatccagggcctcttcaacactggcaaccagagaatgttaaccaggctttcaccagacccccacctccctatcctgggaacattaggtctcctgttgcccctcctttaggacctagatatgctgttttcccaaaagatcagcgtggaccctatcctcctgatgttgctagtatgggggatgagacctcatggatttagatttggatttccaggaggtagtcatggtaccatgccgagtcaagagcgcttccttgtgcctcctcagcaaatacagggatctggagtttcctccacggctaagaagatcagtatcctgtaagatatgccctaagccttttaaaataaacctccacaaaatggaataaatcccaggttgggaactttccccttcagacaannnnnnnnncacccccccagaagccctttgcccacaattttcaggccaggcaccaaccattaacttgggggccccaaggcaataataatttgggaaccttgaagaaaaattaacggggcctcccctggaaccgggaaaaggggcaaacccggcctgggcccttttttaaagggggctttcccccccctggtacaaaccgtcttgtttataaagggtcatcctttcctcataattccggggaaacaacagtgggaaaaaactttgacttttcccccccggggtccgaaaacctttttttcccggggggcccccctactggaataacttcccgagaatccccccatatggcggaaacc

SEQ ID NO: 62998 - DNA, 2080 bp, Homo Sapiens
  misc_feature (1089)..(1115): n is a, c, g, or t
  misc_feature (1660)..(1660): n is a, c, g, or t
  misc_feature (1686)..(1686): n is a, c, g, or t
  misc_feature (1716)..(1736): n is a, c, g, or t
  misc_feature (1775)..(1775): n is a, c, g, or t
  misc_feature (1834)..(1880): n is a, c, g, or t
gacccacgcctgagccccgtgcgactcgtggctttgggctagaagccatggacgccttcacccgcttcaccaaccagacccaggccgggaccgactcttcagagccactcagtacacatgcatgttgcttagatatttgttagagcccaaagctggcaaagagaaggtggtaatgaagctcaagaaactggagtccagtgtgagcactggtcgtaaatggttcagactaggcaatgtggtacatgctatacaggcaactgagcagagcattcatgccactgacctggtacctcgcttatgcttaacattagccaacctgaaccgtgtgatttatttcatctgtgacaccatcctctgggtgaggagcgtaggtctcacctctggcatcaacaaagagaaatggcgaacgagggctgctcaccactactactattctcttctgctgagccttgtcggggatctgtatgaaatctccctgcagatgaaacgagttacatgtgatagggcagagaaagacgaaatcagcatcccaggatcctctttggttcagcgtggctgaggaggaaacagaatggctccaatcctttctacttcttttattccgatctctgaagcagcatcctcccttgctcctggacacagtgaagaacctttgtgatatcctgaaccctttggaccagctggggatctataaatccaatcctggcatcattggacttggaggtcttgtgtcctctatagcaggcatgatcactgtggcatatcctcagatgaagctgaagacccgttagggtgtttttaggcttggaactagtacctactttaaaagatggcctcttggtgggacagacatttgtataagtcacaggccatgtcatactgtgcttaagttcttgttcatgtgagcatttaacaacctgtgatgtgggcagagatgaggccaagaacggagaagggaggagcatgaagagttgtatgtttttggagtgctggagtgacttgtgaatttctgaatattttcccttcatctaacattgattgaacatctcttatgtgcatagtgggagcttagtatttgctgaatgaatnnnnnnnnnnnnnnnnnnnnnnnnnnngaatgaatggccctcccaacaacaactcccgccccaccctctcccccgaccgcccctcggcacgcacgtcctcgcacccaactagacccctctccaccccgcccgcccctccaacacaccccatcccgcctgcgcctgtgaaaatactctttctactcggataagggagtgcacgatgccgggcggcgccccggcccctagcccacaccacgcaaccctcctccgccctctcacctcaccaattacggtggggtagagggctggggcggggtggaagggtgtgttttgtgctcgtcgcacagacctactcggtcgtccgcgccaacacacacccctgcccacgacatgcactctgtgtctggacgcctgtcttcccgcccccactccctgtcctgctccatgatatccttcctcgtccatcctcccgctctagcctcctccgtctcaccctccctcgttcttttctttcacgtcgctcgctcactcaaagcgaaacatataaagagatatatagcaccacacctgtgagcaaaccaaccccacangcgtcatcaacggcccaactggcttngtgtatgtgatattatcgtgaagcactctnnnnnnnnnnnnnnnnnnnnntttctctcctggctccagtcgcttatcaccaccaatctngctacgccgcaccaccgcccacgtgcgccaccctccctctcgctccctccgaccggccnnnnnnnnnnnnnnnnnnnnnnnnnnnnnnnnnnnnnnnnnnnnnnnatacacagatggtcttgcatcgctggagtctaatgtacttttagaaaaaataaaaccgttgagacaggtgaactagtagaaattagatactgcgctgggagcagaaaaataaaaccaaagagacgacccattccgcgagcgcacgcaccccacacaactgagcgcctcttctcccccgctatgggcgacacgagtctgct

SEQ ID NO: 62999 - DNA, 822 bp, Homo Sapiens
  misc_feature (752)..(753): n is a, c, g, or t
  misc_feature (772)..(773): n is a, c, g, or t
gggggagtccagaatgagaagaaggaaagcgggtccggttccttcaggacccgcttcagggggcaccgcggcggcttggggaccatttggagccccgtcctggggagaaaacagctcacgtctatggccctgactgcttaggcgggagctgcgtgcagctcagcttctccggggcatttttttctacacgctgggtgagctatgaacaggccaactgcaagggcgagcagtttgtgtttgagaagggcgagtacgcccactgggactggtggaccagcagccagaggacagactcagcagcctgaggcccatcaaagtggacagccaagagcacaagatcatcctctatgaaaaccccaacttcaccgggaagaagatggaaatcatagatgacgatgtacccagcttccacgcccatggctaccaggagaaggtgtcatctgtgtgggtgcggagtggcacgtgggttggctactagtaccctggctaccgtgggctgcagtacctgctggagaagggagactacaaggacagcagcgactttggggcccgtcaccctcaggtacagtccgtgcgctgcatccacgacatgcaggggcaccaatgtggtgcctttccacccctcccactagtgcccacccccaccatgccctccttccccaggacccagggtccggctgcccaaggaacccctccagaacctcccaggagaatgaaataaagcggtgactttccaaacttaaaaacccccnnaacccccccacatccacannaacccttggtccgggccgcccttcggcccctccgaagaagctttttcta

SEQ ID NO: 63000 - DNA, 1222 bp, Homo Sapiens
  misc_feature (371)..(508): n is a, c, g, or t
  misc_feature (527)..(539): n is a, c, g, or t
  misc_feature (577)..(577): n is a, c, g, or t
  misc_feature (583)..(607): n is a, c, g, or t
  misc_feature (856)..(866): n is a, c, g, or t
  misc_feature (1112)..(1112): n is a, c, g, or t
agtgcctaaaagtacagtttacatccttttggaaagtatgtgtaagtgcatgttttttgtgcaccttcttctatagcacttttttacaaatatcttatttttatttaacgacttgggttcatgtccctaatataagtatcttgacaattatgagctttatacctagcaagccacttcaggaaattcttttggagaatattttctgattattgttaaacttaatatacaattagctttattccttataaaatgtctaaaagaataatacgaagtatatataaaaggaattactgtaaactacattgccatagcaatttacataaaagtatattgttttttatctttaactcaaataaagcgtgtaataaatnnnnnnnnnnnnnnnnnnnnnnnnnnnnnnnnnnnnnnnnnnnnnnnnnnnnnnnnnnnnnnnnnnnnnnnnnnnnnnnnnnnnnnnnnnnnnnnnnnnnnnnnnnnnnnnnnnnnnnnnnnnnnnnnnnnnnnnnnncaccctcaaaaacaccaannnnnnnnnnnnnaacacccctacaaaaaaccaacgggaacaaacaaatgnacccannnnnnnnnnnnnnnnnnnnnnnnnggattcccctccctcttcttaagaccgccgccggcggcccccccgagaagtccttacacccctcctctcacaaggggcgcccaaacagcccgccctgccccaccatacctcgcgcgggcccccccaaacgacacccataaatgtgcggggcggcgggcccccgcgccgccacgccatacccacccccataccatacagtgaacgctgctcttcccccccacaatcttctttaggtctcccaacccgcgnnnnnnnnnnngccggaagccgacctggtcgactaacgccaaacatccctaaccccccgccgccgccctcatacacaaaacattcctgggaaaagacatcggggccgcgagcacacaaatttattcctcacccgccgccgcccaagatgcatcgaccatcatacacaccacgaggtgtgtgcgctttggccccgcgtctccaaaccgtgcgccccttgtcgcaaccccctccgctcctggtgggtgggccccccctnatccacgaacccacccgatcccaccatacctcccctaaatgcacaccgtctcgccgtgcccccttgttttccgcgaaccaccccggcgccgcgaatttcgacgacggtgg

SEQ ID NO: 63001 - DNA, 550 bp, Homo Sapiens
taaaaatgacctgtcctgtgtgctaagagctatgcagcttagctgaggcgcctagattactagatgtgctgtatcacggggaatgaggtgggggtgcttattttttaatgaactaatcagagcctcttgagaaattgttactcattgaactggagcatcaagacatctcatggaagtggatacggagtgatttggtgtccatgcttttcactctgaggacatttaatcggagaacctcctggggaattttgtgggagacacttgggaacaaaacagacaccctgggaatgcagttgcaagcacagatgctgccaccagtgtctctgaccaccctggtgtgactgctgactgccagcgtggtacctcccatgctgcaggcctccatctaaatgagacaacaaagcacaatgttcactgtttacaaccaagacaactgcgtgggtccaaacactcctcttcctccaggtcatttgttttgcatttttaatgtctttattttttgtaatgaaaaagcacactaagctgcccctggaatcgggtgcagctggat

SEQ ID NO: 63002 - DNA, 233 bp, Homo Sapiens
  misc_feature (49)..(57): n is a, c, g, or t
ctttaatgaaaagcattataatgatgtagcagcatcagatataaacttnnnnnnnnnggtttcaattaacattttatatatggataatgctttgtaaagtgtaagagaaaggttgcagttggatcagtataaaacaatgaccaagccaaaatcagcaccctagggccttaagtaaaatagagataccccacaaaatgaaatattttgaaggatgggaggggacagatattacc

SEQ ID NO: 63003 - DNA, 357 bp, Homo Sapiens
ctccctgcccccatccattaaaggagaacgaaaaaactgattttactgttttccaagaagaaggcataacacattttatattaccagtgcttaatattttcatgaactacagggagcgttcagcctgccgcgagaaggatttggttctctggtgactggccatccacccagctctatctgcaatctctcttggtatgctgctgagttggtgggacctgggctattacaagggaggtcactgcacccccaggcagttcccagcaagtgttttttcccatttcactgacattctttccgggctcaactcaatttgttttcaacttctctatggcaattgatgactgactgtgtaattca

SEQ ID NO: 63004 - DNA, 614 bp, Homo Sapiens
  misc_feature (40)..(40): n is a, c, g, or t
taaaaaggtcattttagtcaaagacacagtgctagaggtntaaagggtgtaatgtgttggtcacatcacaaccagtaagaaacgcttggtaggttatccacatcttttgctgactgtttccatgtacaattctggtcaccgtattttccaaagctaaaatctgaggcgtgggctgatggtttttgaaatcaggattaccccaggaagaaccaggtcctattactaattttcctgattctgaggctctgaaggcttgtctgagacacattccggagacctttgtaccagaacttggatgcatagtccaccttactactgatacacgcctgagcaccctttagggcgaggcgccgcctcctgcctgctgtcctgtccctcagcatcagaagagttgaattcagcaggagacgggagcccggtgtccatgagggaagaggggtcgcgcttggtttctactgacccccatgaagatttcagacttgcagtgcggccacctggccctgccctgcctctctctttctcatacagctttaaaactttactacttttatttaaaaatgaactggatgggagagaagtagcgtcccctaccctacaagccacgacgtgttcgt

SEQ ID NO: 63005 - DNA, 264 bp, Homo Sapiens
atagtctactgacggccaataccactaaaggaatctatgctggagtctgtatttctgtcttggtgcttcttgctcttttgggtgtcatcattgccaaaatgtttcatttagcagccttcaaattaaagctttgcaaaatgcagttgaaaaggaagtccaagcagaagacaatatctacattgagaatagtctttatgccacggactaagacccagtggtgctctttgagagtttacgcccatgagtgcagaagactgaacagac

SEQ ID NO: 63006 - DNA, 868 bp, Homo Sapiens
cggattggcgaccatttcaacaaggttgtccaggcaggtttgaagacgtttaggagccaggaagtaggagtagtccacgtccaccatcctgtcttttgtgatcccaatcttgaccccaaacagtacaaaatgtgcttggggtccaaagcatcgacctatgggtccacacagcggctggctgagatgtggctggaaaaaaatgatccaagttacagtaaaagcagcaataataatggctcagtgaggacagcctaatgtccagctttgctggaaaagacgtttttaattatctaatttatttttcaaaaattttttgtatgatcagtttttgaagtccgtatacaaggatatattttacaagtggttttcttacataggactcctttaagattgagctttctgaacaagaaggtgatcagtgtttgcctttgaacacatcttcttgctgaacattatgtagcagacctgcttaactttgacttgaaatgtacctgatgaacaaaacttttttaaaaaaatgttttcttttgagaccctttgctccagtcctatggcagaaaacgtgaacattcctgcaaagtattattgtaacaaaacactgtaactctggtaaatgttctgttgtgattgttaacattccacagattctaccttttgcgttttgttttttctttcttacaattgttttaaagccatttcatggttccagttgtaagaaaaaggaaatgtggataatagctggtttcatcccttggccttcaggaaaagctttcccagaagtggatcatttccctcctcagggggactcctgctcaaccatggcccacctagggctttttggttggcttttgggttgggtccctttttt

SEQ ID NO: 63007 - DNA, 953 bp, Homo Sapiens
  misc_feature (80)..(80): n is a, c, g, or t
  misc_feature (91)..(91): n is a, c, g, or t
  misc_feature (126)..(126): n is a, c, g, or t
  misc_feature (137)..(137): n is a, c, g, or t
  misc_feature (154)..(154): n is a, c, g, or t
  misc_feature (158)..(159): n is a, c, g, or t
  misc_feature (170)..(170): n is a, c, g, or t
  misc_feature (175)..(175): n is a, c, g, or t
  misc_feature (189)..(189): n is a, c, g, or t
  misc_feature (204)..(204): n is a, c, g, or t
  misc_feature (560)..(560): n is a, c, g, or t
  misc_feature (629)..(629): n is a, c, g, or t
aaagaggcagaagagtggtggtagtagccaatttgtttatgtggcccaacaagaacaagattggtacttcagaagaaagngagattatggnttctggctgattatttgtaatgctggtgcgatcgncattatttgantaacaaaggatttgtgntttnntcatctgtggnaaggnaaaaactggttggnaagactttcttgtgnaaaaacttaagggatactttagtcattggaaaagtgaaaagaaaacctagtgtgccagattctgcatctcctgctgatgatagttttgttgacccagggggacgtctctatgacctcaacatgcccgcttatgtgaaatttaactacatggctgagagagaggatgaattatcattgataaaggggacaaaggtgatcgtcatggagaaatgcagtgatgggtggtggcgtggtagctacaatggacaagttggatggttcccttccaactatgtaactgaagaaggtgacagtcctttgggtgaccactgtgggttctctgtcagagaaattagcagcagtcgtcaataacctanatactgggcaagtgttgcatgtggtacaggctctttacccattcagctcatctaatgatgaagaacttnatttcgagaaaggagatgtaatgggatgtattgaaaaacctgaaaatgacccaaagtggtgaaaatgcaggaagatccatggtatgggtgggctagtaccaaaaaactatggtacccggtatgcgaaataaccctttaccttcaggtttggaaccattcacctccccaggggggattccattaagccctccccccctggaaaagtttgccggcaatccctggggtttattgggaaaagtccccccgggtttcaggcggaaatggggtttttattgtaaaaaaggccttttaaggggggatttcccccccttccggggaaagggg

SEQ ID NO: 63008 - DNA, 752 bp, Homo Sapiens
  misc_feature (430)..(430): n is a, c, g, or t
acgtgtatgtgtgtgtgtggttataacaaactggtacttttacatttgagtaaccatcaacacgattagtttacagaactgaaaaggaatctgagatctgtactgtatcaggattacaaaggatttagcctcaagtagttccctttttgtattaataaccacacgctttctgcaaccctatcccttgcatccacttgactatgaagttttttgtaaagcacagataaattgaataatcagggcaatagcattaagcacatctgcgaattatccctgaagttcaaaagacttatatatgtataagtggtatgtggatataatcgtgtgtttcatatgcataatggaatttaacgtaattgtcgaataacgaagtaggtatcctagtttcagcagggcgaacattatccggccccatccacaatgtttgtgnttgccctgtaaacagtttgcgagggggcacccccagagctaacgggttatcccttttcaaaggggataacttcggaattccccgaatttttcctgcccaaaaacccactccctggagcccctgaggacaaatcctaggggttggcccccacatgggggcctgcccatgtgctggtgccaggccatggggggcgccctggctatggcccaagtacacagatacttctgagtctcctcactggccgacgctatcgccatgccgtttgcggcgctcattcgcgagaagccgcgcgagctctcctgcgttttcggcgcaccggctg

SEQ ID NO: 63009 - DNA, 552 bp, Homo Sapiens
  misc_feature (475)..(475): n is a, c, g, or t
ttgggcaacgcaccgtcatgtgaataagaagccaggaaaggaaagatggggaagcccagatcaccaggcttctattaaggaggaaagcaacagaggaaacagtgaaggggaacagaagggggtagcaaagtgttacagaaaagcggactggatagacaaaactgcagaaggtgtatgttggggagaactgaaagggaaaacaaaatacttgacatagtcttaagtagaagaaggcagttagagaaaacaaagtatctactggccttgtctacatacagacttcaaaataccccttatgagaatccaaagaatgatgtgtgtaagggaagattttatttgcccttccggaagaaatcagtatctatgcaaatcttgaaagacgaaatcaaagcccattaatgattcagaatcagtgcttgacctcctgtattctgaatggtgaactctggaagcagggattgtgtctggctctttntagagctggaagtgtagtggctttcattaaatacttgctgtaaagtctttctaagaccaattattatcttagcatgt

SEQ ID NO: 63010 - DNA, 546 bp, Homo Sapiens
  misc_feature (47)..(47): n is a, c, g, or t
cagtgtcctcactgtgagtgaattcacagatgagggagttggggtgnggaatgagagcaagaacatgggggccagctggggacagttgagaacaatgatgcaactttctcctctcttcctttgtggtagcagaccttttatgctttcttgaaagcacttattttatcttttcattacttaggaaataacactatatccagacaagcatgggtgtgtccgggacctgttagaagaatgtaaaaaggccgtggagcttggggagaaagcatcagggaaacttaggcaagtatttcttgagcccaattgtggacgttcagttaggggtggcagttaacgctgacctctgcagttgcgttggtggaaatcacccagctgggatccatgcgcgtcattcccagactcagtggggtgtgcctccattgcaaagacagttgcacagaagctcaacacagacccattgttgctccagtttttcaagtctcaggggtaaccctcaagccgctgtggtgcagagggttatgcgtgtttcacaattaagccgcgaca

SEQ ID NO: 63011 - DNA, 892 bp, Homo Sapiens
cccgaccgtcctggacccccgaccgtccgacacctacaagatcctcactggtggggcggataaaaatgtcgttgtgtttgacaaaagttctgaacaaatcctggctaccctcaaaggccataccaagaaggtcaccagcgtggtgtttcacccttcccaggacctggtgttttctgcttcccccgatgccactatcaggatttggtcggtccccaatgcctcttgtgtacaggtggttcgggcccatgagagtgctgtgacaggcctcagccttcatgccactggcgactatctcctgagctcctccgatgatcagtactgggctttctctgacatccagacagggcgtgtgctcaccaaggtgacagatgagacctccggctgctctctcacctgtgcacagttccaccctgacggactcatctttggaacaggaaccatggactctcagatcaagatctgggacttgaaggaacgtactaatgtggccaacttccctggccactcgggccccatcactagcatcgccttctctgagaatggttactacctggctacagcggctgatgactcctctgtcaagctctgggatctgcgcaagcttaagaactttaagactttgcagctggataacaactttgaggtaaagtcactgatctttgaccagagtggtacctacctggctcttgggggcacggatgtccagatctacatctgcaaacaatggacggagattcttcactttacagagcatagcggcctgaccacaggggtggccttcgggcatcacgccaagttcatcgcttcaacaggcatggacagaagcctcaagttctacagcctgtaggacctggcccttctgatggaagctggcctcatctcataagacggt

SEQ ID NO: 63012 - DNA, 1262 bp, Homo Sapiens
  misc_feature (23)..(23): n is a, c, g, or t
  misc_feature (29)..(29): n is a, c, g, or t
  misc_feature (242)..(242): n is a, c, g, or t
  misc_feature (339)..(339): n is a, c, g, or t
aaaccaattcctcatctatccgnactaanggtttctcttgcagttcacagagaattggggctctcttcatgcctggaaatttggggtccatagtgaatattttgttatttatttgttggctcattcttcatatagtaatggaaaccataagtctaggagtttagaaaatgaattttttagaccttagtaaaacccattttaacccataaaatggaccaactgagaattctccccagctgccntgaaagcgtcggccaactgtggttatcctgcaagctgctacctgcaacttggacgttgttttccacggtgctctgctggctacggattcttgcattnctgggtttggctttttctctgtgtcatcaactatggttatcctctaaataggcatttaatgaaacattgtacaaattgtcactcatttgatgacacctgggaataacattagcaggctgatgtcctgcaccattatgtttactaatcacatgttctgtgtgctgtgacgactgtcaaagagtatctggccatggcggacactcagcatttgttgattgaataaatgttagctcttctcattgtgaaggactcacttttactgggataaacaaatgccgttaagaattctggcacccttgtaaggaagaaaagagagttcaacaccttcgagtctgagcgcttgtggctagagtttgccaggagggaggaaaccagtgaccctgaaaactgagggtgcctcaggagcagtgggaccacctgatgctgaaggacggactaatgatgtttcctcttgccttctctggtgcctccattgccctcatggaacagagcatatcatagagggagaaaagtcaaacttgtaattgtgtcttacagttactggcttcatcttccttgggatatatggtcatcctctaatgagtgtaaaagtgcgcaaaacacatccttattgttcctgatctcttagtcccataaatgggaacaaatacagctttctgcttctttctttttggggaaaggacagggtgctagtgagtactgacagcatgccagctaccgaagtcacccagccattcccatgagcagcagttcatttaattgtcacagcgtcgccaggaagaagatctgataaacctaggtttacagatgaagaaagcaaaatgtagagatgttgttgaggtcacagaggtgactgcctaacttcagatcagggcttctgatccctttaagaaattacagggccagccgggcatggtggctca

SEQ ID NO: 63013 - DNA, 1124 bp, Homo Sapiens
aattcatcattttttgtttttccaaattttagacattctttttctcctttcacctaaaaagcagcctttctatctgctggttgactcagggattgattttgtatttctggccgttggtgaacagatccctgcatttctgtcatgatgtggttgctcctgcccagcagtcagcaaactggtccatacgctgaatatgggcgagaattttgtgggtcacacttgccacacttcacgtgtccacacttttcagagtatgtgctgttctgttttccagatgagcagaactacattctccgagatgctgaggcagaagtacttttctctttcagcttggaagaatccttaaaacgggcacacgtttctccactctttaaggcaaaatatttttacatcacacctggaatctgcccaagtctttccactatgaaggcaatcgtagagtgtgcaggaggaaaggtgttatccaagcagccatctttccggaagctcgtggagcacaagcagaactcgagtttgtcggaaataattttaatatcctgtgaaaatgaccttcatttatgccgagaatattttgccagaggcatagatgttcacaatgcagagttcgttctgactggagtgctcactcaaacgctggactatgaatcatataagtttaactgatggcgtctaggctgccgtgcatgtcgactcctgcggtgcggggctggctgtctggctggcgaggagctgctgcgcttccttcacatgctcttgttttccagctgctttcctgggggatcagactgtgaagcaggaagacagatataataaatatactgcatctttttaagatgtgcaattttattctgaggaaacataaattatgttttgtattatatgactttaagagcccacattaggttttatgattcatttgccaggtttttaaatgttttcacaaaactgttacgggacttcaactagaaataaaatggtgtaaataaagaccttgctatctctaaattatggatgttaaagatttgaaatgttttgtactttgattatttttatttcttatactctgttttcttttatattgatatcttgcccacattttaaataaatgtacttttgaacttaaa

SEQ ID NO: 63014 - DNA, 844 bp, Homo Sapiens
  misc_feature (236)..(246): n is a, c, g, or t
tcctgccaaagctggctggctccctagtcacccaggcccccatcagtgccagggctggtccagtttactcgcacacgctgaccttcaagttgcagctggctgtcttacagggcctgggccccctctgtgagagactggacctaggtgagggtgacctgaataaagtggctgatgcctgcttgatttacctcagtgtcaaacagcccgtgaaattacaagagtgaaactttatctcnnnnnnnnnnngagagagaaacacaactgccttagtgactcactgttagtaatgagtgtacattgccttgctcaggggtgatgggctaggaaaccctgatccacagattatctcaaatctcagcgcctgtgttgtgtggagtttgtttagtcttcccaagacagctcttagcattcatctgttgttccattcagcaagcacttacctttttacctgcacggctttaatgtaggtgcctggctgatacattcaacatactgctgtatatccttcaagaccttcctttttgtagaggatttgtagcagctgtatacataccataattattaagaacatcagtgttggaagtcagacctacatatctgagtcagtccaaatcctgtttctgcctcttattagccatgtgaccttgagtaagttaattcatcatgttgagccttagcatcttcatcagtaaaatgaagatgatggtacctacctcacagggttgttgattataaatataaaagagcatgaaataagacacatacactcattcatgtgctacatgcttattgaggactagtgcaggtcaggcagaggatgtgtagaggggatgatgcaggacat

SEQ ID NO: 63015 - DNA, 532 bp, Homo Sapiens
aatatcccagctagagatatggcctttaactgacctaaagaggtgtgttgtgatttaattttttcccgttcctttttcttcagtaaacccaacaatagtctaaccttaaaaattgagttgatgtccttataggtcactacccctaaataaacctgaagcaggtgttttctcttggacatactaaaaaatacctaaaaggaagcttagatgggctgtgacacataaaaattcaattactgtcatctaatgccagctgttaaaagtgtggccactgagcatttgatttttataggaaaaaatagtatttttgagaataacatagctgtgctattgcacatctgttggaggacatcccagatttgcttatactcagtgcctgtgatattgagtttaaggatttgaggcaggggtaattattaaacatattgcttctattcttggaaaaatagaagtgtaaaatgttaataatacaaatgtcactgtgacctcctccactgagaggactggtttatgccagatcattttccgtact

SEQ ID NO: 63016 - DNA, 674 bp, Homo Sapiens
  misc_feature (208)..(221): n is a, c, g, or t
cggcctcagcgtgactccccactcacctggctctctctctgtcctgcctcccattatctaacacattttttacatgtacattttaatttgattcagctggtctgaatctctgaatttatatcatccaaaacttccatatggtcagtagtagatgttctctaatcctccctctccttaccacgggtcagacctaaagaatgtgaacacnnnnnnnnnnnnnnctggggatgctaagcaaacccttcttacagatacgtttaatgtaataagaacaagggaacatgtaaactaacataaccaattgtcagttctccatgtattcctcaaaagaatgtcagagtaaatgtattagaaatacagtatccagactgctagtccttgccagagacattcttacctctgccctgtgataatattttatgcttgacagtgaaaacaagtgtggccccttgcaccggttagctagaagtacagccagatttcaagctagtgcagtcacctcttccgtcattcttcacaaatcttgtcaacctggatcttagacttcatctgaatcgagttctttgccctcctttgtgcctgcagctcatatggaggtctttgccaccaatgggagatgagcccaaactttcgatctaggtgggtgatgtgtagcagttcaggggaagggtgct

SEQ ID NO: 63017 - DNA, 699 bp, Homo Sapiens
tcctgctatcttatgtaggaaaagatcgtcggcatagatttacactgaggagagaatggctccacaaagggcagaaatctatcttcaaggagcactgaaaaactacctggctgatggctggggactctccatcacacacacaaggaaagcagctggccgaatgtcaagagcaccttggacaaattgaaaactacctgcagaccagcagcctcttagccagtgaccaccacctcactgaagaggagcgcaagcacttctgccaggagatacttgactttgccagccagccgtcagacagctcaggtcataagatagtgctacccatgcattcctttgcacaactgcgagatctccattttgatccctccaatgccgtggtccacgtgggcggcgttttgtgcgttgagataaccatgtacagccagatgcctgtgcctgttcacgtggagcagattgtggtcaatgtccacttcagcatggagaaaaacagctaccggaagactgcggagtggcttaccaagcacaagacgtccaatgggatcattaactttccacccgagaccgcacctttccctgtatcccaaaacagtttggccgcgctggagttgtatgaaatgtttgagagaagcccatctgataactccttgaacacgactgggattatctgcagaaacgtccacatgctcctgagaaggcagt

SEQ ID NO: 63018 - DNA, 975 bp, Homo Sapiens
  misc_feature (475)..(485): n is a, c, g, or t
tctatacatgtattcttataagacgacccaggatctactatattggaatagatgaagcaggtagcttcttttttctcaaatggtaattcagcaaaataatacagtactgccaccagattttttattacatcatttgaaaattagcagtatgcttaatgaaaatttgttcaggtataaatgagcagttaagatataaacaatttatgcatgctgtgacttagtctatggatttattccaaaattgcttagtcaccatgcagtgtctgtatttttatatatgtgttcatatatacataatgattataatacataataagaatgaggtggtattacattattcctaataatagggataatgctgtttattgtcaagaaaaagtaaaatcgttctcttcaattaatggcccttttattttgggaccaggcttttattttccctgatattatttctatttaatactcttttctctcaagnnnnnnnnnnngtttgttttttctttattgtccttcatagcaggccaagtattgcctctctgcaatagacagctactgtcaatacatgctgtaatttgacattctgggtcacagatataaggtatttaaaatctatttatgctttatagagaaaccagacattaaaacttcatgcactacttatttcgaattactgtaccttatccaaatttacacctagctattaggatcttccacccaggtaacaggaataattctgtggtttcatttttctgtaaacaactgaaagaataattagatcatattctagtatgttctggaatatcttttagactgatcttaaaaactaactttctaaaagatctctcagaaagtctgacgtgaatagaaagatgttgttcgcgttatctcatttgttggaaatttgccctgataaagggggccccgcccctggggggtttttgccaaatgggggagagggggtatttttgtggtgtagag

SEQ ID NO: 63019 - DNA, 1487 bp, Homo Sapiens
  misc_feature (1379)..(1379): n is a, c, g, or t
  misc_feature (1382)..(1382): n is a, c, g, or t
  misc_feature (1420)..(1428): n is a, c, g, or t
catgggagaagaagaaatcgcttttaaaatgagtcgtaccaacgtgtctcatgtggttggccagttggatgacataagaaaaaaccctaggaagtttgtttgcctgaatgacaacattgaccacaatcataaagatgctcagacagtgaaggctgttctcagggacttctatgaatccatgttccccataccttcccaatttgaactgccaagagagtatcgaaaccgtttccttcatatgcatgagctgcaggaatggagggcttatcgagacaaattgaagttttggacccattgtgtactagcaacattgattatgtttactatattctcattttttgctgagcagttaattgcacttaagcggaagatatttcccagaaggaggatacacaaagaagctagtcccaatcgaatcagagtatagaagatcttcatttgaaaccatctacctcagcatttactgagcattttaaaactcagcttcacagagatgtctttgtgatgtgatgcttagcagtatggcccgaagaaggaaaatatccagtaccatgctgttttgtggcatgattatagcccactgaccaggaattatttaaccaacccactgaaaacttgtgtgttgagcagctctgaactgattttacttttaaagaatttgctcatggacctgtcatcctttttataaaaaggctcactgacaagagacagctgttcatttcccacagcaatcattgcagactaactttattaggagaagcctatgccagctgggagtgattgctaagaggctccagtctttgcattccaaagccttttagctaaagttttgcactttttattaaacatttcccatttttgaaagtagttactaagttaactagttattcttgcttctgagtataaggaattgggatgtctaaacctatttttatagcatgttatttaaataatgcagcaatatcacctcttattgacaatagctaaattatgagttttattaatatttaagactgtaaatggtcttaaaccactaactactgaagagctcaatgattgacatctgaaatgctttgtaattattgacttcagcccctaagaatgctatgatttcacgtgcaggtctaatttcaaagggctagagttagtactacttaccagatgtaattatgttttggaaatgtacatattcaaacagaagtgcctcattttagaaatgagtagtgctgatggcactggcacattacagtggtgtcttgtttaatactcattggtatattccagtagctatctctctcagttggtttttgatagaacagagaggccagcaaacttttctttgtaaaaagctggttagtaaattattgcaggccacctgntgnctttgccatacattcttcttggctggtgtttaatttgnnnnnnnnncaaacaaccctctaaaaatgtaaaaaccatggttaagcttggcagctgtacaaaaaacc

SEQ ID NO: 63020 - DNA, 145 bp, Homo Sapiens
gctttttgtagaagagattgagaatggtactctaatcaaaaataaagttttgtagtgggaccagaaattgcttacctgacatccacccccattccccgtcatctgctggggttgaagttccagcatgcttcgagccaatgttggt

SEQ ID NO: 63021 - DNA, 1121 bp, Homo Sapiens
  misc_feature (375)..(377): n is a, c, g, or t
  misc_feature (379)..(398): n is a, c, g, or t
  misc_feature (401)..(431): n is a, c, g, or t
  misc_feature (434)..(464): n is a, c, g, or t
  misc_feature (471)..(472): n is a, c, g, or t
  misc_feature (496)..(496): n is a, c, g, or t
  misc_feature (508)..(508): n is a, c, g, or t
  misc_feature (774)..(782): n is a, c, g, or t
  misc_feature (974)..(974): n is a, c, g, or t
  misc_feature (1013)..(1013): n is a, c, g, or t
  misc_feature (1030)..(1030): n is a, c, g, or t
ggattgtaatgtctatttttttagacttaaagatttatagaagactatagttatctgatttgttattttgcatttttcattctgtaaatctttgcttatggcacattgtgctctctgttttccatggttttattcatttatctcctcctattttgaggggacaacatgggtagttaaatctttgtcaatagtattggagataacactaactgctattatcataacatcttcatttttactgcatgccaaaaccaatgcctgccaaacaaaatcttagacatcccaatataatatgttagttatatttctattcacatcattattgaaaatacccagctcagtgcctggcttaataaatgtttaattcccttaaannnannnnnnnnnnnnnnnnnnnnaannnnnnnnnnnnnnnnnnnnnnnnnnnnnnnggnnnnnnnnnnnnnnnnnnnnnnnnnnnnnnnggggggnngcccccagcgcccaaagaaaagcnggcgaaacccanagggttgggcaagaaggaccccggcaaagggaaaagggccacgggggcacccccccgggacaacaaaagagcccgcggggagaaagagaaacggggccgtggaatccttccccacaaagaaaaaaacggccggggggaagaaaccgaaggggtgttgcgagagaaaacccccaaaagggggggttagagagagggtattttcgcccgcccccttctaaacacggggagacggccggaagcgggtcggacaaattcttattaaaagnnnnnnnnnaccacgaacgcgacgctgcggagaaaagaggggttgttattttataacccaacttccctccgcgggcgtgggaggagccccctcccacaagcacgtgtgggggaaaacaaacatatcgccccgcccgggggcgcaaacaaacgccacctggcggcccgcctgcggtcattttaatttttctcccccggggcnttgaaaaaaagcgcgggcgggagaacacaaacggccccngggtcggtggcgccccncaataaaaaacagttcaggggttgtaagaaacccgccctcgcgggggggaagggcgagcccactgtaactcatcgtctgttattcattagg

SEQ ID NO: 63022 - DNA, 842 bp, Homo Sapiens
aggagcctggagaggaagacacacagaatgatctgaaagttcatgaggaaaacaccacaattgaagagttagaggcgcttggagagtccttagggaaaggcgatgatcataaggacatggacatcatcaccaaattcctgaagtttcttcttggcgtttgggctaaagaattgaatgccagagaagattatgtgaaacgcagtgtgcagggtaaactgaacagtgcgacccagatacagaccgagtcctacctaagaccactttttagaaagctacggaaaaggaatcttcctgctgatattaaagaatcaataacggatattattaaattcatgttgcagagagaatacgtgaaggcaaatgatgcttatcttcagatggccattggaaatgcgccttggcccatcggtgtcactatggttggtatccatgcccagaactggcagagaaaagattttttccgagcatgttgcacatgttttaaatgacgaaactcagcgcgaaatatattccgggattgaagaggttaatgaccattttgccagaaaacactttcctacagaccccatccaaatggggggagtacaatgcactgggagatctgtgtatggggtgttaataacacataagaaaactcatggaacacaggttgcgggactccgggaaattaccccccgggaatggaggaaaagaaacaaaaactgggaatcttccaaagtcctcttgaggttcctacccgggatggtaaactccctggaattgggctatttaacgaaacctttgggttgggccctctccacttttccgaaattctgggacatgttcacaaaccttgaattttt

SEQ ID NO: 63023 - DNA, 1410 bp, Homo Sapiens
  misc_feature (566)..(778): n is a, c, g, or t
  misc_feature (811)..(857): n is a, c, g, or t
  misc_feature (901)..(917): n is a, c, g, or t
aataagatgtggccagttttgctccagtcagcccggtcaagcatgacagcaactcaaactcggcaaacttccaagacgtggaggacatgcctgacagatgtgccttggaagagtctgagagtccaggtgagccaaggcatcattcatggatagcaaaggtctgcccctgcaaggtgtcttaaatggaatctcatcagtaggagctgaatttggacaaattaagaaatccaaaagatgccatttgtttattactgtataaaagcattgttgttattggtcaagttattaggctgtagtggatttgctaatactttagccaacatgtattaaagtgattttaatacatgctgattacaatgcaatacatactgattgaaaatattcatattcatctaattttagaaaaatattgcctagatcattctctattcctgtttcttactttttctgttaatatttccaacagggaatgccagtccacagacacaaatttaatactgctttaaattttctcctatccttttagtccctgaattatataataaacaatgttaaaaccaaaaaannnnnnnnnnnnnnnnnnnnnnnnnnnnnnnnnnnnnnnnnnnnnnnnnnnnnnnnnnnnnnnnnnnnnnnnnnnnnnnnnnnnnnnnnnnnnnnnnnnnnnnnnnnnnnnnnnnnnnnnnnnnnnnnnnnnnnnnnnnnnnnnnnnnnnnnnnnnnnnnnnnnnnnnnnnnnnnnnnnnnnnnnnnnnnnnnnnnnnnnnnnnnnnnnnnnnccccgtcggggggggcgcggcgggccccccagnnnnnnnnnnnnnnnnnnnnnnnnnnnnnnnnnnnnnnnnnnnnnnncctgtttaccccaaacaacacccttcgtccggacccccccaccnnnnnnnnnnnnnnnnnccccccgccgcggtagacaccaaccacatccgctgtgtagtaaaaatcaccctccagccgagcggtgggaactcttcttgaagagcggtttttctctccggggggctattactaatgacgaaaaggtgttccgtcccaccgcgtgtggcgcgcccctcattaataaatcaaataatatcgcccgccccgcccccccggggcgggataacacctcatgccgagtaacagagggcgggtgtgtatttaaactctctatacatagatatctcccgcccgacacaaatgcgaaacacatttatttgtccaacaatgtgcgagggagcaaataaataatatgtcagcacccccgcgctggggacgagcgcctctccgatactttgtttgtcgcgccccctatacattcacaattaaaacacctgcgcaccccgcagcgagaaacaacaggggggggcaagcacaaaaaacacagcgttttacatgatgtggggcgccc

SEQ ID NO: 63024 - DNA, 699 bp, Homo Sapiens
ggggccccttcgccagtgtggggaacgcggcggagctgtgagccggcgactcgggtccctgaggtctggattctttctccgctactgagacacggcggacacacacaaacacagaaccacacagccagtcccaggagcccagtaatggagagccccaaaaagaagaaccagcagctgaaagtcgggatcctacacctgggcagcagacagaagaagatcaggatacagctgagatcccagtgcgcgacatggaaggtgatctgcaagagctgcatcagtcaaacaccggggataaatctggatttgggttccggcgtcaaggtgaagataatacctaaagaggaacactgtaaaatgccagaagcaggtgaagagcaaccacaagtttaaatgaagacaagctgaaacaacgcaagctggttttatattagatatttgacttaaactatctcaataaagttttggccgctttcccccggggcacgaatagcaaagcccaaatattacctcctgttcgggcccgcctccgcccccctgaagaaactttttccagaacccattcccttttcgggcgcgcccgggtcccccatccaagggcaaagtggaaaacatggggcaattaagcctgggttttcccctacggagaaaacccccggggctcaatggaactcaaggggcccttgggaattcccccaaccc

SEQ ID NO: 63025 - DNA, 1729 bp, Homo Sapiens
gcagtactatacggtccctcaggtcgcgaggcctgggtggcgaattcggcacgagggcgcagtgaagcagtgggaaccggaatatccaaagagtggtttgaaggagaaagaagcattgtggctttatatcctctgggcctgggtttcctgaagtcaccacacatagaggagagagaaaatggctgagttaaagtacatttctggatttgggaatgagtgttcttcagaggatcctcgctgcccaggttccctgccagaaggacagaataatcctcaggtctgcccctacaatctctatgctgagcagctctcaggatcggctttcacttgtccacggagcaccaataagagaagctggctgtataggattctaccttcagtttctcacaagccctttgaatccattgacgaaggccatgtcactcacaactgggatgaagttgatcctgatcctaaccagcttagatggaaaccatttgagattccaaaagcatctcagaagaaagtagactttgtgagtggcctgcataccttgtgtggagctggagacataaagtctaacaatgggcttgctatccacattttcctctgcaatacctccatggagaacagatgcttttacaattcagatggggacttcttgattgttccgcagaaagggaaccttctcatttacaccgagtttggcaagatgcttgtacagcccaatgagatctgcgtcattcagagaggaatgcggttcagcatagatgtctttgaggagaccaggggctacatcttggaggtctatggtgtccactttgagttacctgaccttggaccaattggggccaatggcttggccaatcctcgtgatttcttgatacccattgcctggtatgaggatcgccaagtaccaggtggttacacggtcattaataaataccagggcaagctgtttgctgccaaacaggatgtctccccgttcaatgttgtggcctggcacgggaattatacaccctacaagtacaacctgaagaatttcatggttatcaactcagtggcctttgaccatgcagacccatccattttcacagtattgactgctaagtctgtccgccctggagtggccattgctgattttgtcatcttcccacctcgatggggggttgctgataagaccttcaggcctccttattaccataggaactgcatgagtgagttcatgggactcatccgaggtcactatgaggcaaagcaaggtgggttcctgccagggggagggagtctacacagcacaatgaccccccatggacctgatgctgactgctttgagaaggccagcaaggtcaagctggcacctgagaggattgccgatggcaccatggcatttatgtttgaatcatctttaagtctggcggtcacaaagtggggactcaaggcctccaggtgtttggatgagaactaccacaagtgctgggagccactcaagagccacttcactcccaactccaggaacccagcagaacctaattgagactggaacattgctaccataattaagagtagatttgtgaagatttcttcagaatctcatgctttctggtagtattggaggagggggttggttaaaatgaaaattcacttttcatagtcaagtaactcagaacttttatggaaacgcatttgcaaagttctatggctgtcaccttaattactcaataaacttgctggtgttctgtaaacgtaa

SEQ ID NO: 63026 - DNA, 988 bp, Homo Sapiens
  misc_feature (125)..(137): n is a, c, g, or t
  misc_feature (726)..(726): n is a, c, g, or t
  misc_feature (821)..(821): n is a, c, g, or t
  misc_feature (933)..(942): n is a, c, g, or t
  misc_feature (948)..(948): n is a, c, g, or t
gtagacctgacattttgagacaagcctagagtcaggagcagggactttgactcttaggaagagcacacatgagggcaaggctgctggcagacgtctccattgtccttatgttgtctgtgttgtannnnnnnnnnnnnattgaccatggtgattatttttttaaaccatcgttaatatactgaagtgagctatagcacatatcatgtgcttagtttgtttatttttctccatctccccttggcttcctagagtttggacatattccaggctaaatgcttttactcaagactacagaaaggtttgaagtagtgtgtgcatggcatgcacgtatgtaagtaatctggggaagaagcaaagatctgtttcattcttagcctcaggcctcatgagggtctccacagggccggagctcaggttacaccactccttcgtccttacaggagatgtagggagaagaatctgcaggctgcttgtaggactgttcaccaagggggataccagcagcaagagagtgcacccgtttagccctggaccctgtttcttactgtgtgacttggctagagttgggagttcccccaaaataaacgtgtccccattttaccagaaccaaacctcaacacagcgaagctgtactgtctttgtgtggcaaagatgttcccttgtaggcccctttcaggtaaccgtcttcacaatgtattttcatcacagtttaaggagcatcagccngcttctcaagtgggtagggaaagcagaaaaacgtacgcaagaagacatggatccaaaatgatgatgaagcatctccccatgggaggtgatggtgnggagatgatgggctaaacaggcaacttttttcaaaacacagctatcacagaaaagaaacttgccctcatggtaaactggaattgagaaatctcagtgattctgcaatgggannnnnnnnnnacgcanaaagtatgtatactctagtattccgggggttttttaaatt

SEQ ID NO: 63027 - DNA, 1370 bp, Homo Sapiens
tggcaggaggaggccggggttaatcggcacgaggactactataacactgcccagcagcaggtgcagcaaagccctccccaccccggaggactccccagccagtcaccatcaagccccctccacctgaggtgtaagcaggggttccagttaatacaagtttctgaatattttaaatcttaacatcatataaaacagaggtgagaactcagaagagaaatacagctggctatctactaccagaagggcttcaaagatatagggtgtggctcctaccagcaaacagctgaaagaggaggacccctgccttcctctgaggacaggctctagagagagggagaaacaagtggacctcgtcccatcttcactcttcacttgagttggctgtgttcgggggagcagagagagccagacagccccaagcttctgagtctagatacagaagcccatgtcttctgctgttcttcacttctgggaaattgaagtgtcttctgttcccaaggaagctccttcctgtttgttttgttttctaagatgttcatttttaaagcctggcttcttatccttaatattattttaattttttctctttgtttctgtttcttgctctctctccctgcctttaaatgaaacaagtctagtcttctggttttctagcccctctggattcccttttgactcttccgtgcatcccagataatggagaatgtatcagccagccttccccaccaagtctaaaaagacctggcctttcacttttagttggcatttgttatcctcttgtatacttgtattcccttaactctaaccctgtggaagcatggctgtctgcacagagggtcccattgtgcagaaaagctcagagtaggtgggtaggagcccttctctttgacttaggtttttaggagtctgagcatccatcaatacctgtactatgatgggcttctgttctctgctgagggccaataccctactgtggggagagatggcacaccagatgcttttgtgagaaagggatggtggagtgagagcctttgcctttaggggtgtgtattcacatagtcctcagggctcagtcttttgaggtaagtggaattagagggccttgcttctcttctttccattcttcttgctacaccccttttccagttgctgtggaccaatgcatctctttaaaggcaaatattatccatgcaagcagtctaccctgtcctttgctattgctcttctccacgtctttcctgctacaagtgttttagatgttactaccttattttccccgaattctatttttgtccttgcagacagaatataaaaactcctgggcttaaggcctaaggaagccagtcaccttcagggtaagggtcccgggg

SEQ ID NO: 63028 - DNA, 253 bp, Homo Sapiens
gggaacaaagcctttttaacacacgtaagggccctcaaaaccgtgggacctctaaggggacctttgaagctttttgagggcaaactttacctttgtggtccccaaatgatggcatttctctgttgaaaggatcacccaggccagtctgaggataacaagaatataagagtctgagaagaagggaggttaattaggggttgattgtactagtctagcaagagatgtgcatagctttagactagagtgagaagta

SEQ ID NO: 63029 - DNA, 595 bp, Homo Sapiens
gacggaagtttctgtgggcagcccgtgcagcgggatgtcagtcgcttggggaccacctactctttgcctctggggaccaggttttccaggtacctatccgaggccctggctgccgccacttcctgacctgtgggcgttgcctaagggcatggcatttcatgggctgtggctggtgtgggaacatgtgcggccagcagaaggagtgtcctggctcctggcaacaggaccactgcccacctaagcttactgagttccacccccacagtggacctctaaggggcagtacaaggctgaccctgtgtggctccaacttctaccttcacccttctggtctggtgcctgagggaacccatcaggtcactgtgggccaaagtccctgccggccactgcccaaggacagctcaaaactcagaccagtgccccggaaagactttgtagaggagtttgagtgtgaactggagcccttgggcacccaggcagtggggcctaccaacgtcagcctcaccgtgactaacatgccaccgggcaagcacttccgggtagacggcacctccgtgctgagaggcttctctttcatggtgccgatgaatagcga

SEQ ID NO: 63030 - DNA, 541 bp, Homo Sapiens
cacagtgtgctctatttttcacctgcaatactggtgaaggaaatcattttggtggatgatgctagtgtagatgagtacttacatgatatactagatgaatatgtaaaacaattttctatagtaaaaatagtcagaggaagagaaaggaaaggtctgatcactgctcggttgctaggagcaacagtcgcaacagctgaaacgctcacatttttagatgctcactgtgagtgtttctatggttggctagaacctctgttggccagaatagctgagaactacacggctgtcgtaagtccagatattgcatccatagatctggacacgtttgaattcaacaaaccttctccttatggaagtaaccataaccgtggaaattttgactggagtctttcactttggctgggagtcgcttcctgatcatgagaagcaaagaaggaaagatgaaacctacccaattaaaacacccacttttgcaggaggacttttttccatatcaaaagcatattttgagtatattggaagctatgattgaagaaatgga

SEQ ID NO: 63031 - DNA, 922 bp, Homo Sapiens
agatctccggccgagtggtgtctctttctactccaattatatggcgcagggggcatgaaccccagtccttcattcgcagaaaccaagacctcatctgcagcttcttcacttggttttcagaccacagccttccagagtccgacaaaattgctgagattattaaagaggatctgtggccaaatccactgcaatactacctgttgcgtgaaggagtccgtagagcccgacgtcgcccgctaagggagcctgtagtagatccccaggccctttgggttccagtctggtttacatttgcccttggggatactcctgcacaaggtctcctatcaccttctgctggagctgtgcttgggcatcagcaatgagtatgccttctattgtgctttgtttttgctgacttttctgcaccccgttttcctttggatattcagttctctcaacctcaagattgagacggtggtgggtatgcttctccacttccatatgaccttcatgctgttctggaatatcacatgctacgaggtcatccttcacactacttgtaagccaagcagatgatactgtagattgtactgcctttatctgcactgcttggaccctgtttattcccagggcctctgaactggttgctgtcacttggatttctagctttgggagcctgttccacctactcagctctgcattgagcagtatgggcacatgccctgtggacagatactggacgttaatgaactcagaggagaaaagcagtgagccacttgttctgtgtgatttatggtacttcatttgctcttccttcacctctagtcactttctattgctaccttgcctacattggctcctgccaaggtccctctctctccctgttttcctttttttggtatatttcttactggagacggacgacggagtcttgctctgt

SEQ ID NO: 63032 - DNA, 819 bp, Homo Sapiens
ggccagaaatacttgctgaattgactaatctggatcctcaaagggaaacacctcagctttttctaagaagagatgtgagacttcccttggaagttgaaaaacagattgaagacccactagctattcttattctctttgatgaagccagatataatttattgaagggcttttatacagctcctgatgctaagctgataacattggcaagtctgcttttgcaaatagtctatggaaattatgagagtaaaaaacacaagcaaggtttcctaaatgaagaaaatctaaaatccatcgtacctgttaccaaactgaaaagtaaggcacctcactggacaaatcgcatacttcatgaatacaagaatctcagtacaagtgaaggtgtcagtaaagaaatgcatcaccttcagcgcatgttcttacagaattgctgggaaattcctacttatggagcagcatttttcacaggacagatatttacaaaggcaagccccagcaatcataaagtcatccctgtgtatgtaggagtgaatataaaaggacttcatctcctcaacatggaaactaaggctttactcatcagtcttaagtatggttgttttatgtggcaattgggagatactgatacttgttttcagatccatagcatggaaaataaaatgagctttatagtacatacaaaacaggctggtctcgtggtaaaactgttaatgaagctaaatggacagttaatgcccactgaaagaaattcatgaaagagaagtaactgttactcaagccaccacattttgtaatgcagagttttttctccgtgaaagattt

SEQ ID NO: 63033 - DNA, 203 bp, Homo Sapiens
cggtccctgtcacatgctccacacgttttcagtagcaatttatgtgctcaccagtcacttagcaaaagatgacttcgtgaaggttcgagcaaggataaggggactcattcatttaatgactgtctcgactgtgtgaggactgcatctcaacagccagcatctgggggtcccgacctgatagtttgtgtgtgggcatgtgcaag

SEQ ID NO: 63034 - DNA, 453 bp, Homo Sapiens
cccccacctctgctgcctccctctgctgtcaccttgctcagccatcccgtcttctccgacaccacctctccagaggccaaggaggccttggaaacgattcccccagtcattctgggaacatgttgtaagcactgactgggaccaggcaccaggcagggtctagaaggctgtggtgagggaagacgcctttctcctccaacccaacctcatcctccttcttcagggacttgggtgggtacttgggtgaggatccctgaaggccttcaagcccgagaaaacaaacccaggttggcgactgcaacaggaacttggagtggagaggaaaagcatcagataacgaggcagaccatccaccaggcctttgagaaagggtagaattctggctggtagagcaggtgagatgggacattccaaagaacagcctgagccaggcctcgtgtggagcatggtcag

SEQ ID NO: 63035 - DNA, 527 bp, Homo Sapiens
ctggcacatgtccccacaagcacactcacaagacacagagatcaccggctcagaagggcccaacgctcaccactaaggtccggcggaccatgagcagccgcgtgcacgaagccgtgaaggccatcgcgctctgccacaacgtgactcccgtgtatgagtccaacggtgtgactgatcaggctgaggccgagaagcagtacgaagactcctgccgcgtataccaggcatccagccccgatgaggcggccccggtacagtggacggaaagtgtgggcttaaccctggtgggccgagacccctcttccatgcagctgaggacccctggcgaccagatcctgaacttcaccatcctacagatcttccctttcacctatgaaagcatacagtatgggcatcatcgtgcagggatgaatcaactggagaaattacgttttacatgaacgcgcgccgatgtggtcatggctggcatttgtgcagtacaatgactggttggacggaagagtgtggcacatacccgacgggtgcgg

SEQ ID NO: 63036 - DNA, 726 bp, Homo Sapiens
  misc_feature (509)..(663): n is a, c, g, or t
  misc_feature (671)..(686): n is a, c, g, or t
tttttacagtttgtagtaagtaactttttaaagattttatcaaaaagaattttgtctatagtgagtaaaagaagttctaataatggtcctaatcactgcatttttaaaaaacaaagttcaacacaaatgacatttgttttaaactttagtagataaaaggtgaaccatgtgacatgggcatttttgtaagtcaaaaacaaatttcacatatggtaaacctaatattcacagtgtgttccctcacttgtaatctctgaatacaaatatactagcttttctaaagggaatcatttttttaaaagtagtgccactgacaagatgctacagtgaagattatccattcttaggatatttattttcagtgaacattttctgcacaaaggtagtgttgcactgggacacaagccttttaacagataaccagttgaaatcaaacactgcctccacaccgagttctgttgtgtatttgatagtaaattgatttaaaaataaaagtggtttttgttagnnnnnnnnnnnnnnnnnnnnnnnnnnnnnnnnnnnnnnnnnnnnnnnnnnnnnnnnnnnnnnnnnnnnnnnnnnnnnnnnnnnnnnnnnnnnnnnnnnnnnnnnnnnnnnnnnnnnnnnnnnnnnnnnnnnnnnnnnnnnnnnnnnnnnnnnnnnttttgggnnnnnnnnnnnnnnnnaaaaaaaatttttaaaaccttttgttggggggcggggccc

SEQ ID NO: 63037 - DNA, 791 bp, Homo Sapiens
  misc_feature (617)..(633): n is a, c, g, or t
  misc_feature (635)..(642): n is a, c, g, or t
ggtagagataatctgacagcattccaaaaatacctgattgagagtaacaaacaaatgatgcctttgaaagtctgggaactacaagatcttagttttcaagcagcttctcaaataatgtccgctccagtttatgattccattaaattaatgaaagacatttcacagaacttccccataaaagccagattaagaatgaatatattgatatgcctctttcagtcaactttaaatgtcaagaatttgagaagtcgtcatttatataataaaacatgaaatatatatgggtgtgtataaatgtcatatctgtttagccataatattttaattaatggccgttataaaaattattagatcaaatacaaataaagtaaaataactttagtcttgatcagacagttgattagctctattgatgctaagtcagtataactgttcagaggttctgatgcaaaactctgctgttaatctgtaattaagaaaaaattataaaatatgctaacattgcttaatggctaaattgtaggcttgagcatatctctaaaaccacttggtagacaatctgtaaatgtttgttgaaatgaaatatttgctaaataaatgaaaaatttgccaaaaannnnnnnnnnnnnnnnnannnnnnnncttgtcgggcccgcctcggcccctcgaggaagcttttctaaaacccattcggtttgggccgcgcgggggccccaggtagggtaaagtggaaccatgggtccataaagctggtttttccctagggaagaatccctgggggcccattggac

SEQ ID NO: 63038 - DNA, 1538 bp, Homo Sapiens
  misc_feature (198)..(209): n is a, c, g, or t
  misc_feature (1277)..(1277): n is a, c, g, or t
ctcttatttttaacttggatacctgctattctgccaaaagacaatttctagagtagttttgaatgggttgatttcccccactcccacgaactctgaagccagtgtctagcttactaaaaaaagagttgtatataatatttaagatgctgagtatttcataggaaagctgaatgctgctgtaaagtgctctttaagtcnnnnnnnnnnnnaatccccttctaatgaatgaaactaggggaatttcaggggacagagatgggatttgttgtatgataaactgtatgtagtttttagtctttctgttttgagaagcagtggttggggcatttttaagatggctggctactcttgttttccctcatgataataaatttgtcataactcagtaacatgaacttgcccctagaggtagttgttaataattttgaaatattaaggtctttcccagcttctgatgattcacccctgtactactgattattaagcaggccagactgagctttctgttgcaaataccttggaggagaaagtaatttctaaatatacagagaggtaacttgactatatatgttgcatcctgtgcctcccttcatattaatatttgataaagattttaatttatgtaaaacttctaaagcagaatcaaagctcctcttggggaaatggcaagtctttaggataggcaagaccctgtatgaatagtaccaaagcattaccgcatggtagagaacacactcgattaaaaatgttaagctatctgaaaaataaaatgtgcaagtcttcaggatggcacaaaacaaaggttaatgcttcttggggcacatttcttagagggcttgctgagtgtgtaaatataatcgacttttgtttgtgttacatgacttctgtgacttcattgaaaatctgcacaattcagtttcagctctggattacttcagttgacctttgtgaaggtttttatctgtgtagaatgggtgtttgacttgttttagcctattaaatttttattttctttcactctgtattaaaagtaaaacttactaaaagaaaagaggtttgtgttcacattaaatggttttggtttggcttcttttagtcaggctttctgaacattcatgaaaagcctctcacttgaacccaaaccagagtactcttactgcctcttttctaaatgttcaggaaaagcattgccagttcagtcttttcaaaatgagggagaaacatttgcctgccttgtaataacaagactcagtgcttattttttaaactgcattttnaaaattggatagtataataacaataaggagtaagccaccttttataagcaccctgtagttttatagttcttaatctaacattttatatttccttcttttggaaaaacctacatgctacaagcccacatatgcacagactatacagtgagttgagtttggctctcccacagtcttttgagtgaatttaccaaagtcagccattatcatccctcctgagttatttgaaatgaattttttttgtacattttggctggcgaatgg

SEQ ID NO: 63039 - DNA, 1177 bp, Homo Sapiens
gggggacatcttctaaatcccggagacctggtgttagggtttgatttggccaactgtaacttaaatgatgagcatgtcaacaaaatgaactcagatagagttccagatgtggtattaatcaagaagagctatgaccggaccaaacgtcagcgtcgtagaaactggaaattgaaagagcttgcaagagagagagaaaacatggatacagatgatgaaaggcaataccaagattttcttgaagatcttgaagaagatgaggcaattcgaaaaaatgtcaacatttacagagattcagccatccctgtggaaagtgacaccgatgatgaaggagcacctcgaattagtctggctgagatgcttgaagaccttcatatttcccaagatgccactggtgaagaaggtgcatcaatgctgacataatgagatgttgtagactgtttccatacatgggcttaagaagttggacagagttaccttaagtgtctctactatctttgcctccagattttcagaggagaaatttagttttaaaccctgaataaacatgtttggttttcagtgctcactcaaaccactaaaacagatggatagctttgaggttttatataaggaaagattatggagaatgtagttgttatttgatttttggcaattttacatttggaattttatccctgtgcttttttaatatgaggcactggtagtattttcccatagtatagtactctggatggtaaaagctcaaaaattgtgattccttgaacgttcactataatcttcaagcaaaaacacatttttacattatttttacgttgattattttagtgaaagaccatatgaagaagcatttttaatattgaacttgttacatactttgatccactttacatcatttttatgttgttgaggtagggaaattagggttcagtttatcactggacattcaggaggcaagtcaatcttttttatttccttataaaattaactcttccaaagcccgttaaacagagagttatcttaaattttattggcagtaggaaggaaatatattttaaaatatttggagattttattagccaaataagagacctcgtttattttaaaggggtttaaataaaccaaatttgggttcctttttggatgggtttttttggccacatttttaagggggcactat

SEQ ID NO: 63040 - DNA, 941 bp, Homo Sapiens
gaagatcacctcacttctatgagcttgtggaagacacaaaagatggcatctggctggttcaggtcatagcagatgacagaagtcccttgtgtgggcaaaattcactgggagaaaatggttaaaaaggtgtcaagatttggaatacgtacaggcacatttaactgttccagtgatcccagatattgcaggagaagaggctgggtccgatccacactcattatgtctgttccacaaacaagtacttcaaaagggaaagtcatgcttaaagaatacagtggacgcaagattgaagtagagcacatttttaaatggataactgctcatgcagccttctcggatcaaaaccatttataatgctgaacacttgaaagaagaatggaataaaagtgatcagtattggttaaaaatatacctatttgcaaaccttgaccagcccccagctttcttctctgcactaagtataaagtttactggaagagttgagtttatttttgttaatgtagaaaattgggacaacaagagttatatgacagatattggcatatataatatgccatcatacatacttagaactcctgaaggaatttacaggtatggaaaccacacaggcgaatttatatcccttcaggccatggattcatttttgcgctcattacaacccgaggtaaatgatctgtttgtttttgagcttgggttctagttaatcttatgggcttgggatggacttatttattacacaggagctaccataaagcgatttgtggttctcataagcactttaaggacatataatctcctattaatatttccctgcctacctgtgttgggcctttttacagctacctaacctataatagctttaatgaatatagcttaaattggttgagatattcccatacaacccccctggctttcatgggaagggccaaactggaatggtt

SEQ ID NO: 63041 - DNA, 391 bp, Homo Sapiens
cttttgttcactagttccttttttctctacatttttaatttattaaacttgctgtgaaaacactttgattttctaagaggaaggtactttaagttccaggatgaacatgtagctgcactatgccagaaattaatgagggaagactttcttcctaagtgcttatgttttaacttatgttagtgaaaccactacaaggtgtttcaggcgctgataacatgcttcacacctgcccttggaggtcacagtactaatttacttcaaatttagttatgacagtgtcactgtatcctagttatgtttacagaacaaataaataatgactgtcatacatccagaggagaccgaacctgcccagctgatgtactgttttatggaataaagtcacttgatc

SEQ ID NO: 63042 - DNA, 1444 bp, Homo Sapiens
ggccgatcgcgtcgggcagcgggcgcggcggccccgcgcagccatggactggctcatggggaagtccaaagccaagcccaatggcaagaagcccgctgcggaggagaggaaggcctacctggagcctgagcacaccaaggccaggatcaccgacttccagttcaaggagctggtggtgctgccccgcgagattgaccttaacgagtggctggccagcaacaccacgacgtttttccaccacatcaacctgcagtatagcaccatctcggagttctgcacaggagagacgtgtcagacgatggccgtgtgcaacacacagtactactggtatgacgagcgggggaagaaggtcaagtgcacggccccacagtacgttgacttcgtcatgagctccgtgcagaagctggtgacggatgaggacgtgttccccacaaaatacggcagagaattccccagctcctttgagtccctggtgaggaagatctgcagacacctgttccacgtgctggcacacatctactgggcccacttcaaggagacgctggccctggagctgcacggacacttgaacacgctctacgtccacttcatcctctttgctcgggagttcaacctgctggaccccaaagagaccgccatcatggacgacctcaccgaggtgctatgcagcggggcctgcgggttccacagtgggggcagtggggatggggccggcagcgggggcccgggagcacagaaccacgtgaaggagagatgagccccccgggccggacaggggcacacgtgtgcaaagagacggtggtgtgtgttctctcctgtcatctgctgtgtgcacacatgtgctgggcacgccgtgtgggtgaggtctgagatgggccccgggctgcactcggtttgttggcttgcacacggcacaagacgcagacggtcccggccgtgtcctgtggccccctgtcggatggatgcgtgccgtttgtagagaaggagccttttagggcccattcactcgttcagcagacacgctatgggacttgatgctttgagttattcttctgtgggctggtttccttttctctggtctccgtgcagcccctgccctccctcgggtgctgctggcctcaaaggaggaactcgtggggggagggtgtgatttgcagacctgggtctctgctctgctctggggggtggggcttgctttcacagagaccctccttccctctcacccctcctctcccggcctcgccaggagtcttggctgttggcagctcagaggtgggggaggcctgtggtgtgaggtgccctgcacctgctcctgctcctgtcaccccttcctgctgcctcctccatgcccaaggaacacccatggtgcagtccgtcaggcaaggccaaggacaggggctgaggccctgcgtggagatgctgcaccagcggaaggctgagaccc

SEQ ID NO: 63043 - DNA, 1565 bp, Homo Sapiens
tcaagtcagactgaccaagaaagattcctgaggctggcaggtggggcaacgtgtggaggaagcccctcataatatggagaaaacttgatacaagtagaagctgagcttttaaggcataggcttttaaattaatacatatatccaaggatatgttatagctgcagtgtgggaaagccaaaggatttaagagtttagtcgttgttaataaaaggaatactccttttccttttggatcatagcttaacaaggcacaggaagggaagggatcttgactaagattcatgagacattgaattaaggagaatcatcttcatgcctgaaaatttagcaaaattccgactatggcctccagggcaattcctaaaagctgaatggataataaaattggactggaaagtaagtaggtggctggtcctcaccctgttggaatggctatcctactatgctgttctttggtaatggaataaattgacccaaggaccgaatttcatttggatttcaagttgtccagagtggaaaagccttcaagatgacatgatgaattactcagttcatctgatttctggtccctcctttctcgacaactataatactaacccttttctcaggataactgtctacacctggcagttttctctgacgtgctgttcactcacatccctaccttgcatggtaatataaaggactaggaagcagtcatacttccaggaaatgcttggattcatgtggacattcaggaagcttattctcatataatactaatctaaacagtactagaaattacagtgccaagagccaccaggaggcccagccaataagcatagatactatatggtatcatgggacccatctattttttaccagtggactacaggattacttgagagttatcagggctgcctaacagaccaggagatctgggggttgcaccagggaatcgccatatttgaccagcatgttttaaaagctcttggtaggattagttggttctaaggatccctctagggacctcattatttcaagaggaacccaaagtccagcctcctacatagatgctgccccacgaaggacccacaaaactaacctagttcagggttctcaggcaggcagttctgcttcagcttagagcagaacccataaaatactcaagtactgggataggcaagcatgtgtgtttactgtggattggtccctgaaggctcctttgggtgagaacatgtgaaccaggcaccctggtttgtttggagcattgctgcccagaagcttctatgggataggtggtgcttgggattgatgtgttgtggccatgcagccctccctgaggattgacttctgcactaatccagtgaaggaggctgtgtcaaaagaagggctcagaagccctcttttcagaggcaatgattcctgtcagtatgaggtcccttagttactaaaaagggacatgatttaactccagtttgatgaacctcctccgagtttactttattgtcttcaaatcttttgttttcttcctttttgtgagatttgtgggttttgtgccttataaatggaaatgtatgaacaca

SEQ ID NO: 63044 - DNA, 521 bp, Homo Sapiens
ctctgtaaagaatagtgagtcaccagccagtcctcccgtagctgttccccatagctggtcacgtgccaaatctgacagtgataaaatctcaaatggctctagcatcaactggcccccagaattccatccgggagttccatggaaaggactgcagaatattgaccctgagaatgaccctgacgtcactcctggcagtgtccccactgggcctaccatcaacaccaccatccaggatgtcaaccgctacctcctcaagagtggagggtcctccccgccatcatctcagaatgccacgctgccttcttcgagtgcctggccactcagtgcctccggctacagtagctctttcagcagcattgcatccgcacctagtgttgcaggtaaactgtcagacatcaaatcgacgtggtcctctggccctacctcccacacgcaagcctctctgtctcatgaactatggaaggtgcccagaaacagtactgcacccacgaggccacctccagggttaaccaatcccaagc

SEQ ID NO: 63045 - DNA, 519 bp, Homo Sapiens
ccgcccgacttcttcggcgtgctggtgcgcgacatgctgcacttctacgctgagcagggcgacgtgcagatggctgtgtctgtgctcatcgtcctgggtgaacgggtgcgcaaggacatcgacgagcagacccaggagcactggtacacttcctacatcgacctgctgcagcgttccgcctctggaacgtgtccaacgaggtggtcaagctgagcaccagccgcgccgtcagctgcctcaaccaggcctccaccaccctgcacgtcaactgcagccactgcaagcggcccatgagcagccggggctgggtctgcgacaggtgccaccgtgcgccagcatgtgtgccgtctgccaccacgtagtcaagggtctcttcgtgtggtgccagggctgcagccacggcggccacctgcagcacatcatgaagtggctggaaggcagctcccactgtcccgcaggctgcggccacctctgcgagtactctgacggggcatctgctgggcttgcccgtgcggtcgc

SEQ ID NO: 63046 - DNA, 462 bp, Homo Sapiens
gagggtcattcatcccatgcccagttccccccatcctactcctaacagatgtgaccctacttgaggccgccttggcttttgggtcaccctgtctcatcccatcaccccaaacataccctagtccttcagcctggggctctggcatctgagcccgagctcctgcccctgctgtgggaaaggtggggaagaaggggatctccctcccgggcccacccagctgcccagcctttgcccactcggggagcagatcatgcatgccaatccctgttgccgcatggagctcctcagcccactgacctctccgtgcctggtgcaggccaggcccccgtcttccgcctgcctctgcttccccgtcatgcatggtggtggtgtttctacggtgtctggttctgtgcccgtctctgagacagtctctgtgtggaatttgccttaaactgaagtaaatttggttcttttactaaa

SEQ ID NO: 63047 - DNA, 524 bp, Homo Sapiens
gtacccctgagagaggggggcagggcgttgggcaggggtccctcggaggcctcctggggatgggggctgcagctcgtctgagcgcccctcgagcgctggtactctgggctgcactgggggcagcagctcacatcggaccatcacctatcagggctctctcagcaccccgccctgctccgagactgtcacctggatcctcattgaccgggccctcaatatcacctcccttcagatgcactccctgagactcctgagccagaatcctccatctcagatcttccagagcctcagcggtaacagccggcccctgcagcccttggcccacagggcactgaggggcaacagggacccccggcaccccgagaggcgctgccgaggccccaactaccgcctgcatgtggatggtgtcccccatggtcgctgagactccccttcgaggattgcacccgcccgtcctaagcctccccacaaggcgaggggagttacccctaaaacaaagctattaaagggacagaatacttaaa

SEQ ID NO: 63048 - DNA, 709 bp, Homo Sapiens
  misc_feature (390)..(390): n is a, c, g, or t
  misc_feature (395)..(431): n is a, c, g, or t
ccgtgtggcacgcaccgtggcccctgcagcggaaaccaaagtccccctactatgtgcggggcgcctggggactgagtggctacgggaagcctccctgcttctctggggccagagcagcttccaggaagtgaagagacccctctccccagtgccccacatctttctctgggagacactcgcgccccctatcctggccagtgatggaggggtatctctacaggggtcctcggtctccatctacttcccttttttcatgtgtttccagccccaccctcagccagagccaggcccccaggcaggagcttcccagcgagcggcctcccctcacttcctcctggtggtcccgttgtctctgctgaatcagaggtgagaacggtgccaaaatccaangatgnnnnnnnnnnnnnnnnnnnnnnnnnnnnnnnnnnnnnggcctcatgaccctgggggctgcccccctcggtgctcccggagcctccagtagagtagcgtcacaagcaatctccctggcgcttcctgggtggggacccctgctccgtccccgcttcctagctgcccacttttcagtgttacgaagcctggggaccggggcaggcacccacggggctctccacacgccccctacactgcccgccaccattttgcacactgcctgttcacatgtcgcccaggcgggaaaaatggaaaataaagtgtatttacacagtca

SEQ ID NO: 63049 - DNA, 300 bp, Homo Sapiens
taaggacgtctgaatgaacaaggaaattttaaaagatctgtctcaatcttccaaagaggctagaacgtcagataaagatgattccactcgatgcttcctcaaataaagacttcactcccaatagagacaaaaaaactgactatgacaccagagagtattcaagttccaaacgtagagatgaaaagaatgaattaacaagacgaaaagactctccttctcggaataaagattctgcatctggacagaaaaataaaccaagggaagagagagatttgcctaaaaaaaggaacaggagattcc

SEQ ID NO: 63050 - DNA, 679 bp, Homo Sapiens
tctctttctcttggttcaccttgcctgtcgctagcaagcatctggctcagcggaaatgggatgtgagaatgatgaaacccgacagaagtatctcagcctgcagtcagttattatgtataggaggtgagctagttaacaaacttgtaccacgaaacaatataagctttaacttttctaaagccaaatttcccatgtaagctgcagtttctatctttagcccatcatcattttctgcccccccaaaatctgttgaaatgattcactgatgcaaaacattcacccgtaatagactgagaattgagccttaacttcagattaacttgtgagaatcaggaaaattccttctactgcattgcatcctcttggaccagggctagaatggggatttcaggtttctatgagcctccccattacccctaaagtagaacattttttaaattgtgttgccaccacttctaaaaatttagcaatattagaataggatactagtgaagtaagaaattttgcttgttgttttgcaaaccaaatagtttcctctaaacacaaatcagtgttcccacgaacaagttccagttgagaaacactaaggttatggtgaataacaccatagggagcttcttccccccaatgcctggctattttatacttaatggggacgaggggactttttatatgtcat

SEQ ID NO: 63051 - DNA, 483 bp, Homo Sapiens
cttgcgtatgcgggagacccaacttggtggcagcacctcacatttgatgtggaaacggatgaagaacctcaggcgtgggagctgccctttgatgccggacaagccactgagcgcaaatgtacccaatgataagttcacccgataccccatgaggggcctgggccatcccctgagacatctgccggtgccacagcctccatctgccatcagttccggggagaacagcaagagcaggttcccgccactgtgctacgccacccagtaccaggactacagcctgtcgtctgcccacaaggtgtcaggcatggcaagccggctgctcgggccctcatttgagtcctacctgctgcccgaactgaccagatatgactgtgaggtgaacgtgcccgtgcttgggaagctgcacgctcctgcaaggaggggacctctttcagagctcctggaccaggacacttgagccaggccttctacctggcatcactt

SEQ ID NO: 63052 - DNA, 797 bp, Homo Sapiens
  misc_feature (213)..(244): n is a, c, g, or t
ggccactgggaccctcagccttgtttgtactgtatgccttcagcattgcctaggtacacgaagcacgatcagtccattccagagggaccggaggtatgacaagctttccaaatattttgctttatcagccgatatcaacacttgtatctggcctctggtgctccagcagtgccttgtgcaatgtgaatgtgcgcgtctctgctaatccaccannnnnnnnnnnnnnnnnnnnnnnnnnnnnnnnctcggatacttgccaaaatgagactgtccgtcggcagctgggggaagggtctgagactccctttccttttggttttgggattacttttgatcctgggggaccaatgaggtgaggggggttctcctttgccctcagctttccccagcccatccggcctgggctgcccacaaggcttgtcccccagaggccctggctcctggtcgggaagggaggtggcctcccgccaacgcatcactggggctgggagcagggaaggacggcttggttctcttcttttggggagaacgtagagtctcactctagatgttttatgtattatatctataatataaacatatcaaagtctctggaaaagagtagctggaaatggacaactggaaaggctgagtgcaatcaaatctcctcacctgaagacttaactcttgtcggcccgctgcggccccagaaaagttttcaacactattgtttgggctcccggacccacaagaaaggggaactgggcctgatgtgtttccaagaagacccggtgactgaccatggctggtgttccacc

SEQ ID NO: 63053 - DNA, 707 bp, Homo Sapiens
gatcacgtgcattgtgcacggtgaccctgacacaaaaagcaaggtctacctgaggacccccaactgggacggggcctgccatccctcactctgtgtcctggaacatcagcgtgccagagacaggtggctgcctgactttctttaaaggagcggagcggcgtggtctgccagacagggcgcgcattcatgatcatccaggagcagcggacccgggctgaggagatcttcagcctggacgaggattgtgctccccaagccaagcttccaccatcacagcttctgggtcaacatctctaactgcagccccacgagcggcaagcagctagacctgctcttctcggtgacacttaccccaaggactgtggacttgactgtcatcctcatcgcagcggtgggaggtggagtcttactgctgtctgccctcgggctcatcatttgctgtgtgaaaaagaagaaaaagaagacaaatcagggccccgctgtgggtatctacaatggcaacatcaatactgagatgccgaggcagccaaaaaagtttcagaaagggcgaaaggacaatgactcccatgtgtatgcagtcatcgaggacaccatggtatatgggcatctgctacaggattccagcggctccttcctgcagtccagaggtggacacctaccggccgtcccgggcaccatgggggtctgtcctctctccccgtcgcgct

SEQ ID NO: 63054 - DNA, 1805 bp, Homo Sapiens
taaagcaggctgtacggtccggagtgtatggatggggactgggagcgggcggcgcggcatggcgggctgctgcgccgcgctggcggccttcctgttcgagtacgacacgccgcgcatcgtgctcatccgcagccgcaaagtggggctcatgaaccgcgccgtgcaactgctcatcctggcctacgtcatcgggtgggtgtttgtgtgggaaaagggctaccaggaaactgactccgtggtcagctccgttacgaccaaggtcaagggcgtggctgtgaccaacacttctaaacttggattccggatctgggatgtggcggattatgtgataccagctcaggaggaaaactccctcttcgtcatgaccaacgtgatcctcaccatgaaccagacacagggcctgtgccccgagattccagatgcgaccactgtgtgtaaatcagatgccagctgtactgccggctctgccggcacccacagcaacggagtctcaacaggcaggtgcgtagctttcaacgggtctgtcaagacgtgtgaggtggcggcctggtgcccggtggaggatgacacacacgtgccacaacctgcttttttaaaggctgcagaaaacttcactcttttggttaagaacaacatctggtatcccaaatttaatttcagcaagaggaatatccttcccaacatcaccactacttacctcaagtcgtgcatttatgatgctaaaacagatcccttctgccccatattccgtcttggcaaaatagtggagaacgcaggacacagtttccaggacatggccgtggagggaggcatcatgggcatccaggtcaactgggactgcaacctggacagagccgcctccctctgcttgcccaggtactccttccgccgcctcgatacacgggacgttgagcacaacgtatctcctggctacaatttcaggtttgccaagtactacagagacctggctggcaacgagcagcgcacgctcatcaaggcctatggcatccgcttcgacatcattgtgttcgggaaggcagggaaatttgacatcatccccactatgatcaacatcggctctggcctggcactgctaggcatggcgaccgtgctgtgtgacatcatagtcctctactgcatgaagagaagactctactatcgggacgaagaaatatataatatgtgcgaagtttacgagcagggtcttgctagtgagctggaccagtgaggcctaccccacacctgggctctctcacagccccatcaaagcaacagagaggacggaggagggagaaatggccaccagcatcaccccagagaaagtttctggaatctgattgagtctccactccacaagcatctcagggttccccacagcagctcactgtgtgttcgtgtgcaggatctgtttgcccacctcggcccaggaggtcagcagtctgttcttggctgggtcaactctgcttttcccgcaacctggtgtatgtcgggcggagcgctggcccgacgcagtggcacagctgtggctttcagggctggagctggctatgctcagaagccatcctgtctccagctctctccaggacaggcccagtcctctgaggcacggcggctctgttcaagcactttatgcggcaggggaggccgcctggctgcagtcactagagcttgtagcaggcactgggctgcaggcttccccccggaccattgcctgcagccatgcggcagagctggcatttctcctcagagaagcgctgtgctaaggtgatcgaggaccagacattaaagcgtgattttcttaaaaa

SEQ ID NO: 63055 - DNA, 484 bp, Homo Sapiens
agtcgctggtggacgctcgaatgttagatcacctttacaagaaggagctccggggccaactcaagatggtggacagctttcacagggtgagtctacattatgggattatgtgcctgacacggctcaactatgaccggaaggacctggagcggaggcgggaagaaagtcagacccagatccgagacgtgatggtgtggtccaatgagcgggtcatgggttgggtgtccgggctgggcgtgaaggaagtttgccacgaagcctcacggagagcggggtagcacggggcactgctcgccctggagcgagaccttcgactactccgacctggccttgctcctgcagatccccacgcagaatgcacaggcccggcagcttctggagaaggaattcagcaaccttatctccttaggcacagatcaggcggttggacgagacagcgccaagtctttcagccgctccccatcctggcggaaatgtcctgagg

SEQ ID NO: 63056 - DNA, 637 bp, Homo Sapiens
tccctgagacatagaggccgtcacagcaagccaaatgcgctggacacattcgtacctttctgatgatgaggacatgctggctgacagcatctcaggagacgacctgggcagtggggacctgggcagcggggacttccagatggtttatttccgagccctggtgaatttcactcgctccatcgagtacagccctcagctggaggatgcaggctccagagagtttcgagaggtgtccgaggctgtggtagacacgctggagtcggagtacttgaaaattcccggagaccaggttgtcagtgtggtgttcatcaaggagctggatggctgggtttttgtggagctcgatgtgggctcggaagggaatgcggatggtgctcagattcaggagatgctgctccgggtcatctccagcggctctgtggcctcctacgtcacctctccccagggattccagttccgacgcctgggcacaggtgagcctatcctggtgtctgggatcgcctcctccagactcgtggggtcccctttcagtgtctctgccataggctcccctctgggcttgcacaccactagaaacagggagctcactactcctgagtctgccccatcgatctttacactatcttggcttggtaga

SEQ ID NO: 63057 - DNA, 457 bp, Homo Sapiens
  misc_feature (235)..(279): n is a, c, g, or t
ttgcgtgggggtcctccagagttaagtggctgtcctcgactgtgcccatacagcagccagctttcttccttaataactgcccgttcgaagagtgcgaggatgtccaagcggcaccggttggacctaggggaggattccccctctggcaagaagcgtgcggggaccgatgggaaggatcgttttcgagaccgggatcgtgaagatcggtctaaagatcgagaccgagaacgtgatnnnnnnnnnnnnnnnnnnnnnnnnnnnnnnnnnnnnnnnnnnnnnttgcgagcttcaacaaatgctatgcttatcagtgctggattaccacctttgaaagcttcccattcagctcactcaacgcactcagcacattcaacgcattcaacacattctgctcattcaacgcatgccggacatgcaggtcacacgtcacttccacagtgcattagtccgttcacca

SEQ ID NO: 63058 - DNA, 307 bp, Homo Sapiens
gcaaatttcagtctgctacactttgttaggtccagaaggagctgcccatactactttcttatgagcatgctcagtatggcatatggacatgtaatgtcacatctttgtggagtgtgattttcttttttcacatatttgtatgcagtagagagcctgttgtagaaaacgctccctgtatcttgctgtactgttaaagaaagctgaattccacattgccaacaaaagcgtgaaaatgttcatgaaccttcctccaggaaaagccattcaagcctgattatttttctaagtaacttcaattaaattgaag

SEQ ID NO: 63059 - DNA, 616 bp, Homo Sapiens
  misc_feature (544)..(544): n is a, c, g, or t
  misc_feature (581)..(581): n is a, c, g, or t
  misc_feature (602)..(602): n is a, c, g, or t
gaatatgcactttctggttggaatttgaataacatgcctgtcctggaacagtctgttcttgcacatattaatgtggacatctctggtatgaaagtgccgtggctctatgtgggaatgtgcttctcttctttttgctggcacattgaggatcactggagttattccatcaactacttgcactggggggagccaaagacatggtatggtgtgccatctcatgctgcagagcaactggaggaggtgatgagagagctggcccccgagttatttgaatcccagcctgatcttctgcatcagttagttaccatcatgaaccccaacgtgctaatggagcatggtgtgcctgtgtacaggaccaatcagtgtgctggcgagtttgttgtgacatttcctcgtgcctatcactctggatttaaccagggctacaactttgctgaagctgtgaacttctgtactgctgactggttgcccattggacgtcaatgtgtaaatcattaccgacgcctaaggcgccactgtgtcttttcacacgaggaactaattntcaagatggcagcagatccagaatgcttagatgtggngctggctgccatggtctgcanagaattgactctca

SEQ ID NO: 63060 - DNA, 567 bp, Homo Sapiens
cgtttgaggtgtctgagtctattatgggagtagcagtcttgagacgctggaaggaaatacaattgagataggatgtgacggtgacagtataacagtaaatggaatcaaaatggtgaacaacaaaggatattgtgaccaactaatggtgtgatccatttgattgatcaggtcctaattcctgattctgccaaacaagttattgagctggctggaaaacagcaaaccaccttcacggatctggtggcccaattaggcttggcatctgctctgaggccagatggagaatacactttgctggcacctgtgaataattgattttctgatgatactctcagcatggatcagcgcctccttaaattaattctgcagaatcacatattgaaagtaaaagttggccttaatgagctttacaacgggcaaatactggaaaccatcggaggcaaacagctcagagtcttcgtatatcgtacagctgtctgcattgaaaattcatgcatggagaaagggagtaagcaagggagaaacggtgcgattcacatattccgggagatcatcaagccagcaaag

SEQ ID NO: 63061 - DNA, 760 bp, Homo Sapiens
ctgttcttgttttcaaagtaacaggagagggttatagtttaatagtcagggagataacacagcatgtgtagcaccagttgataattggtctctagtagcttactgtcaaaatgttcaatgaagtcttctgttcatctgttgaaactaggaaaatacccaaacttaaatggaagaattctgaaagagaggatagaatttaaagaacaagagtatataaagttattctttgaatatttcgttgactatatgtacattgagttatctatatttgtaaacaaattagtcatggaaaattattctattccaaagtctccttttagtctagataatcattatttcattttaaaattagtgtttttcatagtttgcactgatgcgtgtatggatgtgtgtgagtcagtggtagcttatttaaaaagcaccttatcctttctcccataacctttgtacactaaaaaatgaaagaatttagaatgtatttgatgatagcattctcactaagacacatgagaatttaactttataaccgcgtgagttaagatttaattcataggttttgatgtcattgttgaagttatttgtaattcagaaaccttgcttgtgtgatacatagtaagtctcttcatttattactgcttgtctgttgttatatctggattatcaaaagctatagtgcaccaattaagatgtgctctaatcaggacttatatcataggcaccacatttttcatgtcagactagttactttgttaatataacg

SEQ ID NO: 63062 - DNA, 1230 bp, Homo Sapiens
cctggggctgagctgctcgtgctgcagctggctgcggagtgcctgtctcccttgtctgccgcggtccccgcccgtccctgccgccggctgccatggcaggagccggaggcgtgggctgccccgctgggcggcaacgacttccagtggtgcttctcgcaggtcaagggggccatcgacgaggacgtggccgaagcggacatcatttccaccgttgagtttaattactctggagatcttcttgcaacaggagacaagggcggcagagttgttatttttcagcgtgaacaagagaataaaagccggccctcattctaggggagaatataatgtttacagcacctttcaaagtcatgaaccggagtttgactatttgaaaagtctagaaattgaggaaaaaattaataaaattaggtggttaccacaacagaatgctgctcattttctactgtctacaaatgataaaactataaaattatggaaaataagtgaacgggataaaagagcagaaggttataacctgaaagacgaagatggaagacttcgagacccatttaggatcacggcgctacgggtcccaatattgaagcccatggatcttatggtagaagcgagtccacggcgaatttttgcaaatgctcacacatatcatataaattccatttcagtaaatagtgatcatgaaacatatctttctgcagatgacctgagaattaatttatggcacttagaaatcacagatagaagctttaacatcgtggacatcaagcctgctaacatggaggagctgaccgaagtcatcactgcagccgagttccacccgcaccagtgcaacgtgttcgtctacagcagtagcaaagggaccatccgcctgtgtgacatgcgctcctcggccctgtgcgacagacactccaaagttttttgaagagcctgaagatcccaagcaagtaggtccttcttctcagaaataatttcatccatatccgatgtaaaattcagtcataagtgggcggtacatgatgaccagagacttacctgtcggtgaaggtgtgggacctcaacattggagagcaggccggtggagacccaccaggtccacgagtacctgcgcagcaagctctgctctctctatgagaacgactgcatcttttgacaagtttgagtgttgctggaacggttcggatagcgccatcatgaccgggtcctataacaacttcttcaggatgtttgata

SEQ ID NO: 63063 - DNA, 608 bp, Homo Sapiens
ttttgtcctaaaaacagaaaatagccgcattcacataaactctgatagggtcctgaagaacatacaggatctcaagaacttttcagttctgaagatgaactgccaccaaatgagatacgtattgagttgtgtagctcaggaattactgtgttcccaactaaataccttccacaaaagtgctattagaagaagctggtcctctgaagataaagtgggccagtctgaagctctatctagagtccttcaagtagctaagaaaatgaagttgatttctaatggaggagattctgctgtagaaatggatcggagaaatgtgtctgaatttaagagtattaaaaaaacatcattaataaaaagctgtgattccaaaagccagaagtatagttgtttagtcatggtgctatctccatgccatgtgaaggaaataatcatagtattcggaccaaattctggctctaaggtgcctttagcaacagttacagtaattgatcaatcagaaactaagaagaaggtttttctgtggaggactgcagcattttgggcatttacagtgtttcttggagatataattttacttcacagatgttgttattcatgaggacatctcg

SEQ ID NO: 63064 - DNA, 274 bp, Homo Sapiens
gcagccaagtatccgaagctggggaagacatctggaatattttcctggagaaaaatgcgcctctgagagtgaagattcctgagatgctacaggctgaaattgactcgcgcctgcggaacagcgaagatgctcgtggtgttctctgtgaagctcacgaggcaggcgatgcctgagatccaagagcagatccacgactacggaacgaagcgcacactgtggctgggccagcctgtatggtgaaaatgacctgctggacctggctggggacatgtcg

SEQ ID NO: 63065 - DNA, 1165 bp, Homo Sapiens
gccacttcctggggccgccggcggggccgctggctgcactcagcgccggagccgggagctagcggccgccgccatgtcccaccagaccggcatccaagcaagtgaagatgttaaagagatctttgccagagccagaaatggaaagtacagacttctgaaaatatctattgaaaatgagcaacttgtgattggatcatatagtcagccttcagattcctgggataaggattatgattcctttgttttacccctgttggaggacaaacaaccatgctatatattattcaggttagattctcagaatgcccagggatatgaatggatattcattgcatggtctccagatcattctcatgttcgtcaaaaaatgttgtatgcagcaacaagagcaactctgaagaaggaatttggaggtggccacattaaagatgaagtatttggaacagtaaaggaagatgtatcattacatggatataaaaaatacttgctgtcacaatcttcccctgccccactgactgcagctgaggaagaactacgacagattaaaatcaatgaggtacagactgacgtgggtgtggacactaagcatcaaacactacaaggagtagcatttcccatttctcgagaagcctttcaggctttggaaaaattgaataatagacagctcaactatgtgcagttggaaatagatataaaaaatgaaattataattttggccaacacaacaaatacagaactgaaagatttgccaaagaggattcccaaggattcagctcgttaccatttctttctgtataaacattcccatgaaggagactatttagagtccatagtttttatttattcaatgcctggatacacatgcagtataagagagcggatgctgtattctagctgcaagagccgtctgctagaaattgtagaaagacaactacaaatggatgtaattagaaagatcgagatagacaatggggatgagttgactgcagacttcctttatgaagaagtacatcccaagcagcatgcacacaagcaaagttttgcaaaaccaaaaggtcctgcaggaaaaagaggaattcgaagactaattaggggcccagcggaaactgaagctactactgattaaagtcttcgcatagttcagcgtatgacgggtgcgagttcg

SEQ ID NO: 63066 - DNA, 1088 bp, Homo Sapiens
  misc_feature (337)..(337): n is a, c, g, or t
ggggggaatttccctacacaggaacctttggtcccaggcgctttggaaccccaggtgatccatggaaaccggaaaccggccaggaaaaatgtggctgggtcattttgcccacccagggcccttccttgcgctgccctggttgccctactttccttgaataagaggtgcaggagggagatgcccttccctgaaaatgccctttttcacaccgtcctgaaaactgaccgcctgtcgcttatggcctgcccgtgtgggaatcccatctgccctgaaccgtgggagtccgtctgcacacaccgggagaggtcagaggattcaaggaagggacctaacccgnttcatgagacgctatagtgtcaccccgctagccagcccccgaacccaccaaaaagcctcgcatcaacagctttgaggagcatgtggcctccacttcggccgccctgcccagctgcctgcccccggaggtgcccacgcagctgcctggacaaaacatgaaaggctcccggagcagcgctgactcctccaggaaacactgaggcagacgtgtcggttccattccatttccatttctgcagcttagcttgtgtcctgccctccgcccgaggcaaaacgtatcctgaggacttcttccggagagggtggggtggagcagcgggggagccttggccgaagagaaccatgcttggcaccgtctgtgtcccctcggccgctggacaccagaaagccacgtgggtccctggcgccctgcctttagccgtggggcccccacctccactctctgggtttcctaggaatgtccagcctcggagaccttcacaaagccttgggagggtgatgagtgctggtcctgacaagaggccgctggggacactgtgctgttttgtttcgtttctgtgatctcccggcacgtttggagctgggaagaccacactggtggcagaatcctaaaattaaaggaggcaggctcctagttgctgaaagttaaggaatgtgtaaaacctccacgtgactgtttggtgcatcttgacctgggaagacgcctcatgggaacgaacttggacaggtgttgggttgaggcctcttctgca

SEQ ID NO: 63067 - DNA, 497 bp, Homo Sapiens
agactataagaaagcagagtctgatcttttgccctgtaaagcagaagagatatataaagcatttgtgcattcagatgctgctaaacaaatcaatattgacttccgcactcgagaatctacagccaataagattaaagcaccaacccccacgtgttttgatgaagcacaaaaagtcatatatactcttatggaaaaggactcttatcccaggttcctcaaatcagatatttacttaaatcttctaaatgacctgcaggctaatagcctaaagtgactggtccctggctgaagggaattaacagatagtatcaagcgcagaaggaatgtgccagtatggctccctgggtgaacagcttggccttttttgggtgtcttgacaggccaagaagaacaaatgactcagaatggattaacatgaaagttatccaggcgcagagttgaagaagcataagcaagtcaaaaacagagagacccagaaggagcgaagatactgtgca

SEQ ID NO: 63068 - DNA, 391 bp, Homo Sapiens
cttaggaggaaaaaagtggtaatgattcaaggaaacataatcacacacggttttagttttaatggacatgggaggagccataaaagtagtctatctatcatcagttacatatctaatgaactgtctatctgggataccctatcctgttttaatctgagtgactctctctcagctgagagagctggacagactccattttagcctcttcacttgcagtccccttatccccctcccttaagggaataactagtgcaagctgactccaagcacatccaggaatgcacttactgataagatattgaggcaagctgtaccagcagctcctggggacgtgctcagtggatggtacccaagcgcctgcatttatctctttgtaacctcctagccggtc

SEQ ID NO: 63069 - DNA, 612 bp, Homo Sapiens
  misc_feature (78)..(78): n is a, c, g, or t
tctctgagagttttaatactttcaaggactttaaaaaaataatcatgtttgaattgttttctcttatttttgtgaggnggtttgaaggaaggacaaggtagatctgtttagttttgcagttgaagttagatggtcctaaacatttaattgtcaaataatttcaaatttaatgtcctgctttcacattgaagggcagagcctacaaaacattgtatatttcaaaagtcaaaaagaagcagcagcagtatcttgttctctaattcatagacaagttgagtgtgtttgtggtactttgggtttttaaacactttgggatactaatccctagacattgccttcactccacctttagtccttctgagcactctctcgggagttggaacattgttatccttgtaagaaatactaagcttatgttgatttttaagtaattatatcttctcttcttgctggtgggtggggcagtttggtttagtgttatactttggtctaagtatttgagttaaactgcttttttgctaatgagtgggctggttgttagcaggtttgtatttcctgctgttgattgttactagtggcattaacttttagaatttgggctggtgagattaa

SEQ ID NO: 63070 - DNA, 524 bp, Homo Sapiens
tttttccactgttatatacacaccagcagcgaattatctatctaatggttgtgattcctatggaatgcaagacccaggtgttctttttgttccaaagactttaccctccaaagcagattcagtaacagaataaaaataaatatagtcaagcaagtcagaatgttagtcgtatctttatgaacagataggtaatgaggcctcagaagggagtggactacttttaaacagcactggtgacctaatgaataataattatttacataatttctgtagtcaagttccatcagtgcttgggcgatcttcccccaaggtagtagcgagcctgccatctatcagtgttccttttggtggtgcaagacccaagcacgcttctaatctttaaacttcaaattccaaagccattatcagaccatttataaaatgactttcctgcaaacagtggaaataatactaaaaataaaaataatattcttgaaaaagcaaaagtaggtgataactcagcacccaaggtatgcaggacaaca

SEQ ID NO: 63071 - DNA, 507 bp, Homo Sapiens
gggcacgatggcgcgcctgtgcatatgattttctcagggtgatgggaatatggttggcttttgactagtgggatatattttctctttgaatgatttggcacgatatcagatgagagaagttgaatgaatgttagaagaacatagaaaaaataggtatacacgttgggtttctgaagaaatgatgtctttggagaaacaaaacttttattgatttctggaaacatttagggccaattttttatgtaagtaatttgaatttatgatgatatctctgaccactttttgatattttttctggttcaggtgagtggtgtcattgagcaaacacaaagtcgggctcatccaaggatgagattttgccagagaaaggacgagcagcaagtcagggagcttaaggtaattatgagaaagtgactatctaaaattgcttaggtagaaggagacagattggatttttgtgtgttgtattatgggatatagagggatgtgggtgtgtacttgacatgg

SEQ ID NO: 63072 - DNA, 767 bp, Homo Sapiens
tatctgcaaactatgcgatgagcagctcttccaaagccattatgacttcgtgtcttcgggctttgaagagtgtgctggtgagtgcaggcaatgtgaagagagagagaatccagaagataaagagggagaaagaggaacgaggggaagcagttgatgaaggagaaattgctgaaaatctccctgaacaagagattctgatacagagcgtctgtgagacgatggtgccaaagctggtggcaggggacatcccgctgctcttcagcctcctgtcggacgtgttccctggagtccagtatcacaggggtgagatgactgcccttcgagaggagctgaagaaagtgtgtcaggagatgtatttgacatatggagatggagaagaagttggtggaatgtgggttgaaaaggttctccagctctatcagatcacccagatcaatcatggcctgatgatggtggggccctcgggaagtgggaagagcatggcctggcgtgtcctgctgaaggcattggagagactcgagggtgtggaaggtgtggcccatatcatcgaccccaaggccatcagcaaagaccacctctacggaaccctggaccccaacaccaggaatggacagatgggctcttcacacacgtgctgagaaagatcatcgacagcgtgagaggcgagctgcagaagcgccagtggatcgtcttcgaatggcgatgtggatccagagtgggttgagaacttgaactcagtgctggatgacaataagctcctaactttg

SEQ ID NO: 63073 - DNA, 690 bp, Homo Sapiens
gtcccctgtcttgatgggctgcatagagaggtgcccagagtcctggtcaacctcgtggacttcctgaaccccactatcatgcggcaggtgttcctgggaaacccagacaagtgcccagtgcagcaggccagcgttttgtgtaactgcgttctgaccctgcgggagaactcccaagagctagccaggctggaggccttcagccgagcctaccggagcagcatgcgcgagctggtggggtcaggccgctatgacacgcaggaggacttctctgtggtgctgcagcccttcttccagaacatccagctccctgtcctggcggatgggctcccagatacgtccttctttgccccagactgcatccacccaaatcagaaattccactcccagctggccggagccctttggaccaatatgcttgaaccacttggaagcaaaacagagaccctggacctgagagcagagatgcccatcacctgtcccactcagaatgagcccttcctgagaacccctcggaatagtaactacacgtaccccatcaagccagccattgagaactggggcagtgactttctgtgtacagaagtggaaggcttccaatagtgttccaacctctgtccaccagctcccgaccagcagacatcaaagtggtggccgccctgggtgactctctgactacagcagtgggagctc

SEQ ID NO: 63074 - DNA, 400 bp, Homo Sapiens
  misc_feature (87)..(87): n is a, c, g, or t
  misc_feature (380)..(380): n is a, c, g, or t
agaatactcctttggtagatcaaagatattcatccgaaacccaagaacattattcaaattagaagacctgaggaagcaacgcctggnggacttggccactctcattcagaagatatatcgggggtggaaatgccgcacacacttcctgctaatgaaaaaaagccaaattgtgattgccgcctggtacaggagatatgcgcaacaaaagaggtaccagcagacaaagagttccgccttagtaattcagtcttatatccggggttggaaggctcgaaaaattctgcgggaactgaagcatcaagaagcgctgtaaggaagcagtcacgaccattgctgcatattggcatgggacccaggctcgaagggaattgaaacgcttnaaggaggaggctaggcgtaa

SEQ ID NO: 63075 - DNA, 455 bp, Homo Sapiens
aaactgtggaatatgcgaggtgtataaggaggaggcacatcatggacaggacccccgagaaactgaagaaggagctggaggaggagctgctcctgagcaggcgaggacctgcgcagctcatgcctggtaccacggccgcatcccccgacagggtgtctgaaaacccttgtgcagcgagatggtgacttcctagttcgtgactctctgtccagccctgggaacttttgtcctgacctgtcagtggaagaacctcgctcagcacttcaaaatcaaccggacagttctgggacttcaagcgaggcctacagccgcgtgcagtaccagttcgagatggagagcttcgactccatccccggcctggtgcgctggtacgtggggaacccgcgggcccatctcccagcagagtggcgccaatcatcttccagcccatcaacaggacgcgccatcgtcgcgtt

SEQ ID NO: 63076 - DNA, 862 bp, Homo Sapiens
  misc_feature (356)..(366): n is a, c, g, or t
  misc_feature (500)..(514): n is a, c, g, or t
  misc_feature (539)..(594): n is a, c, g, or t
  misc_feature (637)..(681): n is a, c, g, or t
  misc_feature (833)..(833): n is a, c, g, or t
ggggttcatgatgacacaggaccttgtctgaacataatgatttcaaaatttgagcttaaaaatgacactctgaaatccagtcagtgtgcctcactagacttttcgatttcaagattttctgcagaaaatgttttgaaaactttgaatacttaaaaatggcaggtgtagtattgcactttgctagttgctcagatacccttttttatttgtatagatattctgagttccttttttttctacatgttgtacgttgtcgaaagctaaaaggaaacttatccttggatcacgggaggcagatgcatttggtgagatggaaacaaggatgtgtaaaaatgagacgaccacctctcggattnnnnnnnnnnngtgccagagttctagggttctaagtgatgtccaggaatgaggaggaattatatttatggagcatatattatggaacacagtgagtatagtacctgcctttaaatgaatactgttggttttttaggacagttgcnnnnnnnnnnnnnnncttcagctgtgtgcagttgattaannnnnnnnnnnnnnnnnnnnnnnnnnnnnnnnnnnnnnnnnnnnnnnnnnnnnnnnggcagcattgctaatttttgtatagtgagacagtatctcacannnnnnnnnnnnnnnnnnnnnnnnnnnnnnnnnnnnnnnnnnnnntgaacacctgagctcaaacgatcctttcaccttatcctccagagtagctgggactacagtcgcgtgtcaacatgcctggctaattttagttttctaatttttttagagttgggatctcactatgttgcttagactggtcttgaactcctggnctcatgccatcctcttgcctcagctggta

SEQ ID NO: 63077 - DNA, 500 bp, Homo Sapiens
atccccaggtttaaacaatagcatctcctgtccccactggtttgatataaatgattctaaagtccagccaatcagggaaaaggatattgaacagcaatttcagggtaaagacagtgcctacatgttgttttatcggaaatcccagttgcagagaccccctgaagctcgagctaatccaagatatggggttccatgtcatttactgaatgaaatggatgcagctaacattgaactgcaaaccaaaagggcagaatgtgattctgcaaacaatacttttgaattgcatcttcacttgggccctcagtatcatttcttcaatggggctctgcacccagtagtctctcaaacagaaagcgtgtgggatttgacctttgataaaagaaaaactttaggagatctccggcagtcaatatttcagctgttagaattttgggaaggagacatggttcttagtgttgcaaagcttgtaccagcaggacttcccatttgccagtcacttg

SEQ ID NO: 63078 - DNA, 1806 bp, Homo Sapiens
aacttacggctaggtacgaggcctggtggttaatcggcacgaggctgagcgctgccttccgcgttccgccgcggccccacctggagcccccgccccgcgccatggccggagctcccggggcgcagcgctgacggcggcggggggagcgcgccatgcccagcaggaccggccccaagatggaagggagcggcggccgcgtccgcctcaaggcgcattacgggggggacatcttcatcaccagcgtggacgccgccacgaccttcgaggagctctgtgaggaagtgagagacatgtgtcgtctgcaccagcagcacccgctcaccctcaagtgggtggacagcgaaggtgacccttgcacggtgtcctcccagatggagctggaagaggctttccgcctggcccgtcagtgcagggatgaaggcctcatcattcatgttttcccgagcacccctgagcagcctggcctgccatgtccgggagaagacaaatctatctaccgccggggagccagaagatggaggaagctgtaccgtgccaacggccacctcttccaagccaagcgctttaacaggagagcgtactgcggtcagtgcagcgagaggatatggggcctcgcgaggcaaggctacaggtgcatcaactgcaaactgctggtccataagcgctgccagcggcctcgtcccgctgacctgcagggagcatatggattctgtcatgccttcccaagagcctccagtagacgacaagaacgaggacgccgaccttccttccgatggagacagatggaattgcttacatttcctcatccctggaagcatgacagcattaaagacgactcgtgaggaccttaagccagttatcgatgggatggatggaatcaaaatctctcaggggcttgggctgcaggactttgacctaatcagagtcatcggtgcgctgggagctacgccaaggttctcctggtgcggttgaagaagaatgaccaaatttacgccatgaaagtggtgacggaaagatgctggtgcatgatgacgaggatatcgactgggtacagacatgagaagcacgtgtttgacgcaggcatccagcaaccccttcctggtctggattacactcctgcttccagacgacaagtcggatagtacctggtcattgagtacgtcaacggcggggacctgatgttccacatgcagaggcagaggaagctccctgagagagcacgccaggtcactacagaggacgagatactgcatcgccctcaaacttcctgcacgagagggggatcatctacagggacctgaagctggacaacgtcctcctggatgcggacgggcacatcaatgctcacagactacggcatgtgcacgggaaggctgggccctggtgacacaacgagcactttctgcggaacccgaattcacatcgtccccgaagatcctgacgaggagaggagaccgggacaagccgtgagaccatgagatgaacagcaggaagtcctcatggcgacatgactggccggaagctcccggaacgacacaatcacgacaaaccggaaatgaaacaaaggacatccataacaagatatccgggaaaagcccatacggaacacacagagaacaagtgcacggagaaagacccccagatccacaagggacatcaaaaagagcacacagaaggccacggcgaggggacacaaaggggaaaacggaaaagaaccaacggcattgcaacacataggctctgcgcacaaacaagacaaccgatcagcagaacaaaaagggggacacacaccaacgagagaataca

SEQ ID NO: 63079 - DNA, 324 bp, Homo Sapiens
tatcttccaggtgatccggtagacagagcaggagatcactcggctcaaggccaagcctgcaggagatggcgggcaagaggagcggtgtggagaaggaggtggagaagctgctcgccgaccgtggaggtccttgcgggcccatgaagcccacggtggagtacaaggaggtgacccaggagttggtgaggcatgagaggagccccgagttgctgcgtgagatcgaccgcctgaaggttcagttcaacgagtctcgtcaacagccacgggcgcctcccaggagcaggctcatccgcctgcagggtgagcggcgaggagtggaggccg

SEQ ID NO: 63080 - DNA, 461 bp, Homo Sapiens
tagggtcgatgtgatttggcagcgaggtttgctgcggaagggctacgggatatgccatgggactgctggcaacggctattccttcctgtccctttaccgtctcacgcaggataagaagtacctctaccgagcttgcaagtttgcagagtggtgtctagattacggagcacacgggtgccgcattcctgacagaccctattcgctctttgaaggcatggctggcgctattcactttctctctgatgtcctgggaccagagacatcacggtttccagcatttgaacttgactcttcgaagagggattaaaaggtgcaaaaagacaactaaaatacccatttggaccaaaagccgccagattgcttagtgcctgacacagaaacaactgggaatcctgaaagagaagcagacaccgtcacaggcccctctggttagactagcatgagtgatcgaatcctccaca

SEQ ID NO: 63081 - DNA, 865 bp, Homo Sapiens
cgcgactctacaggatcttcggaaatacaccagcgaacaaagggatcattctgctgtgtacctgtccctattctagaccctggtgcgcagcagtgggaccattctgaccacaatgcctgtaatgatggggcaagagaaagtgcccattaagcaggtacctgggggagtcaagcagcttgagccccccaaagaaggagaaaggcggacaacccataatatcattgagaaacgatatcgctcctccatcaatgacaaaatcatcgaattgaaagacctggtcatggggacagacgccaaggtgggtgccaagcaaaattgtgttttatgttccaccatctcccctctacctgtttttgcctcaggagcctagagaagtcccaggctcaaggtaagtgaatacaagaccgagttagaggtgcttttttattaaagcatcttggtgtcatgtcaagattataaaatattaaaaaacataagggactggtgagggttgataaggcagtgacccgctgagacctttgactcctttggctatgctctgcagtgatggggactccactgtcagaggcagagaaagatgcctgccactcagtagttccagatacaggactgtgtgtaccttggagtcagctgatggcatagttttagttgtgtttaggggtgaccttttaaggcaaagaaagaaaaaagaggttgagtctttgaccagcaacacatagaggaaactgatgttccaaatgtttctggtgtttcagtgtatgtgtcttctagaaagtaggagattttatttttaaaacctatctatgtttaaaccctattttgaaagaaaatttcattttcctgccaaccatcgtcggtaccggct

SEQ ID NO: 63082 - DNA, 940 bp, Homo Sapiens
gtcagcaacggagtccagatctatcagtttccttacagatgatgagtcggtggcagagatcaatggaaccatgaacgcccacctgccgtttgctgtcattggcagcacagaagaactgaagataggcaacaagatgatgagggcgcggcagtatccttggggcactgtgcaggttgaaaacgaggcccactgcgactttgtgaagctgcgggagatgctgattcgggtcaacatggaggatctgcgggagcagacccacacccggcactatgagctgtatcgccgctgtaagctggaggagatgggcttcaaggacaccgaccctgacagcaaacccttcagtttacaggagacatatgaggccaaaaggaacgagttcctaggggaactccagaaaaaagaagaggagatgagacagatgttcgtccagcgagtcaaagagaaagaagcggagctcaaagaggcagagaaagagctgcacgagaagtttgaccgtctgaagaaactgcaccaggacgagaagaagaaactggaggataagaagaaatccctggatgatgaagtgaatgctttcaagcaaagaaagacggcggctgagctgctccagtcccagggctcccaggctggaggctcacagactctgaagagagacaaagagaagaaaaattaactctgctgtttgctgcatgctgcatgagacccagggtcctgtttgtgcttcctgtagacacccttttcctgcgcaacagagctgggcctccctttctctaatttcccccttaacatgcctggggggcatacaatccaacccgtgccctctcctctcttcctgccaaggtttatagaaacctgagaatctgagggtgatgtctggcccgctgggtcaagaagccaacaagtcatgttggctcggcagaatgcatccctggcattcccaggt

SEQ ID NO: 63083 - DNA, 1620 bp, Homo Sapiens
gggagggactgccacctccactgtgtgcacactcagctacgggacacaaacaaagaacagccaccatgcagctcttcctcctcttgtgcctggtgcttctctagccctcagggggcctcccttcaccgccaccacccccgggagatgaagaagagagtcgaggacctccatgtaggtgccacggtggcccccagcagcagaagggactttacctttgacctctacagggccttggcttccgctgcccccagccagagcatcttcttctcccctgtgagcatctccatgagcctggccatgctctccctgggggctgggtccagcacaaagatgcagatcctggagggcctgggcctcaacctccagaaaagctcagagaaggagctgcacagaggctttcagcagctccttcaggaactcaaccagcccagagatggcttccagctgagcctcggcaatgcccttttcaccgacctggtggtagacctgcaggacaccttcgtaagtgccatgaagacgctgtacctggcagacactttccctaccaactttagggactctgcaggggccatgaagcagatcaatgattatgtggcaaagcaaacgaagggcaagattgtggacttgcttaagaccctcgatagcaatgcggtcgtgatcatgggtgaattacatcttctttaaagctaagtggggagacaagcttcaaccacaaaggcaccccaagagcaagacttctacgtgacctccggagactgtggtgcgggtacccatgatgagccgcgagatcagtatcactacctcctggaccggaacctctcctgcagggtggtgggggtcccctaccagggcaatgccacgggtttgttcattctccccagtgagggaaagatgcagcaggtggagaatggactgagtgagaaaacgctgaggaagtggcttaagatgttcaaaaagaggcagctcgagctttaccttcccaaattctccattgagggctcctatcagctggagaaagtcctccccagtctggggatcagtaacgtcttcacctcccatgctgatctgtccggcatcagcaaccactcaaatatccaggtgtctgagatggtgcacaaagctgtggtggaggtggacgagtcgggaaccagagcagcggcagccacggggacaatattcactttcaggtcggcccgcctgaactctcagaggctagtgttcaacaggccctttctgatgttcattgtggctaacaacatcctcttccttggcaaagtgaaccgcccctgaggtggggcttctcctgaaatctacaggccctcaggtgggagatgaaaggggctaagctatggcccctctgaatgctggtagctagtgacttacacagggtttactggactaaggaggcctttccccataatacttcccccatgatggattggcttcaacccccccggatgccaacctaaaggggggcccttggggaaaaagagggaacgaaaatttgcagttctttgtccggtccactacgttgctttaattggacacaatttaaatacttgcgacagccccgtaaagatggatctgcgatagccaccctgggctctaagcgcgctccaa

SEQ ID NO: 63084 - DNA, 268 bp, Homo Sapiens
caagtgaaaaagaaaacagatgatgatgcagaagccatttgttctatgtgcaatgctttaactactgcccagattgtgaaagtgttgaatttgtatactccagttaatgagtttgaagaaagagtctctgtgtcgttcattcgtactatacagatgcgtttacgagacaggaaagactctccccagctgctcatggatgctaaacacatctttcctgtcacctttcctttcaacccatcttccctcgcacttgcaaccatctcggtac

SEQ ID NO: 63085 - DNA, 1055 bp, Homo Sapiens
ggaatcgtcatcttcttccctcggcccaactagtagaccacgaccagaagacacatcctaacctacacctaccgtagtgtcacacccggcacagcgcgaccaggtccaccaaatgcgcctgcgcgaaccggccgctctcgcgacatcacaggaaggctgagagaaagggcaggtccccgctgcgtggggctgggcttaaaggctcgtcgcgcctgcgcaaaggacctgacgacgtgctgcgtcgttacttttgaaacgcttggcggggaagtgctgttggagccgctgtggttgctgtccgcggagtggaagcgcgtgcttttgtttgtgtccctggccatggcgctgcagctctcccgggagcagggaatcaccctgcgcgggagcgccgcaaatcgtggccgagttcttctcattcggcatcaacagcattttatatcagcgtggcatatatccatctgaaacctttactcgagtgcagaaatacggactcaccttgcttgtaactactgatcttgagctcataaaatacctaaataatgtggtggaacaactgaaagattggttatacaagtgttcagttcagaaactggttgtagttatctcaaatattgaaagtggtgaggtcctggaaagatggcagtttgatattgagtgtgacaagactgcaaaagatgacagtgcacccagagaaaagtctcagaaagctatccaggatgaaatccgttcagtgatcagacagatcacagctacggtgacatttctgccactgttggaagtttcttgttcatttgatctgctgatttatacagacaaagatttggttgtacctgaaaaatgggaagagtcgggaccaccgtttattaccaatttctgaggaagtccgcccttcgttcatttactactaccatccaccaaagtaaatagccatggtgggccctacaaaattccctgttcaatgaactgaaggaatgcacatggagggaaaattaatggtatttggtaaatttctggaaatgggggggttttccctggaaaatccaggtccatcctaa

SEQ ID NO: 63086 - DNA, 1092 bp, Homo Sapiens
ggggccctctgctctttatatgtttattctattctccatttttccaccccgtccttaccctaggcctaaacacaggtacagatatgtgcatgctcagggcagctcctaggcctggactgagctctcaggggggaattagataaatattccaacatcctcatgcctggcccatttagtttcatcctttagttacccaggccagtagctttgggttatcccttcctgtagctccaaacccagcacttggagcagcaaaatagggcactgacaggagatgaaactctctcctatctcagaatttgccaacttctgggctgggctcctaggaggtagttttcttgaaggggactgcatcctagttgacctgaattttccagaccaggagggactgctgtgctctcccttctcgccatcatactgtttggctagattcattcagcagtagaagctgtttgatctgttgaccccagcatactgctgtttcttcaccagcttcattgtgtcacagtagcttcctttgggaggatgatgtgatagaacactcagagagagggagggagaagagagatagtgggtatgcttctctagctccccatcttccaggtccacctcttgacttcctgttcccctaaacctgagcacatcacgccaggccctctttgctgccaggacagcatcagctcactcctcagcaataatctagggtatgtgggaaggtcagggctgtggtaaggaatagaatcaaagaggggagtgatacggggtgggggcacttggccgcctgctaaacttggacattaattttatatcatgacccccttttaagccagtgagctgggcttcagtttttcccaggccatgcacatttaatttatttcagagaaactctaattgtattttcactgcagtatcttgtattttttatttgtgatttcaagaaatgttgaagagaaaatacacagacacaataatggctaaacattgtttctttcattccttgttctagaagctaaccactctaaaattgtttggtaatgtcacttagtgtaatttattgtaacatattcttttaaataaattgatttattgatc

SEQ ID NO: 63087 - DNA, 460 bp, Homo Sapiens
gtctttaaagaagatccgagattcttctgcctatgcctgtgcatttttctccaagagccattgaatatgttaagcaaaatcctttatatgatacagaaagatgcaaggtattccagtgtgatctgactaaagatgatcttctggatcatgtaccgccagagtctgtggatgttgttatgttgatatttgtgctgtcagctgttcatcctgataagatgcaccttgtcttacaaaacatttacaaggtattaaaaccaggcaaaagtgtcttgtttcgtgactacggactgtatgatcatgccatgcttaggtttaaagccagcagcaaacttggagaaaacttttatgttagacaagatgggaccagatcatatttttttactgatgacttcctggctcagctctttatggacacaggttatgaagaagtggtaaacgagtatgtgttttctaagagacg

SEQ ID NO: 63088 - DNA, 425 bp, Homo Sapiens
aatgtatatgcaacatttattctattttaattatttgacaggtaactgcagtgttaaattgtaaatgtgttttctttatgttaccaaaacagcaatttgaaattagaactagtggttttagagaactcaggtattctttcctgacattgttttcagaataaagaatatttttcataatattttaagatacatactatctaaaagtagaattttgttcagcattgacttttataattcccatcctaaaaattcttaatattttcataaaatttgtatttttaaatgaaaattctaaatgttgtattttatcagtaacattttctaagtgaagattaatttactgaggatgatacattatagtattgtattattctctgtagtaagattagtaataagtgaaaataaatgatttaaattcaaaaaaa

SEQ ID NO: 63089 - DNA, 880 bp, Homo Sapiens
  misc_feature (184)..(208): n is a, c, g, or t
  misc_feature (529)..(529): n is a, c, g, or t
tcccctcattttagtttaatataattgccaataaatgtacatattgttgtttgtttcataaagcatatcactttaaaatggtttttactcctgtgattatgttggaatatttggaattttaaaggagtaaagactgtccagcatttggttttataatgtttgtcaccagatttttattaatgtnnnnnnnnnnnnnnnnnnnnnnnnntagttggactttggcagcttttaaggaaagttggaggtgttttaggattgctatcaattttcagcattgtgctatttggaaataagtgttttgcttttgtctgatggtctgggctcatttttatgtttattttagaaaactgttgcatcaatatattatgtttcttggcattgttcagcataggtaatgtgtgcactttatgtgtacacataatcatatttaagttttttgcataaaataaatgcttctagatgtcatggcagtctttttaatctttttatcatatgctttcttgtgaattttttcatgttaaagagctanagtcataacatgattacagtcaactctccattatctatataaaatagtgactaagcctcaggtttttaattttgtgataacaaaataacgaaaggcatgtaagacctgaattctggaggaacatgaaaatttgcctttttctcatgtccagaagttctattcctggcccccactgtcccactggtagggtcattccgcaaaagcccctaaccaaaatgggggctccctccccatttcccttaaaccgtttcctagccatgggggcaaaaaggaaaaaaaccatttgggggggtaaaaaccttccgcccttggaaaaggggctggaaaaggggaaacatggggggaatgggt

SEQ ID NO: 63090 - DNA, 566 bp, Homo Sapiens
ccagccagcagccgcttccgacagaactgaatgtaacttcaccgagtaaagaggagtgtgggccatgcacagacacagctcatgtctcattaatcacaccaacctaaagatcctgtggtacagattcacagtctgagaatgaggcttcaccagtaaaacggccacgactacttgagaatacggaacggtccgaggaaaccagtcgatctaaacagaagagtcgacgtcggtgcttccagtgccaaaccaaactggagctggtgcagcaggaattgggatcgtgtcgctgcggttatgtgttctgtatgttacatcgcctccccgagcagcacgactgcacattcgaccacatgggccgtggccgggaggaagccatcatgaaaatggtgaagctggaccggaaattggggcgctcctgccagcgcatcggggaggggtgctcctgaaggccaggcatggccaccacgtgacgctgttcttagttcactaatgttagccttatttaggacaaagtcagccagacaccttgtactgggcacgcgtcagacaagtagagacgaggaccg

SEQ ID NO: 63091 - DNA, 1140 bp, Homo Sapiens
  misc_feature (1081)..(1081): n is a, c, g, or t
gccgggggtgtacggccgaggccggcatggaaaactgggtaaatgcagttcactggcaacctgtgttttacaaagatggtgtcctacagcagccaatgagattattatctgcttccatggataaaaccatgattctctgggctccagatgaagagtcaggagttggctagaacaggttcgagtaggtgaagtaggtgggaatacttgggattttatgattgccagttcaatgaagatggctccatgatcatgctcatgctttccacggagcgtgcacctttggaaacagaatacagttaacccaagagagtggactccagagatgtcatttcaggacactttgatggtgtccaagacctagtctgggatccagaaggagaatttattatcactgtggtactgatcagacaactagactttttgctccatggaagagaaaagaccaatcacaggtgacttggcatgaaattgcaaggcctcagatacatgggtatgacctgaaatgtttggcaatgattaatcggtttcagtttgtatctggagcagatgaaaaagttcttcgggttttttctgcacctcggaattttgtggaaaatttttgtgccattacaggacaatcactgaatcatgtgctctgtaatcaagatagtgatcttccagaaggagccactgtccctgccattgggattatccaaataaaagctgtctttcagggagatatagcttctcagccttctgatgaagaggagctgttaactagtactggttttgagtatcagcaggtggcctttcagccctccatacttactgagcctcccactgaggatcatcttctgcagaatactttgtggcctgaagttcaaaaactatatgggcacggttatgaaatattttgtgttacttgtaacagttcaaagactctgcttgcctcagcttgtaaggcagctaagaaagagcatgcagctatcattctttggaacactacatcttggaaacaggtgcagaatttagttttccacagtttgacagtcacgcagatggccttctcccctaatgagaagttcttactagctgttttccngagatcgaaacctgggtcatttgtggaaaaaagccaggatacaaatctccacctgaagc

SEQ ID NO: 63092 - DNA, 765 bp, Homo Sapiens
  misc_feature (613)..(624): n is a, c, g, or t
  misc_feature (718)..(718): n is a, c, g, or t
ggggattggggtttatgaaatcagcgaatacctcatttcaatctgttgctgcttttctccctcttgtcacttctcctttcactactttcagctgctctaccagaaggtagaggggagtaaagggtcaaacccctatataattagctgttttaaacaactctaggagagcagattaagtagcttagtaagttgaaactattaatttttctaaagaatttgatttgaattccttgagaattgtaattatccacacttcctccagctataattagcagaattaaaaatgattgtactgtacaatgagttgttgaaattgtaagccttagtaaccatctttagctttattgtagtcatgtttagaaaaaattatttttacatatgcctttatttttatgcccactttttgtggataagattctttagataaaatctaaagaatttgtaagtgactttctccaggtcatgaagattcaatgggtagaattgaatcagaattgaaatgttccagattcatattcttgtgtgtgtttgataaaattcgtgggctttcaaagtaactgaacacttcctttgggcccttggagggaaaatccatatttttactaattacacnnnnnnnnnnnnagacatctggcagttctttgaacttaacatattctcatggccatagttccaaattaaagcccgacgcagttgctaaaaaatcttgctgcactgntggaatactaataatggcaccttttattgggatgttttttggcattt

SEQ ID NO: 63093 - DNA, 807 bp, Homo Sapiens
ggtactatgtcaagttattgcttttggtaaattgtctgacccagttattaatgaaagaatatggatttaaaaatttttaaactaaataatttgtgctgtcacagaaatggtattgttgctcttgtttactgggtataatttcccaatgcattgatgtgaagggatagaaaatctaaactaatttagttatccattggggggtttatttactgtgatgaagatgagacagatgccatcagagctttgtgaatcagctggggtgttttcactgataaacaacacatagcaggtgtgcattcattacaaatatatgtatctgccaaggtggagccactttaaagagtgagttttgtcttgtatctaaagtggatacaagcgtatgtttaaactgcaagatttttacttgctagagaaatctgttttaatatagtgggtttgggctctgattatttataggttttataaattttagaatcaatttctctttaaggtggctcagatttttcaactcttgtgcacataaaattgagttgaagttcattgtgcctttttttctttatccaaattttgagttaaagcttcatatggtaactgcatcctgttcggacactatagtctaaatttttgaaactgtgtggtgttccgctaaaagtaggaattacaacgtaaaagctaattaaaggtcacaaacttcggtgaaaccctttaaaagtccaaatctttcttgatattggggaaccgtaccccctttccagtttaaggtttccttccgggacctttcccttacttaaactggacagtttaccc

SEQ ID NO: 63094 - DNA, 435 bp, Homo Sapiens
ctagaggtgccgccaccaccacaaacactttttattcaggagatactttttgagaatctctgctctgttcctaggttcagtgctgggtcctgggaataccgcaggacagacctcagcttatctcttcatagaaattatacaaagagaattggggagacagctaagaagaaaccaaagaaataaagcagttacaaattgtgataagtgctttgaaggaaagaaggggtctgagacaacaacagggaaggggcctctcttgaaacagtagttgggaaggaggcagacatgcaccagtgatgtggtgacaggtgctctgaaggaggtcaccaggacctgacctctttgaaggatcagaaaatacttccctgaaggactgacatttgagcctagacctgaagggtgagccattcactcgcaagggatcctctagatcga

SEQ ID NO: 63095 - DNA, 850 bp, Homo Sapiens
cttggccgtaatcgacatgaacaagcctctttcccactacgtggatctcctcctcgcacaacactgtaccgtgaccggggaccagttctccagtgagtcctccttggaagcctatgctcgctgcctgcggatgggctgtcgctgcattgagttggactgctgggacggcccggatgggatgccagttatttaccatgggcacacccttaccaccaagatcaagttctcagatgtcctgcacaccatcaaggagcatgcctttgtggcctcagagtacccagtcatcctgtccattgaggaccactgcagcattgcccagcagagaaacatggcccaatacttcaagaaggtgctgggggacacactcctcaccaagcccgtggagatctctgccgacgggctcccctcacccaaccagcttaagaggaagatcctcatcaagcacaagaagctggctgagggcagtgcctacgaggaggtgcctacatccatgatgtactctgagaacgacatcagcaactctatcaagaatggcatcctctacctggaggaccctgtgaaccacgaatggtatccccactactttgttctgaccagcagcaagatctactactctgaggagaccagcagtgaccagggcaacgaggatgaggaggagcccaaggaggtcagcagcagcacagagctgcactccaatgagaagtggttccatgggaagctaggggcagggcgtgacgggcgtcacatcgctgagcgcctgcttactgagtactgcatcgagaccggagcccctgacggctccttcctcgtgcgagagagtgagaccttcgtgggcgactacacgctctct

SEQ ID NO: 63096 - DNA, 529 bp, Homo Sapiens
gactctatatgatcccctgccttcatgtcctgcttacatttgaggcactaaagcacctagcatctctcctgctccataacaaatttgccacagaatttgttgcgcatggtggagtacagaaattactggaaatacctcgtccttctatggctgcaactggtgtgtctatgtgtttgtattacctatcctacaatcaggatgccatggaaagagtttgcatgcatccccacaatgttctgtctgatgtggtgaactataccctgtggttaatggagtgttctcatgcttcaggatgctgccatgctaccatgtttttttcaatttgcttctcatttcgggccgtcttggagctctttgaccgctatgatggtcttcgtcgtctggtgaacttgatcagtactttggagattctaaatttggaagatcagggtgcacttctgagtgatgatgaaatatttgctagccgccaaactgggaaacatacctgcatggccttgcgcaaatactttgaggctcacctggccattaa

SEQ ID NO: 63097 - DNA, 646 bp, Homo Sapiens
tcccatttgctcattttttggatactagtataactatcactctaaaccagttagtacttaaatcaagcagatatgggagatggtgaattaccatctacagtgttgtcatatatgtcacatactgagcattatcagctagtagaatctagttaattgttctatgtgtgatgtatgcagagttcccattttgaatgtgtttttactatgcttaaataaatgactgatgtcagcaaccccaaaatgatacatctgatgtaagagcccctgttccccaataataacatctaaactatagacattggaatgaacaggtgcccctaagtttcctccctccagggtttcttggccggtctctgaggactacacatccctactcccgtctttcctcatcttcaggcgcagtaacagtatctccaagtcccctggccccagctccccaaaggagcccctgctgttcagccgtgacatcagccgctcagaatcccttcgttgttccagcagctattcacagcagatcttccggccctgtgacctaatccatggggaggtcctggggaagggcttctttgggcaggctatcaaggtgacacacaaagccacgggcaaagtgatggtcatgaaagagttaattcgatgtgatgaggag

SEQ ID NO: 63098 - DNA, 1154 bp, Homo Sapiens
  misc_feature (694)..(694): n is a, c, g, or t
  misc_feature (708)..(708): n is a, c, g, or t
  misc_feature (868)..(868): n is a, c, g, or t
  misc_feature (1046)..(1046): n is a, c, g, or t
gggacgggcgcgcgcagctgttgacgcgcttcttagctggtgcgcgccggagcccaaattccaagtggaaactgcaggcgcacgagggaggaacgcgtggagcatgaaaaggcagggggcctcctctgagcgaaaacgagcgcggataccgtccgggaaggccggagcagcaaatggatttctcatggaagtttgtgttgattcagtggaatcagctgtgaatgcagaaagaggaggtgctgatcggattgaattatgttctggtttatcagaggggggaactacacccagcatgggtgtccttcaagtagtgaagcagagtgttcagatcccagtttttgtgatgattcggccacggggaggtgattttttgtattcagatcgtgaaattgaggtgatgaaggctgacattcgtcttgccaagctttatggtgctgatggtttggtttttggggcattgactgaagatggacacattgacaaagagctgtgtatgtcccttatggctatttgccgccctctgccagtcactttccaccgagcctttgacatggttcatgatccaatggcagctctggagaccttcttaaccttgggatttgaacgcgtgttgaccagtggatgtgacagttcagcattagaagggctacccctaataaagcgactcattgagcaggcaaaaaggcaggattgntggtaatgccaggnaggtggtataacagacagaaatctacaagggatcccttgagggttcaggtgctacagaaattccactgttctgctcggtctactagagactcgggaatgaagtttcgaaattcatctgttgccatgggagcctcactttcttgctcagaatattccctanaggtaacagatgtgaccaaagtaaggactttgaatgctatcgcaaagaacatcctggtgtagccagacctctctgagagacatggatatcacagggatgaaggtagaactataatctgcaattctctatgacacagctttaaccttcttctctggccaggacagtcgcaatcctttgnttttaattttcacatgggccatgggagaatgtggcccaaagaaagaaaaagaaatttggaaacaggagatacaggtcactttcctttttgcttagtccttaaccagtg

SEQ ID NO: 63099 - DNA, 1122 bp, Homo Sapiens
  misc_feature (324)..(359): n is a, c, g, or t
ctggggaggaggcgtgcctggcatctcgacaccatggtggcccagctcgtgcagcggctccagagatactctctaagtggtggaggaacttcatcccactgaaattccttggcatttggggtttgtttttccttttttccttcttcatcctcctccttttttaaaagtcaacgagagccttcgctgactccaccgaagaggtgcgccactgggagccaccccagcgccaggcgcccgtccagggacacacacagtcttcactgtgctgcagccagatgaagtctctcagatgggtggggagggtcagctccttccagcgatcannnnnnnnnnnnnnnnnnnnnnnnnnnnnnnnnnnnaccatagtgcacatattccaggaaagtgtctttaaaaacaaaaacaaaccctgaaatgtatatttgggattatgataaggcaactaaagacatgaaacctcaggtatcctgctttaagttgataactccctctgggagctggagaatcgctctggtggatgggtgtacagatttgtatataatgtcatttttacggaaaccctttcggcgtgcataaggaatcactgtgtacaaactggccaagtgcttctgtagataacgtcagtggagtaaatattcgacaggccataacttgagtctattgccttgcctttattacatgtacattttgaattctgtgaccagtgatttgggttttattttgtatttgcagggtttgtcattaataattaatgcccctctcttacagaacactcctatttgtacctcaacaaatgcaaattttccccgtttgccctacgccccttttggtacacctagaggttgatttcctttttcatcgatggtactatttcttagtgttttaaattggaacatatcttgcctcatgaagctttaaattataattttcagtttctccccatgaagcgctctcgtctgacatttgtttggaatcgtgccactgctggtctgcgccagatgtaccgtcctttccaatacgattttctgttgcaccttgtagtggattctgcatatcatctttcccacctaaaaatgtctgaatgcttacacaaataaattttataacacgcttatatgactt

SEQ ID NO: 63100 - DNA, 824 bp, Homo Sapiens
gggaaggagaaaaagcttaaattccatcttgagctcttggattgtgataatacaatgatttcattaacttttcatttctgtatacctgttcatttggaatttaatgcttgacttctttgttcattttggatctaaacttctcttttcttccttccccattcacatctattagaagactgcatcaccatttctttggcccccttactctgttgtcctttcccttttctttcagtttttttaatcgcatgtctagtatattaagtctccatagccctcctgatgcagtagacagtgctatgctgtggatataataccaaccagaaattggcatttataaacctgttaagagactttaagcatgcttcaagaggcagttgacccactggaatttctataaggctggtacccttcccagagttacagaatcttaggtgccgtctctagtctgtgagggaggaactcccagcgtccccattgcccacaaatggaatcctcactgtattcactaggagattagaaattaaggtttcttcactacttctatggtagggttgtctgaaattccctttcaggctgtgggtactggtcttgggttctagtcataaggggttcccttataaggagcaggccggagggggagtacacttttcatggccatttaattttggatcctgcccctttccaggcggcttcttttcaaaagatatcttcaaaagaatagaaacctcctgggcctggggcacaggtgggctcccacccccttttgggagaggcccaagcgggggaggtggccaaaatcaaccctgtaagggcccaggggaatt

SEQ ID NO: 63101 - DNA, 924 bp, Homo Sapiens
caaggccagccaggtcctttgcctccaacccactccgcgcctacctcccgcctggggacacccctaggcccaggagatcctactctcccccgagcaccgacgttccaactcgtctgcgcccccgactgctgtccggctcctgtgccaaggggcgcgcgcatcttcccggggccagcaacgctcccaacttctcgactcgccctcctcctccccagagcgagagtggggcgggctgagcccggatccggggtgcactcgagcgttcccagcgctcggcattcaccccgcctcagagccgactttcgaagggggattgagcctcggaggtccaggcgtcttactccaaagctcaagtcggcccccgtcttttctttccacacccctgtgcccgtcgcatgctggccgggtgagcggccgggccgaggaattcgggtgcccggggccgcgtcgccccgtcgggtactgagctgagcgcaccatggtcggctgctgctgcctgtccgcggaggagaaggagtcgcagcgcatcagcgcggagatcgagcgacagcttcgtcgggacaagaaggacgcgcgccgtgagcttaagctgctgctgctgggaactggtgaaagtgggaaaagcacctttatcaagcagatgagaattatccatgggtctggttacagcgacgaagacagaaaggggttcacgaagctggtttaccaaaacatattcaccgccatgcaagccatgatcagagcgatggaacacgctaaggatacagtatgttgtgtgaaacagaaatagggaaaatgcccagataatccgagaagtggaagtggacaaggtctccatgctcttccaggagcaggtggaggccatcaaccaggtctggcaagaaccaggctccaggaatgttaccaacggaggagggagtacca

SEQ ID NO: 63102 - DNA, 638 bp, Homo Sapiens
tgacttcaaactgaacctgccagttggattaataccttgaagtgactgcctgcataaccacattataccaagattcccagccttcctcaggtattgatggatgctgcgccaaaacatcagttgctccattggatcgagtaaaggttttatatacaagctcacaatcaccattacaagcatttaggagtagttttctgcattgcgtgctgttcctcaagaagaaggattccttggattgtataaaggaaatggtgcaatgatgattcgaatctttccctatggtgcaatccagtttataggcatattgagcattataaaacgttaattactacgaagctgggaatttcaggtacatgtgcacagattaatggctggatccatggcaggtatgacagcagttatactagtacttaccctcttgacatggttagggtccgcctagcattccaggtgaaaggtgaacacagctatacaggaattattcatgctattcaaaacaatttatgcaaaggaaggtggtaacttctggattctacagaggtcttgatgcctactatttcaggaatggctccatatgcaggtgtaccatcttttactacttggcaccaatcacctaatcgaattcctgcagccggggg

SEQ ID NO: 63103 - DNA, 1063 bp, Homo Sapiens
tagcccaaggataaccatatacggtcctaaggtagcgaggactgggtggcgaatacggcacgaggcgcgaatgaagtttgcgttttcctctgttcttgagcccagcttcttctcgtctcccaccccagcttcccggcattggaagaagggaccgtcctcttccttgtcttggccacccaaatcctggtatcgaaagggttgaacggaccggaagtgtgcagcagcgacgggtccccagctaatcgacgccggaagtagcaattactagacaagcattccgccgccggcttcgctatggcggcaattcccccagattcctggcagccacccaacgtttacttggagaccagcatgggaatcattgtgctggagctgtactggaagcatgctccaaagacctgtaagaactttgctgagttggctcgtcgaggttactacaatggcacaaaattccacagaattatcaaagacttcatgatccaaggaggtgacccaacagggacaggtcgaggtggtgcatctatctatggcaaacagtttgaagatgaacttcatccagacttgaaattcacgggggctggaattctcgcaatggccaatgcggggccagataccaatggcagccagttctttgtgaccctcgcccccacccagtggcttgacggcaaacacaccatttttggccgagtgtgtcagggcataggaatggtgaatcgcgtgggaatggtagaaacaaactcccaggaccgccctgtggacgacgtgaagatcattaaggcatacccttctgggtagacttgctaccctcttgagcagctcttctgagatggccccagtgaaccagcttctagatgacctagaatggcatgtaatgctaaatttcattttggctttgcaagtcatgaagcttaggaggcctggcatcttgggtgagttagagatggaagtacattttcataggatggcttctttcctcttcccccagggccttggttggccaaacattttgcccaaatgcccctggtttatcaataggtggactactttactacccctggaacca

SEQ ID NO: 63104 - DNA, 1260 bp, Homo Sapiens
gggggactcggcttgttgtgttgctggctgagtgccggagacggtcctgctgctgccgcagtcctgccagctgtccgacaatgtcgtcccacctagtcgagccgccgccgcccctgcacaacaacaacaacaactgcgaggaaaatgagcagtctctgcccccgccggccggcctcaacagttcctgggtggagctacccatgaacagcagcaatggcaatgataatggcaatgggaaaaatggggggctggaacacgtaccatcctcatcctccatccacaatggagacatggagaagattcttttggatgcacaacatgaatcaggacagagtagttccagaggcagttctcactgtgacagcccttcgccacaagaagatgggcagatcatgtttgatgtggaaatgcacaccagcagggaccatagctctcagtcagaagaagaagttgtagaaggagagaaggaagtcgaggctttgaagaaaagtgcggactgggtatcagactggtccagtagacccgaaaacattccacccaaggagttccacttcagacaccctaaacgttctgtgtctttaagcatgaggaaaagtggagccatgaagaaagggggtattttctccgcagaatttctgaaggtgttcattccatctctcttcctttctcatgttttggctttggggctaggcatctatattggaaagcgactgagcacaccctctgccagcacctactgagggaaaggaaaagcccctggaaatgcgtgtgacctgtgaagtggtgtattgtcacagtagcttatttgaacttgagaccattgtaagcatgacccaacctaccaccctgtttttacatatccaattccagtaactctcaaattcaatattttattcaaactctgttgaggcattttactaaccttataccctttttggcctgaagacattttagaatttcctaacagagtttactgttgtttagaaatttgcaagggcttcttttccgcaaatgccaccagcagattataattttgtcagcaatgctattatctctaattagtgccaccagactagacctgtatcattcatggtataaattttactcttgcaacataactaccatctctctcttaaaacgagatcaggttagcaaatgatgtaaaagaagctttattgtctagttgttttttttcccccaagacaaaggcaagtttccctaagtttgagttgatagttattaaaaaagaaaaccaaaacc

SEQ ID NO: 63105 - DNA, 1186 bp, Homo Sapiens
  misc_feature (581)..(581): n is a, c, g, or t
  misc_feature (916)..(1026): n is a, c, g, or t
  misc_feature (1031)..(1048): n is a, c, g, or t
ggggtggccggctgggatcagcctttaagatggcgtctcctcaggggggccagattgcgatcgcgatgaggcttcggaaccagctccagtcagtgtacaagatggacccgctacggaacgaggaggaggttcgagtgaagatcaaagacttgaatgaacacattgtttgctgcctatgcgccggctacttcgtggatgccaccaccatcacagagtgtcttcatactttctgcaagagttgtattgtgaagtacctccaaactagcaagtactgccccatgtgcaacattaagatccacgagacacagccactgctcaacctcaaactggaccgggtcatgcaggacatcgtgtataagctggtgcctggcttgcaagacagtgaagagaaacggattcgggaattctaccagtcccgaggtttggaccgggtcacccagcccactggggaagagccagcactgagcaacctcggcctccccttcagcagctttgaccactctaaagcccactactatcgctatgatgagcagttgaacctgtgcctggagcggctgagttctggcaaagacaagaataanagcgtcctgcagaacaagtatgtccgatgttctgttagagctgaggtacgccatctccggagggtcctgtgtcaccgccttgatgcctaacccctcagcatgtgcagcttcctttttgacaatggaagttctccctggatcacatgaccatggaagcagatatgggctctcccgctggttcggcaagccatcccctttgcttttacaatacagtgtgaaagagaagaggaggtaggggccaagcccccaccccatcccactccccttccctccccagatatttatgtgaaatgaactgcagctttattttttgaaataaaaacttttaaaaagcnnnnnnnnnnnnnnnnnnnnnnnnnnnnnnnnnnnnnnnnnnnnnnnnnnnnnnnnnnnnnnnnnnnnnnnnnnnnnnnnnnnnnnnnnnnnnnnnnnnnnnnnnnnnnnnttggnnnnnnnnnnnnnnnnnnacaaaaacctttcccaaacccttttcttttggcgggccggggccccatttagggaaaggtgaacccgggggcctttacctttgtttcccaaaagaaaaacctgggcccaagaaaaaaggggttgggaatcccccccac

SEQ ID NO: 63106 - DNA, 805 bp, Homo Sapiens
  misc_feature (58)..(58): n is a, c, g, or t
  misc_feature (157)..(157): n is a, c, g, or t
  misc_feature (266)..(266): n is a, c, g, or t
  misc_feature (301)..(301): n is a, c, g, or t
  misc_feature (336)..(336): n is a, c, g, or t
  misc_feature (340)..(340): n is a, c, g, or t
  misc_feature (456)..(457): n is a, c, g, or t
agcagggagcctaatacagaatcttgttcatgtggggagaccctctgagacctgagtngcattagcatggcactactgtcatctccaagcccgtcagagaacagcgcccgtccagtgcagacatttgaagctaggcgaggcgggttacacagcctgnggagtctttgtacttttcaatattctccaagggaagtctagacaggcttcacattttgttaagtacagctaggttctgtccacaataaaacagaactaggacaactgtnttggaaacatagttagcacataattgtagctaatntagtttttttctctgaagcagcatgaaaagaaatntgtntttgtacaaaagatgtttttatcttctatagcccacaattcccaacaacagagtgtcctctctccttccctctgctgcaaatatatgcacctacataacacccacatgcacgtttnnttctagcctaagccactatctacccctgctgttctctttttggggatttcttcaagcatatttacaaaacacttgctgagcccaactgccgcctcactgctgtatcctagttacatgagccatcagttccccaaacgcttgctttcacctgtctgttgggaaaccacctaagcctatacgaggaagaaaaatcattcagaacaaatgttggcttgaatactcatgtcgttttcttaactgcttgatacaggctttcaccgagatttggttgggaatcaaaagaacatctttaaagaatccggccttaccttacactatatataaattactcaatagatcaaagcgtcc

SEQ ID NO: 63107 - DNA, 426 bp, Homo Sapiens
agcatctggagatagaactgaagcaggtcatgcagcagcgcgtctgaggacaatgcccggcacaagcagtccctggaggaggctgccaagaccattcaggacaaaaataaggagatcgagagactcaaagctgagtttcaggaggaggccaagcgccgctgggaatatgaaaatgaactgagtaaggtaagaaacaactatgatgaggagatcattagcttaaaaaatcagtttgagaccgagatcaacatcaccaagaccaccatccaccagcccaccatgcagaaggaagaggataccagtggctaccgggctcagatagacatctcacccgagaaaacaggagcttatccgaagaaataagaggctgaagaacactctaacccagacctacagagaatctcaggagggtggggataccagtca

SEQ ID NO: 63108 - DNA, 602 bp, Homo Sapiens
gaaagcaagaacaagaaatatcaagaagaggttccagtctatgtgccaaaatggatgccattcaaggaattgatgatgatgctacaagccagcttgcaagaaattggggatcggtgggcagatggaaaaggacccctggcagctgcgttctcttccagtgaagtaaaagctttaattcgtgccttgtttcagaacacagaaagaagagcagctgcccttgctaaaattaaatagctccatcttcttaagaaagctatgtcttgaatatgtggattcttcccttggcataattactcccttaaagacttctttgaatcgcccattggttttggtgaaccagtacatcttggaagtttgactttacagaagaatgtcttacctcctggcctgtacgaggctttgtttaagaactgtttattaagataaattgtcaagtaaagcacctcaattcattgactttctagccatcttcctttgattagctatcaaactgtcaggcagcattatttcatgctgcttccagagccctctgggagctatatacattgtaaatgcaggccctagctttggaacgaggaattgggagattgcaggccatcaag

SEQ ID NO: 63109 - DNA, 790 bp, Homo Sapiens
  misc_feature (464)..(473): n is a, c, g, or t
gggggtttgcagtggttgtgttttgcataaaatagtctagtctttgccacagatagtgagctacccactaatgagcccatggttttatttcagaagcacatgagggtgtgaaaccactctgttacctttctgtattgtcttagctattcaagccagtcagaggataatatatatattctcatcagcactcagagtagtcagtgaagagagtagatcacacttgggcacaccaggattcatataaacattgtatcttctctgtggatgctcaggccttgtctacaatgaggctttacaaccttcctttgttttggctcgggattacttcctggctgtctaataattgaaccataaccatgtaatattatgtaaaggcctggaaattactgttgctaaaaaaagtcatgtagtttcatgtagtgtagcatccttggcatcgttttccaaatttgttccttctcccnnnnnnnnnnctttcgtgtgtggcatgagtgtgtatctgtgtaaatatgattgtatatgtgttactccgatatgtaatccatttcactggctgagtttggcccctagccatgtgttaatataaagtaggcatggctttcccaatggaaatctctgtaaatgacagtggagttgtgccaacattttacatggccacataattggactggcatttttatgggtaaaaaacggcacatttaggcaggtgaatatgaacgtaaccttggagaactaaaaagtttgaagggcccaaaacctacctttttagcctaaaaattaaaggggctgg

SEQ ID NO: 63110 - DNA, 385 bp, Homo Sapiens
cgtacttgaactggctggttcggatgtcatctgaaatggaaaccaacatcgtggccgtggagaggctcaaggagtattcagagactgagaaggaggcgccctggcaaatccaggagacagctccgcccagcagctggccccaggtgggccgagtggaattccggaactactgcctgcgctaccgagaggacctggacttcgttctcaggcacatcaatgtcacgatcaatgggggagaaaaggtcggcatcgtggggcggacgggagctgggaagtcgtccctgaccctgggcttatttcggatccacgagtctgccgaaaggagagatcatcatcgatggcaatcaacattcggccaagatcgggctgcacgacctccgcttca

SEQ ID NO: 63111 - DNA, 383 bp, Homo Sapiens
tggaagggaattttctatgaatggatgatttccaggctcagggtgagctgtgtgttagttctgagcaaatccctcaccaagacccttccctcccaagccctcaaagaaatgatgcaaagcccttccctgcaagaccccttgtggatgtttttgcatctacctgatttttagccccacccagggagactttataccccatgatcctgccccaccgttgctgttgtctgccagctgggtctagcatcacagggaagggggggatttatactcatggaaagactactcgatctaccggaaaccaacctgtttactgtactgttgtaaatatcatgccctttatatcctgtatattggcttcttttaaataaagtgaaatgtcttag

SEQ ID NO: 63112 - DNA, 1309 bp, Homo Sapiens
gggagatgtagtttcaagaaaccagagtttccttagaactccaattcaaagaacacctcatgaaataatgagaagagaaagcaacagattatctgcaccttcttatcttgccagaagtctagcagatgtccctagagagtatggttcttctcagtcatttgtaacggaagttagttttgctgttgaaaatggagactctggttcccgatattattattcagacaatttttttgatggtcagagaaagcggccacttggagatcgtgcacatgaagactacagatattatgaatacaaccatgatctcttccaaagaatgccacagaatcaggggaggcatgcttcaggtattgggagagttgctgctacatctttaggaaatttgactaaccatggttctgaagatttaccccttcctcctggctggtctgtggactggacaatgagagggagaaaatattatatagatcataacacaaatacaactcactggagccatcctcttgagcgagaaggacttcctcctggaatgggaacgagttgagtcatccgaatttggaacctattatgtagatcacaccaataaggaggcccaatacaggcatccctgtgctcctagtgtacctccggtatgatcaaccacctcctgtcacataccagccacaggaaactgaaagaaatcagtcccttcctggtacctgcaaatccatatcatactggcagaaattcctggactggcttcaggtttacgcacgagcccctgtgaaatatgaccacattctgaagtgggaactcttccagctggctgacctggatacataccagggaatgctaaagttgctcttcatgaaagaattggagcagattgttaaaatgtatgaagcatacagacaagcccttcttacagagttggaaaaccgaaagcagagacagcagtggtatgcccaacaacatggaaaaaatttttgagctgattttttaaaaatttaagttttgtaagagctttaaaatattttcacagataaaaaattgcaaacaagtactctggttaataaatgctgcttcctttgtggaaattataaaattctaactttacatgtattttgttattagaaattttcttttattgaatgagaaaaattagtctatcattttaagagccaatatggcaaacactttcaaatactgtatattaggaaactgttttggtattcttgatggaaaaaaatgcagcggaaatgtcattatgaacagatgttaaataggaaattattacttgttaacttcttacagcagtagtaccttcttt

SEQ ID NO: 63113 - DNA, 469 bp, Homo Sapiens
ctgctcaactcccccacaatcccgttcaggatccacaatcggaatggaaagagttacctgttcctactgtcctcggactacgagaggtcagagtggagagaagcaattcagaaactacagaagaaggatctccaggcctttgtcctgagctcagtggagctccaggtgctcacaggatcctgtttcaagcttaggactgtacacaacattcctgtcaccagcaataaagacgacgatgagtctccaggactctatggcttccttcatgtcgtcgtccactctgccaagggatttaagcaatcagccaacctgtactgtagcctggaggtggattccttcggctattttgtcagcaaagccaaaaccagggtgttccgggacacagcggagcccaagtgggatgaggagtttgagatcgagctggagggctcccagtccctgaggatcctgtgctatgagaagtgcagga

SEQ ID NO: 63114 - DNA, 789 bp, Homo Sapiens
agacagtgtgatgcatctcaattcagtcaaggccctgtgcctggcgcttgtgctgactggatcccacagtcggcgtcttgtcccacaggacctccccagagggcaccttctgcaccctattgtggcattgttttttcagggagctcattaagctctgcacagtctgctccactgccacatcctggaggctttactaccaggccttctgctggcaccttccctgagctggattctccccagcttcatttctctcttcctacagaccctgatcccatcagaggttttgggtcttatcatccctctgcttactctccttttcattttcaaccttccgcagcctctttgactgccaaccttaggctgccaatggcctctgctttacctgaggctctttgcagtcagtcccggactaccccagtagatctctgtcttctagaagaatcagtaggcagtctcgaaggaagtcgatgtcctgtctttgcttttcaaagttctgacacataaagtgatgagctatcagaagtacttcaagacagctgctttttacaaataaaatgtgatacaaaagatgacagtatcccgtgctttctggaagtaaaagaagaggatgaaatagtgtgcacacaacactggcaggatgctgtgccttggacagaactcctcagtctacagacaaaggatggcttctggaaacttacaccagaactgggacttatattaaatcttaatacaatgggtttgcacaacttttcttaaacaaaaagcattccatcctctaggtgtaaaagg

SEQ ID NO: 63115 - DNA, 611 bp, Homo Sapiens
ttgagataatttagtgtttttaactgatacataatttatcaagcagtacatgaaagtgtaataataaaatgtctatgtatctttagttacattcaaatttgtaactttataaacatgttttatgcttgaggaaatttttaaggtggtagtataaatggaaactttttgaagtagaccagatatgggctacttgtgactagacttttaaactttgctctttcaagcagaagcctggtttctgggagaacactgcacagcgatttctttcccaggatttacacaactttaaagggaagataaatgaacatcagatttctaggtatagaactatgttattgaaaggaaaaggaaaactggtgtttgtttcttagactcatgaaataaaaaattatgaaggcaatgaaaaataaattgaaaattaaagtcagatgagaataggaataatactttgccacttctgcattatttagaaacatacgttattgtacatttgtaaaccatttactgtctgggcaatagtgactccgtttaataaaagcttccgtagtgcattggtatggattaaatgcataaaatattcttagactcgatgctgtataaaatattatggg

SEQ ID NO: 63116 - DNA, 803 bp, Homo Sapiens
  misc_feature (170)..(190): n is a, c, g, or t
gtaagaaagaaaaggactcccttagaatgggaaagaaaaatcataaaatattgagctgatgcctgtatatagaaattaagcgtttctcgaaagctgttctatgttttgctgttattttagtctttattctcttcctttaggtggagaaacaaagtaccaatttgaagggnnnnnnnnnnnnnnnnnnnnnggtttctgtcagtagaaataaccatatgtagctaaccaaatttctgtgaagaatgttttcatggttatcattatatctaactataacctcccccatagttatgaagagtaacctgaaatgccactattgtggaaataggataattgtaattgtgaaaaaataattttaaggaaatcttacaagtattacattaaaaagatactatgactgccacctgccatttaccttctaataaccctgccatgtggtttgcagaacgagatggatatcgtagcctcagaagaaatattttatagtgggttttttgtttttcgttactagatttcatggatgaggggatatggttgaccttttactttttaatggagcagccagtttttgttaattactcacttgtacattgtgagattctgaatccggtacctgctattcttggacttgtctcagggcaaatctatgctggggttcttatgaagagtggtatgaaaaaggcccttgattggtacagaattggcccacggggaaaaaattacgggccatggagaaatcctggaaggggtcccccgaaaaaaattttggcccctgaaaccccttttgcccgaaaagtggccac

SEQ ID NO: 63117 - DNA, 290 bp, Homo Sapiens
gcatccctctgacagcggaccccctgttttgaacattttttggcaggatgagttaaagcactggattatatttgggatttttgttttggaattgtctgttttaatcacagccttaattcacaattggcaaaggcagtttactcaaaggactgggctaaatattctgtaattatgcatttttgataggaaaatgaaatttttgcaaacagacattttctttttttctgggctggagtgcagtggggtctccggctgatcgtgaaggctaccgagctcgaaatacgtaaatc

SEQ ID NO: 63118 - DNA, 1107 bp, Homo Sapiens
ggcggggttggagcctactcggggcgactgcgatggacgccttagaaggagagagctttgcgctgtctttctcctccgcctctgatgcagaatttgatgctgtggttggatatttagaggacattatcatggatgacgagttccagttattacagagaaatttcatggacaagtactacctggagtttgaagacacagaagagaataaactcatctacacacctatttttaatgaatacatttctttggtagaaaaatacattgaagaacagctgctgcagcggattcctgagttcaacatggcagccttcaccacaacattacagcaccataaggatgaagtggctggtgacatattcgacatgctgctcaccttcacagattttctggcttttaaagaaatgtttttggactacagagcagaaaaagaaggccgaggactggacttaagcagtggcttagtggtgacttcattgtgcaaatcatcttctctgccagcttcccagaacaatctgcggcactaggtcctacctccagccaatgaatgggatcattctggatgtcaccagcccaataggctcagctcatgatgacagaacacatcttggaaagactgactctgttatgtaactcttcatttatgttaagtattaataggtcaaaaccaaaatgacctaaccctcctggacctatttatcctgaaacaccttcttgtattcattaaccatagtactcctccccacctcaagtagacacctctctcaggagcttctgagtcagacgcctctggagcgagccctatgtcaggcactccacctggggggcccttccccagcatacctgctggtgtgtaagtgtggactaacccgccgccaccaccctctgttccagcaggctctgcatgaatctttgtgcacttgcacctctttttcacatgggccacagtttcagtacttcagcctcagtggggttcctgatgtttatctagggtgttactcaagcccagtttgagattttggagtctcctgtgatcacatcttgtctcggctgtaggaatcaacagaaggagcgtcatctacatgaagttccgtgaagccgtgggatccc

SEQ ID NO: 63119 - DNA, 1133 bp, Homo Sapiens
  misc_feature (363)..(363): n is a, c, g, or t
  misc_feature (833)..(843): n is a, c, g, or t
  misc_feature (937)..(952): n is a, c, g, or t
  misc_feature (962)..(962): n is a, c, g, or t
ggctaaatttagaaatctattggaaacaaagacaaacaggaaagtacagaatagagacttttagtaaataaatggaatttaaaggaaagtgtttatttacagtgtcacgacagaaaaggatgtctttgttgtcatagtctttgagggatctccgtaaaatctggggcacaggtacaagaaatagccaatatttagttcccagaccatgtttagtagtgtccagtttcagatcatgctgccaagaggtatctccccctcaggtgggtcatcactgagccctggaattggagactcatacttgcccagcacaatgttacgggcagacaggccgacatctatgattagctagaagccataaagaanagctgctaagtggccactaggtgccacttttctgtttttgtaatgctttcattagcagatcttttttttccaagctccatggggcctatgagaggcatttatgatttttgtgcctacaataagtcagcctgtctggtgtgagttgttttatgagaaatgctttccaagggaggtctaggaagatcctgacacataagaactttgggttagagagctttccaggtgtagtggcaataaaaactgacctggaaaagaaaacctgcccagcaccggaacatggctttctgaactcacttgagagtgtatggtgtatgtcacttctcatatattcttgagtttagatttgtcttttatacaatttttagctcttttccagttcacttgtgctcgtctgtatattggtatttttaaatttttgtgggaaataatgaaaagagtgaaattatattttataattactcatttgtagnnnnnnnnnnnaatttaataaacttcctccaaaaaaggagagggcgagagggaaaagacccggccccgcgcccgacagaggagaggcgcgagcaggccgcgaagnnnnnnnnnnnnnnnngggcgttggncccgcgcgcccgaagagagaagcctttggggggccccccctcgggcccccaaaaaactttttcaacactttcctttggggccggggccccccggggaaagggaaacatggggccaaatttggtcccaaaagaaaccccggggccgaaaatagggggtgggatcccccccat

SEQ ID NO: 63120 - DNA, 1238 bp, Homo Sapiens
  misc_feature (503)..(511): n is a, c, g, or t
  misc_feature (1075)..(1084): n is a, c, g, or t
gaaaagttccctagagcttttacagaaggatgtggtacagctccatgctcctcgatatcagtctatgagaagggatgtaattggctgtactcaggagatggatttcattctttggcctcagaatgatattgaaaaaatcgtctgtctcctgttttctaggtggaaagaatctgatgagccttttaggcctgttcaggccaaatttgagtttcatcatggtgactatgaaaaacagtttctgcatgtactgagccgcaaggacaagactggaatcgttgtcaacaatcctaaccagtcagtgtttctcttcattgacagacagcacttgcagactccaaaaaacaaagctacaatcttcaagttatgcagcatctgcctctacctgccacaggaacagctcacccactgggcagttggcaccatagaggatcacctccgtccttatatgccagagtagagtactgaccagcaaaatggagaagatcagagaatgcagcagcagnnnnnnnnncttgtgttcttaccactttattctttcagagtttaaagaaaatggactcatgcacagaacactatgcattttgaaacttgttcatcctggatttttttaaatcatttttatctcagaacttaaacaaaaattagatgtcgtgcacggactgtgtgaaagaagatgctttgcatatttgctgcactgcatcagtatcttactaaaaatgtgaaatgaaaggactattgtacactgaaatgcttaaatgtatctgaaagcacaaggtgatactcatttttatggtcttcccatttgtgctggtttttgcctctttgacatctgtcatcagtatttagagggtgagaagtgaatgtaacaggtataaataacatttttaaaaacaataactttgctataatcacagttgttccagagcactgtcagatacattctaatgaccagaactggtttaaaaaaagaaaatacaaccctgggaaagaaatcttaaatgaaaaacgcatctcattgtaggcatttttgcctcatattttactgggccatgtttgtttcctggtactcatgtannnnnnnnnnccagatctctttccccagttgctattgtaagagtattctgctgcgtgtggatgcagttatacacattaaagcatatctggagtctgaagtagctataaagcagctataaaacagaaatacatgcatagctgcagaaaccatgataggtagagga

SEQ ID NO: 63121 - DNA, 674 bp, Homo Sapiens
  misc_feature (352)..(364): n is a, c, g, or t
  misc_feature (523)..(530): n is a, c, g, or t
  misc_feature (532)..(582): n is a, c, g, or t
  misc_feature (584)..(586): n is a, c, g, or t
  misc_feature (589)..(599): n is a, c, g, or t
  misc_feature (601)..(602): n is a, c, g, or t
  misc_feature (604)..(613): n is a, c, g, or t
  misc_feature (616)..(616): n is a, c, g, or t
  misc_feature (621)..(622): n is a, c, g, or t
tccttagaaatgggcttcgaatagaagctcccagcctgtgggggcgtctcctgggtagggagtggcgtcccgttttcccttaggagggtgtttctgcattgaacccctgagtgggacggcgttcccggcaaagctgggagggaggcgagcgtggggcaagacccttgtcttcgagccggggccctcttgtatggggcggttttatgttgcagtcctctgatactttctgagttcaaagaggtaaatgtataaatttcagtcccttctgaacacagatatcatcagaaaattaccattccctagcaggatgttttcgtgtttgtattcgtatatgccagttcatttcctttgnnnnnnnnnnnnngtggaacacaaagtaggaagtgagaaccttctggctttggatggattgacttcttgattctttctggttttgcctgaacaccaagtagcttcataatcaaagggtcattttctggtttgtatcagaccgtatttataaagttgggtatttaatttcaannnnnnnngnnnnnnnnnnnnnnnnnnnnnnnnnnnnnnnnnnnnnnnnnnnnnnnnnnnannntgnnnnnnnnnnntnngnnnnnnnnnnaangtttnnaaaccattctctttgggaaagctttccaaaaaagtaatttaaaattggtgtg

SEQ ID NO: 63122 - DNA, 511 bp, Homo Sapiens
gagctcgtttgcaggagagaggtgctggagccctgtttggttccttctcttcctgcggatgtagaggtggggccccttccaagagggacaggcctctccccagcgcgccttcctcccacgtttttatggatctgcaccagactgttaccttctgggggagatggagatttgactgtttaaaaactgaaaacagcgaggagtctttctagaacttttgaacactaaaaggatgaaaaaaattagcaaaccgaagtttcttcaatgacccctcgagaactttgggaccagtttcctataggggactcagtttcagagaactgagacagaagctcttctgtcgttatattcttctttcctttttttggatttattaaatattttctgtggtgtgaagtgacttattaaatccacagacattgagtgacttcttacaacatccacataagaatttgttgtaatgagttcatgtccacccagatgttgtgttggcagtgaacaagggcacggtttt

SEQ ID NO: 63123 - DNA, 413 bp, Homo Sapiens
agggaggaggaggagccagtaggagcaggttacaatgcagaaatgacctggagccgcacggggatttcagtgacttcatcaacaatgagagccattgctggaaaggatttggtggcctgggtgacagctggttttctgcatatcccacatgcagaggacattcctaacacagtgactgtggggaacggcgtgggcttcttcctccgaccctataacttctttgacgaagacccctccttctactctgccgactccatctacttccgaggggaccagtatgctggggcctgcgaggtcaaccccctagcttgcctgccccaggctgctgcctgtgcccccgacctccctgccttctcccacgggggcttctctcacaactaggcggtcctgggatggggcatgtggccaagggc

SEQ ID NO: 63124 - DNA, 718 bp, Homo Sapiens
gtagtcggtacctcagatcggctacggacggctacttcgacgaggagatgaaccgcgtcctggcggaccccagcgacgacaccaagggcttctttgaccccaacacgcacgagaacctcacgtacctgcagctactggagcgctgcgtggaggaccccgagacgggcctgtgccttctgccactcacggataaggctgccaagggcggggagctggtctacactgactccgaggcccgggacgtctttgagaaggccaccgtgtctgcgccgttcggcaagttccagggcaagacggtgaccatttgggagatcatcaactcggaatacttcacggcagagcagcggcgggacctgctgcggcagttccgcacgggccggatcacagtggagaagatcatcaagatcatcatcacggtggtggaggagcaggagcagaagggccggctttgctttgagggcctgcgcagcctggtgccagccgccgagctgctggagagcagggtcatcgaccgcgagctctaccagcagctgcagcgaggtgagcgtctctgtgcgagacgtagccgaggtggacactgttcggaccgggctctccggggtgccaacgtcatcgcgggtgtatggctggaggaggtggggcagaagctgagtatctacaatgccctgaagaaagacctgctgccatccgacatggccgtggccctgttggaagccca

SEQ ID NO: 63125 - DNA, 1205 bp, Homo Sapiens
  misc_feature (481)..(481): n is a, c, g, or t
accagttgtttgagaaaatcatggcattagacattgatgagcgccacctactgcgtcttggtcatggagaagaagagctggagacagagaaagatttcagcaggtatggaagagttaattatgttctggctcgaagaatagaacttttagaagaagtcaaacgattgcaaaagagtctaggggttccaggagatgcctcatatacctgtgaaactgcaggctatttcttcttataccaggtaatgtctcgctgggaagagtatatcagctatagtgaaaaataaaggtagtacattgtccacgactgttacggaagtcatccactttcttcccgtttccatgcatactttgcaaatgctcctcaacccatttttaaaggaagatcttatgaagaagacatggaaattgctgaaggatgtttcatggcatattaagaaaatctttacgcagcttgaggaattcagagcctctgaattgcttncgaagtggactggacagtatctaaataccttttagtgaaagaagccaaaattattgctatgacctgtactcatgctgccttaaaacgacatgacttggtcaagctaggtttcaagtatgacaacattttgatggaagaggctgctcagattctggagatagaaacttttatccctcttcttctacagaatcctcaggatggatttagccgactaaaacgatggattatgattggcgatcatcaccagttacctccagttattaagaacatggcctttcaaaagtactcaaacatggagcagtctctcttcactcgctttgttcgcgttggagttccgactgttgaccttgatgctcaagggagagccagagcaagcttgtgcaacctctacaactggcgatacaagaatctaggaaacttaccccatgtgcagctcttgccagagtttagtacagcaaatgctggcttactgtatgacttccagctcattaatgttgaagattttcaaggagtgggagaatctgaacctaatccttacttctatcagaatcttggagaggcagaatatgtaagtagcactttttatgtacatgtgtttacttggttaccctgcttgacaaaatcagtattctaacaacatattacgggccaaaagcatcttattcgcgacatcatcaatagacgatgtggacacaatccattggatgggagaccaaacaaggtg

SEQ ID NO: 63126 - DNA, 623 bp, Homo Sapiens
actgcagcagctatttattcagctggttctgaagcaagaacaagaggaataccagcgggaagggatcccctggaaacatattgactacttcaacaatcagatcattgttgacctcgtggagcaacagcacaaagggatcattgcaatccttgatgatgcttgcatgaatgtcggcaaagtcaccgatgaaatgtttcttgaagcacttaacagtaaattgggcaaacacgcccatttttccagccgaaagctctgtgcctcagacaaaattctggagtttgatcgagattttcgaattcgacattatgcaggcgatgtagtctattctgtcattggttttattgacaaaaataaagatactttatttcaagatttcaagcgccttatgtataacagttcaaatcctgtgctcaagaatatgtggcctgaaggcaaactgagcattacagaggtgaccaagcgacctctgactgctgctaccttgtttaagaattctatgattgctctagtagacaaccttgcatcaaaggaaccatattacgttcgttgcatcaaacccaatgacaagaaatctccacagatatttgatgatgaacgctgccggcaccaagtagaatatcttg

SEQ ID NO: 63127 - DNA, 608 bp, Homo Sapiens
  misc_feature (213)..(213): n is a, c, g, or t
  misc_feature (317)..(318): n is a, c, g, or t
  misc_feature (320)..(320): n is a, c, g, or t
  misc_feature (323)..(323): n is a, c, g, or t
  misc_feature (325)..(325): n is a, c, g, or t
tttaattctattatcatgtcagctgacattatgactatataatgtagttagagacaatttttatcttgcttatagtaaaggttcagcctgccaattgtaaatcattctaatttggcaggcttatttttgacattggaaagggcagaaagcgatttgccccagtagtgtaataggagttatagaccagaggctgaaacccaaactatataaaanggaattcagtggagggggctttgtaatctccattaatttgtgttgctacttccaggatcaccaaaaattacatgtaattttacatgttaaacacattgaaaccnnanccnangtttataaagcataacgggcttcccttccagaagctctcctgcttgtcatgaagtgagaacaatgaaaagtcatagcagatactcagtttaactctgtgtagaacctagtagtgtttgagctgttattcagatttgaattcagactgtgtgttgtttgcttatgggcactgcctgtcgttctgtcactgttaaattaatgagtctataaggtttttcttcccgaggccataggtgatcactaaaaattgcaagataaattgtaatcgctgccgcactatgggg

SEQ ID NO: 63128 - DNA, 1341 bp, Homo Sapiens
  misc_feature (314)..(330): n is a, c, g, or t
  misc_feature (395)..(533): n is a, c, g, or t
  misc_feature (549)..(564): n is a, c, g, or t
  misc_feature (881)..(881): n is a, c, g, or t
  misc_feature (949)..(949): n is a, c, g, or t
  misc_feature (1109)..(1109): n is a, c, g, or t
  misc_feature (1151)..(1151): n is a, c, g, or t
ccgtgcacgtaaattggtcagcagaaaagggagcccagaaaaggcagcagatggaccatgcccttgctgggttttccttttctttgggactgtgaggggaaatggtttttagaggtgagggttggtccatgtggaggaaagaagtgtctctgttgggggacagaggaacctggggagtccatcgcatgtcctacaatctgctcttagacacggccttgccaggagagcctgccctcagactgcaggaccagaacccctgcctccatctttccaagcaccggggcgaaaaaccacaaaggaaaggaagaaaattnnnnnnnnnnnnnnnnnaaatcacttggtgattaaaaagataactgctccataaataaaactcctaaagtcacttatgtttnnnnnnnnnnnnnnnnnnnnnnnnnnnnnnnnnnnnnnnnnnnnnnnnnnnnnnnnnnnnnnnnnnnnnnnnnnnnnnnnnnnnnnnnnnnnnnnnnnnnnnnnnnnnnnnnnnnnnnnnnnnnnnnnnnnnnnnnnnnggccccgacgaccccnnnnnnnnnnnnnnnncggtttgtgcccgccctcctcccccccacaaaaaagtttttaaaaacctcttgtgtggggcgggcgggccccacaaggaaagagcgacaacggggtaaatctcttgttccccccgagaaaaccccggggcaagcacaaaaggggggctgggaccccccccaacaaaagaaagaaacccccggcgggcgcgaacacccatcggtggctgttgagaacacaaaaccgcagaaggggggccgtcccggggggcggcgcattttggggcggcggtcttcttcaaacgcaggggggggcacccgccgagggcgcgaacgccnttgcaagataagacaaaaagggggcggcgcgcccaccgcccctcgcggtggaacattacccggtgtgngagacggaggggcggcgggcgaacatatactctcaaaccaagaaacgtcttccttgcgtgggcgacgcacgtagcaaggagagaccctcactccggaacagcaacggggcggcgcgtgtggcggagacaacctctcgactgttctctccccagcgccggnggtacctctctacaccctcccgcgccttgtggtccgccctcngcgtgcgggaaaaaacaatagaaaactctgcgccccctcacgcgggcagacacaaacaggccgggtcggcacgacaacacgaggtggggtcgcacaccatactcggggggcccccgcttatgtataataacgcgcaagggagacaggtgcgggcgaggaacacctccctccaccgcgcggaggcggtggg

SEQ ID NO: 63129 - DNA, 570 bp, Homo Sapiens
tatttctttatcctttttagtgggggcctgtaattgaggctaattcaatagcaacaatagacaacatgatatggctgctgtcactttgaaacccaaaaggtctttgggtaggaatagagtaatgaaagaggaccagtcaacttcagtatatatacaaaggaaagacaaagagatgataaaccaaggctgaggaaatttttctgatgctttcttcatttctctaatataccttttgcattctttttctgataattgtgctattaggcagaagacacaagttaccacgttgtgtattaaaagcagtaggtaggttgtgccagtattttttcagccagtaagcatatacagttaacttatataattaaaaattggtttaagatagtgattaaaaatacctgaatattatgttaaaagtatacaatcattgtttctgtaatgatgatgggtattctgcttcttgtttttcattgtaattacaggggaagattgtttttgaaaatgtatattgccatgctttttggggtaagccagtaatgtgaaaagaaaaaagcattatgttattgtatgaaa

SEQ ID NO: 63130 - DNA, 346 bp, Homo Sapiens
ctcgtgttcctggcgcagaaactgttcaacaacagcagcagccacctggaggactacagtggcctgtccgtgtcctgttcccggttcaacagggagaactttccgggctggaactacaccttctggcactggtttgaacggggtgatggatgtgttgaagaagcaccacaagcccccacatggaatgatggggccatcctaggttttgtgaataagcaacaggaccacgacctgctcatccacaagaacgacgggaccttcttgttgcgctttagtgactcagatatcgggggcataaccatctcctggaagtttgactccccggaacgcaacctgtggacctgaa

SEQ ID NO: 63131 - DNA, 797 bp, Homo Sapiens
  misc_feature (712)..(712): n is a, c, g, or t
gggcattttgtctcctgtaacaatttacgcgccgtgtaactgtgaatctttcaaagcctcagttttatgaccctgtggagccagtggactttgaaggacttctgatgacacacctgaacagcctggatgtgcagcttgcccaggagctcggggacttcactgatgacgacttggacgtggtgttcacgacaaaggaatgtaggactttgcagccctctttgccggaggaaggggttgaactggaccctcatgtcagggactgtgttcagacctacatccgtgagtggctaatcgtgatccggaaaaaccaaggaagtccagaaatctgtggctttaaaaagactggatctcgaaaagattttcacaagacgcttccgaaacagacgtttgagtcggaaaccttggagtgcagtgaacccgctgctcaggcaggcccccgccacttaaacgtgctgtgcgacgtgtctgggaaaggccccgtcactgcctgtgactttgacctccgcagcctgcagcctgacaagcggctagaaaacctcctgcagcaagtgagtgccgaggactttgagaagcagaacgaggaggcccgggaggaccaacaggccaggccgagctctttgcccttttacccatcagtggacgaggaggatgctgtggaaaataactcccagtaccagaaatgtccccaaaaaagtctccgctacgcaacacnaaattggccttgtccggggccccttgggcccgtcggaaaagacttttcttaaaccaacttcctttgggggcgcggccgggcccca

SEQ ID NO: 63132 - DNA, 807 bp, Homo Sapiens
aactttagcctcaagtccgctcttagtgtacatcagaggatacactctggggagaagccttatgcatgcacggagtgtgggcaaggctttatcacgaaatcacagctcatcagacaccagaggacacacacaggagaaaagccttatgtctgcggagagtgtgggcgaggctttatagctcagtcaaccctccactaccacgggagtacacactccaaggaaaaaccttatgtgtgcagccagtgtgggcgaggcttttgtgataaatcaactctcctcgcacgcgagcagacacattcaggggagaagccttatgtgtgtggggaatgtgggcggggattttgccggaagataactcctctacagacactggaggacaccacacaggagagaaaccttacgcatgcatcgagtgtgggcgaaactttagccacaagtccactctcagcttaccatcagaggatacactcgggggaagaagccttatgcatgcgtggagttgtgggcaaaagctttaggagaaagtcacagctcatcatacaccagaagatacactcggggaaaagctttagaggtgcaaggagtgaggatgtgattttagctacaagtcagccatcagccacaccagcggaaatgcttagggagaagccttgtttgtaaggtaatgtggacagagctgtacgtggacatcattacttgtcacgtgtcagaggacacacgtcgggagaaaccttcatggagtgagagtaaggtgttggcctggaagtggccccttaagagatacttggagtcaaatctatccactgt

SEQ ID NO: 63133 - DNA, 1372 bp, Homo Sapiens
gtagcatttacattaggtattacaagtaatgtaaagatgatttaagtatacaggaggatgtgaataggttatatgcaagcactatgcccttttatataagtgacttgaacatctgtgcccgattttagtatgtgcaggggggcgatctgggaatcagtcccctgtggataccaaggtacaactgtatttattaacgcttactagatgtgaggagagtctgaatattttcagtgatcttggctgtttcaaaaaaatctattgacttttcaataaatcagctgcaatccatttatttcatttacaaaagatttattgtaagcctctcaatcttggtttttcagttgatcttaagcatgtcaattcataaaaacaagtcatttttgtatttttcatctttaagaatgcttaaaaaagctaatccctaaaatagttagatctttgtaaatgcatattaaataataaagtatgacccacattactttttatgggtgaaaataagacaaaaataatagttttagtgaggatggtgctgagtaaacataaaaactgatttgctctcagctgatgtgtcctgtacacagtgggaagattttagttcacacttagtctaactcccccattttacagatttctcactatatatatttctagaaggggctatgcatattcaatgtattgagaaccaaagcaaccacaaatgcataaatgcataatttatggtcttcgaccaaggccacataataacccagttaacttactctttaaccaggaatattaagttctataactagtactccaggcttaaccttaaaattaagatttccttaaccttaaccttaaaattgatattatattaaacatacataatacaatgtaactccactgttctccctgatattttttgctctaatctcctctgccgaaagtccaagggatgggagaattggtatactgggatgactacgtcttaagtcacatttttattttatgaagcttttgagactaaatttcaattcaccacccaggcattcaaatccaaacttttttatggcacgcgaaacaatattgaattcctaattggtcttgaacctttttgggttaaatctcaggcaaaggccagtttctttaaaaaacctctggaattctgaacccaactgttggtaaatttttttgccacccaatatttcacttttctggtaagaacttctttaaaaaaacaaagggctttaaatttgggaatgcgccaaatataatttcttgaaccggtttaaaaaaatccctcggtcacaactggggaaataaggggggaatcaatagacctcttgacaataaccgccaactttgagggggggctaatttttacgggacctta

SEQ ID NO: 63134 - DNA, 498 bp, Homo Sapiens
tttctggtccacccgctccaaggaccagaatgaaacactcgatgaggacttgttccacaaattgaccggcggtcaggattgaaacaagcacgcgtgctcggctcacaccaacaaggcaagccaaaggcgcccctccccagagggatccctaacgtgcccagcatgtagattctggactaacagacaacatacattcaccgctggtcacccagatcctcattcaaacccactgctggcacatccctttccttactttgccctgtgctaccagccatggaaggagcctctcttgttttttctataaaatgggtaggcaggagaaaagcaggtgccctaagattgctctaaggcccagcatgtggttacagttctctgacttgcagaacctgccaggtgtatggctaccaagttatcctcgtgctgatctgtctcattactaagtcaatggagaagacagaaaggtaaaaatcacgtgtagcagacaactcttatttcaca

SEQ ID NO: 63135 - DNA, 286 bp, Homo Sapiens
tggctcgaccatccagcgctgagccccacctcggggagttgacagtggaggaggccacgtcacacaccctgcatctctcctggatggtgactgagggagaatttgactccttcgaaatccagtacacagatagagacgggcaactccaaatggtccgcataggaggtgaccggaatgacatcaccctctctggcctggaatccgaccacagatacctggtgatcctgtatgtttcagtgatgggaagcatgtagtcctgtccatgtcgagccaatgttgtgtccgt

SEQ ID NO: 63136 - DNA, 1446 bp, Homo Sapiens
  misc_feature (48)..(61): n is a, c, g, or t
  misc_feature (1332)..(1332): n is a, c, g, or t
cggtccggaattcccgggatcaggctggatgttgtgggtagggagggnnnnnnnnnnnnnnatttggtttgctgtccttttttaaaggattccaagccatgtgaaacttcccttctggatgtgattctgggtcgcaagtccttatttatatgtgaggctggggaatgggctgggggtattggcagtccttttgcagggcagtgtgtgtggtggggtgacaccgctgtggcttagcccaagacactcccagaggaaaacactgcagaaggaactggtttgcagactgtggaaggatctgcagttttgtttttgaccaaaaaaataataataagttagctctgaagggcagagggaatacccaagcccctgatgcctatgagaagtccctggacttcaaccctcctgttgtttggccttagcccagagggagctgctcacctgagcacccttgggggtgggcagagaggcagggtgggattttagagttagtgtctgtgcgggggcagccctgagcctggagttgagactttggggtctcttagtttggaggtgttgagtgcatttgtgcccctgcctggttgagagcttcttggtacctcttgccaccccttctcactgccctgacccaaccccactggaccttgatgctgcgaggagtggtgtcctgacggactcagcactcccgcctgatgtattggatcataggagagcacttgctctcctgcctctgccaggagagggcttgttcctccaactctaggaggccaggcaagcatggacaggagccaagggagcagggtcattaactttttcttctttgcaaagtgggcacttggcatcagggtcccaatcaccagaaagcaccaaagcccctgggaccccacccactccatcttacccagggaccccaagtaaggcaactgttatggcagtgggtccagcccaggccagcactgccagcctcctctccctgcagtaggcaccagctctacctcccccggcaggcaatgtccctgacttctccagccccagcaccatctagttcccctaagacttcctcaagggggccaagcccagatctggggccaccccttttgctgtcccctccattcctcgggtttccccacacaaaggtggaacagaacccccagcaggaaaagctttcctcctcctgggaaaaaaagcttgggatggctggcctttacaatcccccctttcgaagcaccttccttcccaataccagcaaaaaccaggggaaccccacccatcaacccaggattccggctttgccttcctcacacggttcaggggcaaaaaagggggaagaacccnccccccctattgagcgcccttttgggaataacccaagcaaaaaatgcgggccgttccacagcgagcatcggacatccccattaggcatgcgcgccccgttgagggcgccctaaa

SEQ ID NO: 63137 - DNA, 1442 bp, Homo Sapiens
acatttcttgccagtgtcctcctgcctttaaaaattctcttttctggttggggaaatgatgtttggtaactgtttttactatgtctgcttctttgcaaagctttgtctttaacagagtaatattctatgctaaaatagtcattatttttagaaagaaaattgttcagttgctggtttcttattttatatattcttcattaaacagagttgatcaagaacttaatggaaaacaagatgaaccgaaaaatgaacagtaagtttggcatctagtccaaacaagactgaagaatgtgctgatggagcagtgctgtttctgcattcataatgcatttattggcccatatttttatgtaacctgttacaaaatagacttgactttttcataatggacttttgtattatacaagggactgttcactgctgtactggtttgcaaatttcttgaatttagctctttaatagctaactgtattattatcattttatattttatattgctaaatagagaaccacactttatataaagtagtttttgcatttgtttattgaatgatgcatcttcttcggtgaaatattatatgcataaatggcaaaggaaagaaataaatatatttttatgtcattgagcaatattttttaatgtgtacctgtcttatggaagaaatatgcaggtatataagaccacgattttctaaagtgcatattagaatttttgtttttgtaaatggttaaatacatttcctgggtaacttaggaaattaagtttttcataaggcaacagatggttaaactgattgtcatgaatacccaaagatcatgtatataatcgaagtgtattagtaccatcccaaggtttttttctcatttaacacatttgtttcataattcagcaagtacagatgcaagcgcattgcacactttttcctttctaaacttaaagacaagtcaaaaagccattcttagaactaaaggatttaagagggtaggaattagggtttgtatatatgtatatatgggacattttatcttctggcccaaagtcagaactttataaaaatcttgagtttgttcactaatgtgaaataagctatgtgtccagggtattgctcccctgagtgtatatgaatgctgagtagtattgcacagaatgtgatgagttattccctgtcacaactttttctataaaaaacaggggctgctttttaaactcctcctatgggcaactttaccaaaaatacttccatatcaatttattttgacactcgggaggttcggtttgaccctagtttaaaagggggtggttttattccaagtctgtggaatgcaaaatcactggatttgaaccaaatactgggcgaaatataaggggttaaattattttggaaaaagttcccttaaaccactatattcaccaaattggggggcctcgggatttttgagga

SEQ ID NO: 63138 - DNA, 1200 bp, Homo Sapiens
  misc_feature (988)..(988): n is a, c, g, or t
  misc_feature (1111)..(1111): n is a, c, g, or t
  misc_feature (1121)..(1121): n is a, c, g, or t
gggcctcgttttccagacataactgaagactgctatcttcatcccaacatactgtgtatgaaatacttgatggaagtcaacctccctgatgaaatgcatagcttaacttgccacgtggtaaaaatgactggaatgggagaagtggattttctgacatttgatcctatagccaaaatggcaaaagctgttaagtacgatgtacaagctgtagctatcattgtggtggtattgaaactgctctttctattggatgacagtttcgagtggtctttgtctaatcttgctgaaaagcataatgaaaagaacaaaaaagataagccatggtttgatttcagaaagtggtaccaaattatgaagaaagcttttgatgagaaaaaacaaaaatgggaagaagcaagggccaagtacctgtggaaaagtgaaaagccactctactactcatttgtcgacaaaccagtagcatataaaaaaagagaaatggtggtgaatctacagaaacaatttagcacactggtcgattcaacagcaactgctggaaaaaaaagcccttcaagttttcagttcaactggactgaagaggacactgatagaatgtgtttccatggacacagccttcagggagtcctgaaagagaaaggccaatcactgctgactaagaattcattatattggcttagtacacagaaattctgcagatgctattgtacacatgtgacaacctatgaagaatcaaattattctctgagttatcagtttatactaaatctcttctccttcctgctcagaataaagacttcccttctccatgaagaagtgagcttagttgagaagaaactttttgagaaaaaatacagtgtaaaaagaaagaaatcaagatccaagaaagtgagacgacattgagaaaatgaaatagaaactttctggaaaaatattttaatagtgataataacatcagattttaatataacattccagagaattgtggaanatactgcatatatatgtatagactctgacacatatttacatatatatcaagtgtgcttagaaaaatgtatattgtaaagcaggtgagcttcatttgatcttatttttcagagtatgaacattnctagagaaangttaaaacatagcaaaattgtataattgtatccagaaatgtatactcatccgtattttaaagctaaaattattttttta

SEQ ID NO: 63139 - DNA, 1177 bp, Homo Sapiens
  misc_feature (836)..(836): n is a, c, g, or t
  misc_feature (848)..(848): n is a, c, g, or t
  misc_feature (931)..(931): n is a, c, g, or t
  misc_feature (1012)..(1012): n is a, c, g, or t
  misc_feature (1077)..(1077): n is a, c, g, or t
gtgatccacaatgctggacctcatcgtgataagtagctgaagtactacatctcagtagttgtttactctggcctctacacaccatatgcaggtgtagggaggttcctctactccggccacctggccctgaggctgtaccatatcactgaccaggtccatctctaccccattgatgacgtttatactggaatgtgccttcagaaactcggcctcgttccagagaaacacaaaggcttcaggacatttgatatcgaggagaaaaacaaaaataacatctgctcctatgtagatctgatgttagtacatagtagaaaacctcaagagatgattgatatttggtctcagttgcagagtgctcatttaaaatgctaaaatagatacaaactcaattttgcatagaaaggtgtattttgaatagttcccatgttgtgttctcacattagagtaatttctatattaaaccatgaaaattgcctttatgagtgatacccatttgagggcctctaaacccttcaatttggtactcacgtgaagagggaaagcggaagatggtaattaaaaataatggatgatatggcaggatgattggttctgatcttaccggctagtggtcatttttaaaaaacttgtaccctcttatctgaaatcctgtttctggaatttggccattttaagtgattttgtttgccctcttctataatattcctacttcccataataatgactgatttatttgtaattcaggtatttataaacctattggctacaaagactttgttaaacattatccagtggttttcgtgaaatggaattatgtttatttttatgggatttgngtaaaattttanattgtctagaaaactgaaatttcagttgtcagttgtggaattcagttttttcattggtggaatttcctgccaccccaacaggnatttttgtgtgttaattaattttgcaaaatgagaatcatggtgtgacactcatctaatttatcttggtgggatggtatggncataataaagagaaagagggtttaattttttccttgaatttggtttccctggggggaatcatagngggaattttaagatttggaaaatcgggggggattcccttattggcccacctggaagaatggattggccggtcaacaacccataaaccgggttaaggggaa

SEQ ID NO: 63140 - DNA, 753 bp, Homo Sapiens
atttttaaaaaacttccatgcaacttctggtttaatgtttggcaactccacatgataaaaaaataaaaccagcccaaccgagtttcggaattaagtattcttctagtaagtgattcaacacttgtaatatttgccacaggactgacttatttatttactagctagaagctcttaagttcacttgtttatcagggcatatacagaagggtttgttaaaactcgatgttaactttacaactttctgacctggtgcatgaattctcaagtactgtatttcactgtgttggtgtgtctgatggaaatttcgaggtggtcccacacacatattttatgtagtgtgccttccaagagaaccatttatttctcttcacttatcgtcccaccaagtcacatttggtggtggtcagccaagtcgcatctggtctagttttactcttgtcccaattttaaagagtaatgggaatgagtttgccctggtgagacccataccattgcaatgattatcttgagcacctgaagtccagtgttggctgttagtgtatctgatattctgcctgtctcctcatggttgcaatatgtctgaagaatagcagcataatctcttggctgtttatacttttgtagactctcctgtgttgtccatattgtatacttttggtgattccagctatttaacctctatgtctctgctaaggtgattatttgtatatagcactcggccctgtgatattatagagtttcccgtggagaggt

SEQ ID NO: 63141 - DNA, 701 bp, Homo Sapiens
ggcggctggagcagaggcagcatgcggactgagcagcggaggcggtcgggagcgatggtggagaatggcggcggcgggctggcggagtgcggcggtggccgctactacggcggctggcagtgagggcggccgggcccctaagcggctcaagactgacaacgccggcgaccagcacggaggcggcggctgtgtggcggtggaggagcctggggcggcgggctggcggcggcggtggggagaactacgatgacccgcacaaaacccctgcctccccagttgtccacatcaggggcctgattgacggtgtggtggaagcagaccttgtggaggccttgcaggagtttggacccatcagctatgtggtggtaatgcctaaaaagagacaagcactggtggagtttgaagatgtgttgggggcttgcaacgcagtgaactacgcagccgacaaccaaatatacattgctggtcacccagcttttgtcaactactctaccagccagaagatctcccgccctggggactcggatgactcccggagcgtgaacagtgtgcttctctttaccatcctgaaccccatttattcgatcaccacggatgttctttacactatctgtaatccttgtggccctgtccagagaattgtcattttcaggaagaatggagttcaggcgatggtggaatttgactcagttcaaagtgcc

SEQ ID NO: 63142 - DNA, 386 bp, Homo Sapiens
ccgggagcccttaatcctccgggagccctttaccctccgggagccctttaccccgggagcccttaaccccgggagcccttaaccctctggtgggtagaaagaaatttttatttctatcagcagtactaaaatgtatcagccaaccagagaacatcagtgattttaacttctgcagagtttgccccagaattcagagttctatttagaggaagttaaaacaccaacagtaaccacccatttgaaaaatttttgtcaccagcaaaacttttcactaattagtgatatgaaatgtgatttttgtgttgttaaacttcagctttggaaaactcagtctctttcattatcatccattccaatttgaaggactttgggcaacttacgggggt

SEQ ID NO: 63143 - DNA, 1418 bp, Homo Sapiens
  misc_feature (749)..(805): n is a, c, g, or t
  misc_feature (1034)..(1034): n is a, c, g, or t
  misc_feature (1047)..(1047): n is a, c, g, or t
  misc_feature (1051)..(1051): n is a, c, g, or t
  misc_feature (1163)..(1163): n is a, c, g, or t
  misc_feature (1293)..(1293): n is a, c, g, or t
ttttatctaagctatcgagcttcttgattgcatttggttgaccacgaagtgaccataaggcattgggggactgtccactggggagttggagtgagcacgtggtgctgcaacaggcattgttttacatactttgtctccagtattctgacaccaagtgtcaactgtggtactttctttgcctaggatatgaattcataattgttgcttttgttgatggttgataccctttccattgatttaaacctaacacattatttctattccacatgcccagtagacatatattccaaagccactggaccacttgagtacataagtgccactgtttaatgcaatatgtatattcaggtctgtaaagctaacagtgtgacttggagtgcttcctgcagatgattctgacttgagtatttacatggaccatggtgatatccaaaagaaaaatgctttttatatttatagattatttcattgaactatatatgaaatgggtatcaataaatgtatttactccaaacgaagagtgcgcgcaaaccaccggtgcacatacccatcccaaaactctgccagaaacctaccaaaaaacaagaagcacgcggactcccgctcccacaccactcgaaagccttgccgagtgatcaggcgagaacaccgagcgcccgtcccgtcctctgcgaaccaccgcccccaaccgtgtgccctctccaaccacccctgttccgccggcccctcctgcattccgccttcgtcgnnnnnnnnnnnnnnnnnnnnnnnnnnnnnnnnnnnnnnnnnnnnnnnnnnnnnnnnntccgccgttaccttcatttggaagacctttccccgcacgcgccgatctcacgtcgttttattccgcgtcccgataccgctaaccggccgtcgcccgccccgtttgccgtaccaccccacctctccatttttccacctatgattgcgcgcgtattgcgggtcgccgcgctggtcgcccgccgattcgtggacagccgcgccgcgtgcgcgtttaaggcgcgcgcgccgtntcgttccgcgctntctntaccgcgtaggcccccctcgtactcctcgcgcggagactctagtgtgtccgttatgccgccgccgttctcttatacccacccgtgttgtccacgctgttcgccatcactcgnttggatcacgccctatattataccgggcgcggacgcgcgcctagatccgcgcattcgcgcctattattcatccgcgccgcgcgcagaatatataccgcgattattgtccactatttatgcactatgcggngcatgagatacgcgccagtacacacgctcagttatggcgccgcgcgatatctgttctcgcgccggcaccgctatttatttcccgcccactattttcgcgcccgtaccccgcgcccggtacttccc

SEQ ID NO: 63144 - DNA, 468 bp, Homo Sapiens
cacgttcactttgttttgtgttctttgaaagtaactgatacttttcgggtagttaattcagcagtccataaatatgatccagtaacttgcttatattttattgaagtctcgacagctcttcagaagtaaatttagaacgatgctgtcagttcatatttatagatattagtgttttagcagataaaacaaaatcaacaaaaattaagttcattttgtgattaaacctgcaaccatttttccattactttttttctatagttaatggttattgccatgatttcttctgtttggttctactaagctagaaagccagggtgaagttaatgataattcccattattttatttctgtaccatgagattgctgttgatgactgaaataccaggtgcaaaaattaatgatttgatttttgtacagtttcaatgagtattttttacttattaaaaataaattaagaaatgcaaaaaa

SEQ ID NO: 63145 - DNA, 1543 bp, Homo Sapiens
  misc_feature (1130)..(1150): n is a, c, g, or t
aaatactccgtaccggggcggccgcgcagggacaacggagggccagcgacgccgagccgggatccggaattttcgggatcgagaggtcagggtaggtttttgaagatggcggccctcaaggctctggtgtccggctgtgggcggcttctccgtgggctactagcgggcccggcagcgaccagctggtctcggcttccagctcgcgggttcagggaagtggtggagacccaagaagggaagacaactataattgaaggccgtatcacagcgactcccaaggagagtccaaatcctcctaacccctctggccagtgccccatctgccgttggaacctgaagcacaagtataactatgacgatgttctgctgcttagccagttcatccggcctcatggaggcatgctgccccgaaagatcacaggcctatgccaggaagaacaccgcaagatcgaggagtgtgtgaagatggcccaccgagcaggtctattaccaaatcacaggcctcggcttcctgaaggagttgttccgaagagcaaaccccaactcaaccggtacctgacgcgctgggctcctggctccgtcaagcccatctacaaaaaaggcccccgctggaacagggtgcgcatgcccgtggggtcaccccttctgagggacaatgtctgctactcaagaacacccttggaagctgtatcactgacagagagcagtgcttccagagttcctcctgcacctgtgctggggagtaggaggcccactcacaagcccttggccacaactatactcctggtcccaccccaccacgatggcctggtccctccaacatgcatggccaggggacagtgggactaactttcagtacccttggccctgttaagcaaccatgcccggccagcccaaggcaggccacggcattcgccgccccattgccccgccgcgcatggccgcctaaggtatgcctcaatgcccggggacccgggcttctgccaaaataccggcgccccgaaacttgggtcatgcgccctcacccccttgaaagtccggcccaccgcgttcatcaacttactatgccgtttccggcgggacgttggccccacccgtttattggcggccccgccttaaatcaatgggannnnnnnnnnnnnnnnnnnnnaccgccggacttcccgcccgcattacggggggggcacctatcgggtccccacccccctctcgcggtcggcgcggcataaaacgcccgccgttctagaccccggagttctcgtcgcctccaccgcgctattggtaccaccgccgatacgcccgccaacatccccccctgtttgtcaggcgcggacgggagccatccccacggcttctcccctctcccccctaatatcctgttgtccccccataccgggcctctcttccgccgcaacgcggacccaagcccgctccccccctcgattctaccccaccgactgatgccctgcggacctccgagtgtaacacctggggtgtgcgacctcccgtgctgcctcccaggccgcagtcccgcccccccacg

SEQ ID NO: 63146 - DNA, 1407 bp, Homo Sapiens
gggtttggagtccattatgagctgctgctttttcttctcatcttgtcatcttctggggatgtttgaaggctgagttccaacagaattcacaaagggaataaaacaggattgagattttgaggtgtgcacaaggtggtaagataaagggcatatgagcttcaaaactaatgctgttgcatacatgaagccttttgttttttgaggagctatttttgttattcttgtaacgctccaccttacatgccacgtctgtgtgagtcaacagggatcaggtttggtcaccacacatgtctgaagctgggcagcgtctgctctgtgttctgtgtggaatggagaaaaaaacgcctgccctgctgccttccatgttcataggcccagcccaagagagtgacacacagtgctggccctgagacatttccacaaagtggtcaactctgccttgcatcctaaaactttttgggcatctattttgaaaactataggagcctttggaaggcctcttatgtttggaggggaagggtgttgagattgtcaccatccttcaagctgagactcctggtgagcctttgccaccatgaaaaccacatagctgaccagggctgtgcttgaggtacagaggacacacattgtagacaggcctgtgtcatgtttccttacagtcgttttttacagagaaaaggggcattgttttttcactgctttctcaacagttcctgtgaataaatgaaacatttcggagctccctgagagcaagagccttcacttcttcttgcggtgccgggaccatgtgttggtgaagctggtgctgtgggggccactcactcgaatgacacctggaggcctgttcctcccttaccactcccttccccagcccgacttcttggcctcctgcccaaccagacacctcaaactctgtcagtgccctggcattctggcagagaatcctcaccagttctcaccaaccttccccccaggcaagggcagctgccagcatggtgctctgccaggacaggtttccctgaaggaagctgctcacactgagatgagcctctcagggcaggacctcttcccaagccctgcacacccacccctgcagcccttttggctccccttttccctgtgcctcagcactcctttcctggttgcagataacgaactaaggttgcctaaagggcagatctgccctctccatgtcttcgtcctggcaaacagggtcgtcttaaaattatgcgctaattctgtatgggagcactcaaaaggcattacttagagattgaaatttcaaactatctctagtttttcaatggaaatatatcagctagggaaaaaccatcaagctcattattattttttgatcttcagttgtatttttgtgaatattttaatacatctttttcaatttctgaa

SEQ ID NO: 63147 - DNA, 795 bp, Homo Sapiens
  misc_feature (751)..(751): n is a, c, g, or t
gggaaggcgctgctgtcgtaaaaggacgtccggtccgtctcctagtgtccggaatcggctgtcagcctccctggctgttagtaccttctttcccggagtcctggtccacgagttggatttactgctgtcgcgggtgggcctcacgccattccctgtccctcggccccctgagtgagtccggtctcccggcgaaagtgagcgaggtttgcccggagcgcgcacgaggggaaaatgcctaaaaaaaagactggtgcgaggaagaaggctgagaaccgccgagaacgtgaaaaacaactaagagcatcaagaagcactatagatttagctaaacatccatgtaatgcctcaatggaatgtgacaagtgtcagaggcggcagaagaatagagcattttgctacttttgtaattctgtacagaagttaccaatttgtgcacagtgtgggaaaacaaagtgcatgatgaagtcttcagactgtgtcataaagcatgctggtgtatacagtactggccttgcaatggtgggtgcaatatgtgacttctgtgaagcttgggtttgccatggtaggaaatgtctcagtacacatgcttgtgcctgccctcttaccgatgctgagtgtgttgaatgtgaacgaggcgtgtgggaccatggaggcagaatattcagttgttctttttgccataactttctctgtgaagatgatcaatttgagcatcaaggcaggctgccagggtttttaaaggcagaaaaantttttagatggggtttcatggcaatcgggcttgggtcagcaact

SEQ ID NO: 63148 - DNA, 1087 bp, Homo Sapiens
  misc_feature (486)..(509): n is a, c, g, or t
  misc_feature (899)..(926): n is a, c, g, or t
ggagcaaggattttgccttacaatcgggaacaaaaacaggcctttttgagaagagaaggggcctcctgcagtagcctaggaaaatcacatttagaatccactcccgggatgtcattctaggctctgctgactacaacagcctgagtgaggaggaaagaggcagcagcagacagcggatgtggagcaagtaccctctggatgtgcagaaggagttcggctatgacagcccccacgacctggattcagactgatggtcttgtgatgtccatgaggttctgccacatgcccttgagggctctgagtccagagttaactgccctgctgacatcctgttaggtttcctagcttaacatgtggaaggaaaagcatatcaagcatatcgggcggcaccatcccaccacagtgaaaacttatgttaggggagtgagtcttttccacttacagtaggacccctttgcctcaatcaaaagtgaccctacagtttgnnnnnnnnnnnnnnnnnnnnnnnnggaaggtttctttagctttagcttcttggcccaggaatttttcctggcattcaggttctgtgctgaaaccacaagggagggggaggttcccatttcattagcagtaagcttctgctgtgccataccaccaggctgcctgcctctaggaaaaccctgttccttttgatagaatctaaaaggggtaccagtgggtcccttgtagcaatacagactggatagtaatggccattagggcagaaagtagtctgagcagtgggagattttagttaacagctatttctgcttccaaactctgataacggttgtgaaattactgactgacttcctttggcagtggggccaagaaacaatatatatgaatgtgatacatgtgtttagtaaaatctagcnnnnnnnnnnnnnnnnnnnnnnnnnnnnacatgtcgggcggccccggcccccaaaaagttttccaaaacctttcgttttggcggcgggggccccaggagaggaaaggggaaacgtgggcataacctggtttccctagggaaaaccctgggggcatgaacataggggcttggggattcctcccccacaat

SEQ ID NO: 63149 - DNA, 1233 bp, Homo Sapiens
taggtctgcatgctggcggcggctctggcccaggcctcctggaaggtttctcaggatgggcagcactcgtggtgctgagccaggcactaaatggactgctcatgtctgctgtcatgaagcatggcagcagcatcacacgcctctttgtggtgtcctgctcgctggtggtcaacgccgtgctctcagcagtcctgctacggctgcagctcacagccgccttcttcctggccacattgctcattggcctggccatgcgcctgtactatggcagccgctagtccctgacaacttccaccctgattccggaccctgtagattgggcgccaccaccagatccccctcccaggccttcctccctctcccatcagcagccctgtaacaagtgccttgtgagaaaagctggagaagtgagggcagccaggttattctctggaggttggtggatgaaggggtacccctaggagatgtgaagtgtgggtttggttaaggaaatgcttaccatcccccacccccaaccaagttcttccagactaaagaattaaggtaacatcaatacctaggcctgagaaataaccccatccttgttgggcagctccctgctttgtcctgcatgaacagagttgatgaaagtggggtgtgggcaacaagtggctttccttgcctactttagtcacccagcagagccactggagctggctagtccagcccagccatggtgcatgactcttccataagggatcctcacccttccactttcatgcaagaaggcccagttgccacagattatacaaccattacccaaaccactctgacagtctcctccagttccagcaatgcctagagacatgctccctgccctctccacagtgctgctccccacacctagcctttgttctggaaaccccagagagggctgggcttgactcatctcagggaatgtagcccctgggccctggcttaagccgacactcctgacctctctgttcaccctgagggctgtcttgaagcccgctacccactctgaggctcctaggaggtaccatgcttcccactctggggcctgcccctgcctagcagtctcccagctcccaacagcctggggaagctctgcacagagtgacctgagaccaggtacaggaaacctgtagctcaatcagtgtctctttaactgcataagcaataagatcttaataaagtcttctaggctgtagggtggttcctacaaccacagcc

SEQ ID NO: 63150 - DNA, 449 bp, Homo Sapiens
ttctttcttttttgaacaaacggtaaggttggtttgtaattattctacggaggcaaaaagggaaaataaaaacttgcccttccctggctgacccagtcgggaaggtagggaaggaggtctcccgttgggagagtctctgttcctgctgtattatacaaactgtaccatagtcctgggaaaagggtggactcaccgctgttgttttatgggaagtcgtgtcatcctaggggttggggctgggcagagcctgtcccctccccccttctccaggagccagggggtgactggagagacagacccacccccaagcagggctcctctccccagggtgagcacaggacctctgtaagctgcttgtgtattgtccactttgacgatcagtcattcggtccgttgatcaataatccttcgatcttgtctccaattaaaccgaggctttcaccgaaaaa

SEQ ID NO: 63151 - DNA, 533 bp, Homo Sapiens
  misc_feature (108)..(108): n is a, c, g, or t
tggtcaaccccacaagcaccactctgggcacaagcagggcactctgttcccctcccccttaagccaacaaccacagtgccaccaagctcacacctgtccttctcaggntggcatctcccccaccctgtgccccttttaatggtaccaggcccgcgctgggggcaattgacttcctccaatccccactcctccgagccccaggagacaaacagcccttccttggggaaacttgggaatcattctggcttaaacaacacctcctcctgttgctcactcccgctgagcccactctactgccccagctccgtttctaccaccgcatcctcactgggctcactgcaggcatgctgaagcaaggggcctccaaccttctgccctcctgccaaaagatctggggagtgtgaggagagggtggcatcaggagctgctacaggcttgtcggagggagcggcatgggcgatgtcactcagccccttcccggtccgcccgcttccctccttcatgatttccattaaagtctgttgttttgtgaa

SEQ ID NO: 63152 - DNA, 494 bp, Homo Sapiens
  misc_feature (400)..(409): n is a, c, g, or t
ttttgttgctttttagtttaatgggactttaaaagtaattgaggagaaagaaccgtgatgttccctgtttctccagtaaaggactggcttttgcttgggcagaggtggtgctgctgggtgtgcagctgccacagactccaaaggcgtaggagtttgtgccaacacacggagtcattctggctctctgctgaggcccctgttttctggcaggtgccctccttggaaactggttttggctctgatcagcggttctttttgcagcaaagcctgcatctgtgttgacttgcaagattttgcgtttattcaggcaaaaactggtcaaaatggttactacatgatttgttcccagaggtttgaaacattcagtgaaactttttaaaactttgattgcatgatgtannnnnnnnnnagaaagttattgtttgagaataatgtctttttataccaggaaaatagttatcctgaatgacgttgaaaactccccctccccttta

SEQ ID NO: 63153 - DNA, 520 bp, Homo Sapiens
tttggaattaccaccctttaacatttccgtttggaggaagagtttgttctgaccaccaccacattggcatcagcggggagctttttacgcagagtttgaggccctgcaccggagatctcaggcacccggctcaactcagacctcccgttcccgaccctacacagagattgcctggggaggctgaggagccgatgcaaacccccaaggcgacgcacttgggagccggtggtctcaaacacctgccgggggtcctagtccctttctgaaatctacatgcttgggttggagcgcagcagtaaacaccctgcccagtgacctggactgaggcgcgctgggggtgggtgcgccgtgtggcctgagcaggagccagaccaggaggcctaggggtgagagacacattcccctcgctgctcccaaagccagagcccaggctgggcgcccatgcccagaaccatcaagggatcccttgcggcttgtcagcactttccctaatggaaatacaccattaattcctttccaa

SEQ ID NO: 63154 - DNA, 623 bp, Homo Sapiens
  misc_feature (69)..(69): n is a, c, g, or t
  misc_feature (87)..(87): n is a, c, g, or t
gacacccaggaggccctcatcacgcgggagacttccacggctgcagggtgctggtgggtgtggtgaagnatgagggctcgtatttcntggttacggggcccagggcttcagcaaagacacgagttctctcatcagccgggcgaggttcctggcaggggtgcgggtcggggttccccaggtaagtgacctggcagccgaggctgtggtcctgcattacacagactggctgcatcccgaggacccggcacgccttagggaggccctgagcgatgtggtgggcgaccacaatgtcgtgtgccccgtggcccagctggctgggcgactggctgcccagggtgcccgggtctacgcctacgtctttgaacaccgtgcttccacgctctcctggcccctgtggatgggggtgccccacggctacgagatcgagttcatctttgggatccccctggacccctctcgaaactacacggcagaggagaaaatcttcgcccagcgactgatgcgatactgggccaactttgcccgcacaggggatcccaatgagccccgagaccccaaggccccacaatggcccccgtacacggcgggggctcagcagtacgttagtctggacctgcggccgc

SEQ ID NO: 63155 - DNA, 420 bp, Homo Sapiens
  misc_feature (269)..(269): n is a, c, g, or t
tcaccagcaataactccccacactcgaagcaggtccaaacccaggatcccagggtccttgggctctgtggcactgtcttcccaagatccttcctgttgcacaatgggaaacctaagaggaaaaagacaggggcctgcttgcccagccatgcgagggattccatgcccacctggcctctgtttgcctcgctggaatgtgggcccctgctccccgtcaggttgtgctgtctctgacctatgtttacatccccgaggggtttctgcctcctnccccacccaggtcagggtgtggtccagcagcttgctgtggggtgctgacatgtgtcaccactgcccccctctgcccccgggggggtcatggtctcctcctggatgctgctccttgaatcttttttcttgataaaccttttacaattaagat

SEQ ID NO: 63156 - DNA, 873 bp, Homo Sapiens
cgctaggtacgaggctgggtggtttaatcggcacgaggccaggcagcagttagcccgccgcccgctgtgtgtccccagagccatggagagagccagtctgatccagaaggccaagctggcagagcaggccgaacgctatgaggacatggcagccttcatgaaaggcgccgtggagaagggcgaggagctctcctgcgaagagcgaaacctgctctcagtagcctataagaacgtggtgggcggccagagggctgcctggagggtgctgtccagtattgagcagaaaagcaacgaggagggctcggaggagaaggggcccgaggtgcgtgagtaccgggagaaggtggagactgagctccagggcgtgtgcgacaccgtgctgggcctgctggacagccacctcatcaaggaggccggggacgccgagagccgggtcttctacctgaagatgaagggtgactactaccgctacctggccgaggtggccaccggtgacgacaagaagcgcatcattgactcagcccggtcagcctaccaggaggccatggacatcagcaagaaggagatgccgcccaccaaccccatccgcctgggcctggccctgaacttttccgtcttccactacgagatcgccaacagccccgaggaggccatctctctggccaagaccactttcgacgaggccatggctgatctgcacaccctcagcgaggactcctacaaagacagcaccctcatcatgcagctgctgcgagacaacctgacactgtggacggccgacaacgccggggaagaggggggcgaggctccccaggagccccagagctgagtggtgcccgcaaaccgccggctgcccaatcaagtaccacaacg

SEQ ID NO: 63157 - DNA, 429 bp, Homo Sapiens
gtagcgagactctgatgataattctgtttctcatctgcccattcagtattttgttttcctgccgtcaagttgtcttattttttcaatgactacctgtccatcattgaggttctggtgaagctctctgcagctgtctcattccttcccaacgatagtaacaggaaatgactctttagcatcgatacctcaacatcaatttagggtagagattcctgcccctcttttgtcacagattaggaaattgagaactagggttaaccttgactatatttagaggtctttttgcctcttttccccttaacaaggatttcttatggtggtttcagtttcatttgcataaaggtattgagagggaacaaaaaacataaagctgagaatcttgagagagctcatctaccctgtctgttggtcagactcaaatgagagtta

SEQ ID NO: 63158 - DNA, 529 bp, Homo Sapiens
tgagatccaattctgcaccacagcctccttccctcccgtgccggtctgcagcagctctataagagcagcttttcctgtgtgcttgaaggccagagcatttagggacagaacttgaaagagaagattgcgaaaagggcctgagccaaggctgggaatgtgtccactttggtgggagagaaggtcggttgcttgggggacgtgaagctagaaaaataaatgagcccaggcatagaggactagagcccaggtgcacggttagcttcacagcaacagggagctaggccattggttctcaaacttaaggaaggatcagcatcacggaaggtcttgtcaaaagagtgctgggcaccactcccagcatttctggcacgttagatttgggatggcgcccaataacttgcatttctaacaagttcccaggtgatgctgtgctgcttgtccaggaaacacaatttgagagtcatgtgaaaggtgcttgaaggggtataccttaccctggtaaccttactcaaaagaagggtcagtgtgt

SEQ ID NO: 63159 - DNA, 575 bp, Homo Sapiens
  misc_feature (33)..(33): n is a, c, g, or t
  misc_feature (46)..(46): n is a, c, g, or t
acgtgctacaacatggatgaacttcgatgactntgtgccacatganagaagaagccagccacaaaaggccatatattgtatgaaatgaaatgtccagaatgggcaaacccatagagacacaaaaatctccgccacctccctactctcggctgtctcctcgcgacgagtacaagccactggatctgtccgattccacattgtcttacactgaaacggaggctaccaactccctcatcactgctccgggtgaattctcagacgccagcatgtctccggacgccaccaagccgagccactggtgcagcgtggcgtactgggagcaccggacgcgcgtgggccgcctctatgcggtgtacgaccaggccgtcagcatcttctacgacctacctcagggcagcggcttctgcctgggccagctcaacctggagcagcgcagcgagtcggtgcggcgaacgcgcagcaagatcggcttcggcatcctgctcagcaaggagcccgacggcgtgtgggcctacaaccgcggcgagcaccccatcttcgtcaactccccgacgctggacgcgcccggcggccgc

SEQ ID NO: 63160 - DNA, 817 bp, Homo Sapiens
gaggtctagatgttgatggaatatatcgagttagtggcaatctggcaacaatacagaagttaagatttattgtcaaccaagtcgtttctggaataccagcccttctatcagaactggatggagacctgtggacacccctagtaagctgcagatttttcacagtggtcatttgacctccagagcaagccaataatttgtcacttcattaaactgaagagaagctgaatttggacgacagccagtgggaggacatccacgttgtcaccggagcactgaagatgtttttccgggagctgcctgagccgctcttcccttacagtttctttgagcagtttgtggaagcgatcaaaaagcaagacaacaacacaagaattgaagctgtaaaatctcttgtacaaaaactccctccgccaaatcgtgacaccatgaaagtcctctttggacatctaactaagatagtggccaaagcctccaagaacctcatgtccacgcaaagcttggggattgtatttggacctacccttctgcgagctgaaaatgaaacaggaaacatggcgatccacatggtctaccagaaccagatagctgagctcatgctgagtgagtacagtaagatcttcggctcagaggaagactgacagacaagacaagctactgaatacgttcacatctgtcttgatgcctaatatttttacatttctgtaaacatatttctgaaatattttttgcctttcaagcgacagatgcctcattttgtgaaaacttaatgatgattttgtgtttaagttccaaacatttgaataaaataattgacaat

SEQ ID NO: 63161 - DNA, 600 bp, Homo Sapiens
  misc_feature (297)..(311): n is a, c, g, or t
atggtcatcaagtacacaaggagaataatagatggggtttattaaagcgagcaaagtctgcattttacctggtgcgcatgagtggggtctttaagagttttggtggctctcccatgtttcctattacccatggatttaccctgagccttcctatcacattataaataacagttcatctaaagagccacttttctttctgattcagtaacatttgcctacataagttttcatttatttgtgttttatttattacagggctgctattttcataatgtacatgaacaatgtcacagaacnnnnnnnnnnnnnnngaataattataagtatcagtaaaggaagtgaaagacaggattgcatttaatagataaaacgtttaggcaataattgaacaaaagaatcctggcatatttctaacactaatggcaatttacttatggtatttattttcagtagtaaagacccagcttgaatgtaaattttgtatagtgtaagtatgaagaacatagtgcaactgtacaggtagtcaccagttattgtgatatgataaataattgggctattttgatgaagaaaacttagttcatttgtttctactttcta

SEQ ID NO: 63162 - DNA, 709 bp, Homo Sapiens
  misc_feature (129)..(192): n is a, c, g, or t
ggaggaggcggcggctcgaggccgtctggagcgcacccgtctcggagcgcttgcgctgccccgcggggacaggcccggacgggcgccgccggccgccagcgcccgcccgtctcgcagcaagagaggtgnnnnnnnnnnnnnnnnnnnnnnnnnnnnnnnnnnnnnnnnnnnnnnnnnnnnnnnnnnnnnnnntgatgtgtcagagggctctgaagtgcccgagagtgaccgtcctgcaggtgcccagcaccaccagcttaacggcgagcggggacctcagagtgccaaggagagggtcaaggagtggaccccctgcggaccgcaccagggccaggatgaagggcgggggccagccccgggcagcggcacccgccaggtgttctccatggcagccatgaacaaggaagggggaacagcttctgttgccaccgggccagactccccgtcccccgtgcctttgcccccaggcaaaccagccctacctggggccgacgggaccccctttggctgtcctcccgggcgcaaagagaagccatctgatcccgtcgagtggaccgtgatggatgtcgtcgaatattttactgaggctggattcccggagcaggcgacagctttccaagagcaggaaattgttggcaaatctttgctgctcatgcagcgcacagatgagcacaccggcctgtccacggccataatggggatccgcagt

SEQ ID NO: 63163 - DNA, 816 bp, Homo Sapiens
aatcggtctctgggctgggataccatgtgaaccttctgacctggagcccacacttttcagatcgtcgtggctcaggtaaaccccgaccaatagagtgaaggctttgagctctataataattcaactcaaaatgggtctcctgagagtcctcagctgccttgggcagaatatagtgaaccaaagaaattgcctggtgatgacagactgatgaaaaatagagctgatcaccgttccagccccaacgtagcaaatcagcctcctagtcctggagggaaaagtgcatatgcctctggaacaacagcgaagataacatctgtctctactggaaacctctgcactgaggagcagacgcctccgcctagacctgaagcctaccccatccccactcagacgtacaccagagagtattttaccttcccagcttccaaatcccaggatcggatggctcctcctcagaaccagtggccaaattatgaggaaaagccacatatgcacacagatagtaatcattccagtattgcaattcagcgtgttacacgttcccaagaagaacttcgagaagataaagcttaccaacttgagcggcatcgaatagaggcagctatggaccgaaagtctgatagtgatatgtggataaatcagagctcctcactggactccagtacctctagccaggagcatctgaaccattcctctaagtcggtcacacctgcttccacactgaccaaaagtggcctggccgttggaaaacaccagcagccataccggccacccttagccgtctgccactcccgtaccgggaatcccggtcagcct

SEQ ID NO: 63164 - DNA, 646 bp, Homo Sapiens
cctggtacgggagtggccatcgggcggagacgaggttgcgacctttccttccccagcaataaactggtctctggagatcactgtagaattgtagtggatgaaaaatcaggtcaggtgacactggaagataccagcaccagtggaacagtgattaacaagctgaaggttgttaagaagcagacatgccctttacagactggggatgtcatctacttggtgtacaggaagaatgaaccggaacacaacgtggcatacctctatgaatctttaagtgaaaagcaaggcatgacacaagaatcctttgggtctgggggtggtggcatctcccctaaaggaagtggtccctctgtggcaagtgatgaagtctccagctttgcctcagctctcccagacagaaagactgcgtcctatttcgtcgtttggaaccccaggatcaggaggatttggagcccgtgaagaagaaaatgagaggagatggggaccttgacctgaacgggcagctgttggtcgcacaaccgcgtagaaatgcccaaaccgtccacgaggacgtcagagcagcgggctgggaagccagacaagatggcggagacgctgacatgcatcatctgccaggagccccaaaggcccggcgggatgcacctacacg

SEQ ID NO: 63165 - DNA, 454 bp, Homo Sapiens
agcggaggtgaaggacgtccttccccaggagccgactggccaatcacaggcaggaagatgaaggttctgtgggctgcgttgctggtcacattcctggcaggatgccaggccaaggtggagcaagcggtggagacagagccggagcccgagctgcgccagcagaccgagtggcagagcggccagcgctgggaactggcactgggtcgcttttgggattacctgcgctgggtgcagacactgtctgagcaggtgcaggaggagctgctcagctcccaggtcacccaggaactgagggcgctgatggacgagaccatgaaggagttgaaggcctacaaatcggaactggaggaacaactgaccccggtggcggaggagacgcgggcacggctgtccaaggagctgcaggcggcgcaggcccggctgggcgcggacatggaggacgtgtgcggtcgca

SEQ ID NO: 63166 - DNA, 460 bp, Homo Sapiens
ggccctggagtggtgcgtggcggtgtacgccatcggcttcatcctagcggccatcgccatcctgctgaacctgggggagtgcaccaacgtgctacccatccccttccccagcttcctgtcggggctggccttgctgtctgtcctcctctatgccaccgcccttgttctctggcccctctaccagttcgatgagaagtatggcggccagcctcggcgctcgagagatgtaagctgcagccgcagccatgcctactacgtgtgtgcctgggaccgccgactggctgtggccatcctgacggccatcaacctactggcgtatgtggctgacctggtgcactctgcccacctggtttttgtcaaggtctaatactctcccaagaggctcccgttccctctccaacctctgtgtcattctggcccgagttttcgtttatggagtacttctgtcctccgcctttcg

SEQ ID NO: 63167 - DNA, 430 bp, Homo Sapiens
gaggatacgatgtcgtccatgacccaggcggtgactccaacgatgctttcaccagtgatgatgcagttgacacggaggggacagctgctgagacgcactatacttacttccccagcacgggagtgggagatggggcagggggtaccacatcggggagtacagctgctgttgttactacccaggcctcagaggcactgctggggcaggcgacccctcctggcactggtcaattctttgtgatgatgtcaccacaagaagtactgcagggaggaagccagcgctcaattgcccctaggactcacccttattccccgaagtcagaagctccccggacgactcgggatgagacacgcagggctcagcataatgaagtggagcgtcgccgccgagacaagatcaacaactggatcgtgcagctcgcccctgagtt

SEQ ID NO: 63168 - DNA, 464 bp, Homo Sapiens
cataccccagacaggagttcctgatagtattgctgttggaggaggacctccacagagctctgttgttcagaatcatagtacagggccacaacctgttacagttgtgaattctcagacattgcttcaccatccatctgtgattccacagcagtctccattacacacagtggtaccaggacagatcccttcaggcactcctgttacagtaattcgaccagctgtcccacagagtcatatgtttggcagagtacagaacataccagcatgtacttctacagtttcacagggtcaacagttaatcaccacatcaccccaacctgtgcaaacttcatctcaacagacatcagctggtagccagtcacaagatactgttatcatagcacccgcacagtactgtaacaacttctgcatcctatattgtctcagctacttctagtacagaattttcatgtaactacacggac

SEQ ID NO: 63169 - DNA, 1483 bp, Homo Sapiens
  misc_feature (361)..(402): n is a, c, g, or t
tgtggcgggtgaaaatagccggcgggcaagcagcccccaagcccctcaagagagaacaggcagaaaaggggaggggaagggcaggggtgcttggcgggtgaacaagcccctccacccagttccctacccgggctatggggctcccaaccatcagccactccccaccttcccactcccaatccggccggggcttaaggacaccacccagaatcccagtcgcccgcttggcaccgtacacccacgacagagacagagaccagccatccgccacacgatgcgagctggctggggagggggccagccccccaggcccctacccctctgaggtggccagaatggatttgtggccaggggcatggannnnnnnnnnnnnnnnnnnnnnnnnnnnnnnnnnnnnnnnnnccaccctgtggttctgcagccccagtgccaagtacttcttcaagatggccttctacaatggctggatcctcttcctggctgtgctcgccatccctgtgtgtgccgtgcgaggacgcaacgtcgagaacatgaagatcttgcgtctaatgctgctccacatcaaatacctgtacgggatccgagtggaggtgcgaggggctcaccacttccctccctcgcagccctatgttgttgtctccaaccaccagagctctctcgatctgcttgggatgatggaggtactgccaggccgctgtgtgcccattgccaagcgcgagctactgtgggctggctctgccgggctggcctgctggctggcaggagtcatcttcatcgaccggaagcgcacgggggatgccatcagtgtcatgtctgaggtcgcccagaccctgctcacccaggacgtgagggtctgggtgtttcctgagggaacgagaaaccacaatggctccatgctgcccttcaaacgtggcgccttccatcttgcagtgcaggcccaggttcccattgtccccatagtcatgtcctcctaccaagacttctactgcaagaaggagcgtcgcttcacctcgggacaatgtcaggtgcgggtgctgcccccagtgcccacggaagggctgacaccagatgacgtcccagctctggctgacagagtccggcactccatgctcactgttttccgggaaatctccactgatggccggggtggtggtgactatctgaagaagcctgggggcggtgggtgaaccctggctctgagctctcctcccatctgtccccatcttcctccccacacctacccacccagtgggccctgaagcagggccaaaccctcttccttgtctcccctctccccacttattctcctctttggaatcttcaacttctgaagtgaatgtggatacagcgccactcctgccccctcttggccccatccatggactcttgcctcggtgcagtttccactcttgacccccacctcctactgtcttgtctgtgggacagttgcctccccctcatctccagtgagctccctgcgagt

SEQ ID NO: 63170 - DNA, 2012 bp, Homo Sapiens
ggccgatgctgtgggggtgggcgtggagagaattcttctgtgggtcctctggtgtggagtggtcggcttggtgtggtgtgcggaggagctccaggcccgtcggcgcggagtggtctcacgtgtgaaacatggctacagattggctgggaagtattgtgtccatcaattgtggagatagcttgggtgtctatcaggtaagagtgtcagctgtggatcaggtcagccagaccatttctctcacccggcctttccataatggagtgaagtgtcttgttccagaagtcaccttcagggcaggtgacattacggagttaaaaattctggagataccaggacctggagacaaccaacattttggagaccttcatcaaacagaattaggcccctctggtgctggctgccaagtgggcatcaatcagaatggcacaggcaagtttgtcaagaagccagcctcttccagcagtgcccctcagaatatccctaagaggacagatgtgaagagccaggatgttgccgtttccccgcagcagcaacagtgctcaaagagctatgtcgacaggcacatggaatccttgagtcagtccaaaagtttccgtcgtcggcacaactcctggtcatctagtagcaggcacccaaatcaggcaactcccaagaaaagtggtttaaagaatggccagatgaagaataaagatgacgagtgcttcggggatgatattgaggagatcccagacacagattttgattttgaagggaacctggctctttttgacaaggcagctgtgtttgaggagattgatacctatgaaaggagaagtggtacccgttcccggggcatcccaaatgaaaggcccactcggtaccgccatgatgagaacatcttggagtccgagcccattgtctatcgacggatcatagtgccccacaacgtgagcaaggagttctgcacggactctggcctggttgtcccaagtatttcctatgagctgcataaaaagctgttgtccgtggctgagaagcatgggctgacccttgagcggagactggagatgacaggtgtgtgtgccagtcagatggcactgaccctcctcggaggacctaacaggttgaatcccaaaaatgttcaccagaggcctacagtggctctactgtgtggacctcatgtgaagggggctcagggtatcagctgtggaaggcacctagccaaccatgatgtccaggtcatccttttcctgcccaattttgtcaagatgttggaatctatcaccaatgagctgtcgctcttcagcaagacccaaggccaacaagtgtctagcctcaaagatctgcccactagccctgtggacctggtcatcaactgcctggattgccctgagaacgtcttcctgcgcgatcaaccctggtacaaggcagctgtggcctgggccaaccagaaccgggcaccagtactcagcatagaccctcctgtgcatgaagtcgaacagggcattgatgcctaaatggtcactggcactgggcctgcctctgccactgggggagcacgcaggccgtatctatttgtgcgacattggattccccagacaggttcttcagggaggtgggcatcaactaacatcgcctttggctgcaagtttgttatcccactgacactctgcttaagggtccctgcgcaggcaggactctgctgtccctgtgctcctgaataacaaaacgccttaggatatgaagccttcatggaccgttgttaaaggttgccctagggggtggcctactgtgaagaacagcacgttacttaaagtgactgtctggctaccgggagcctcccacgggtccggctgtgacaagctacgatacacccagatcttacctaagccttacgcaagggcctgttaagcgaagatcacatggtcagtaccagtgggacacatgaagcgactggcgtcgcataaagggggccacgccgcaccctgaagggccaggcaaagggagccagtgtggactccacgggttggggg

SEQ ID NO: 63171 - DNA, 422 bp, Homo Sapiens
aatagcagcggagaaggtgtacaacacccgccgtcaggaagtgcttcgggagatccaggatgcagtggccagggcggggcaggtggtgcgggaagccgttggagggctgcagaccgttcgctgttttggtgccgaggagcatgaagtctgtcgctataaaggggcccttgaacaatgtcggcagctgtattggcggagagacctggaacgcgccttgtacctgctcgtaaggagggtgctgcacttgggggtgcagatgctgatgctgagctgtgggctgcagcagatgcaaggatggggatttcaccccagggcagcctgctttcctttatgatctaccaggagagcgtggggagctatgtgcaggtgagcgagaagccaagcctgctctcctttttttccctcacgtgcggttgaaaggc

SEQ ID NO: 63172 - DNA, 744 bp, Homo Sapiens
cggcgtgcacagaatctcgtcctattgaagatttattcagggtaaagtatgtctgagaagaaacggtgcaggagaatacttgaacaggctttcaaggggggctgcaaagctcctcatgctatgatatcttcttgtggaacaatcccaggaaatccatatcccaaaggaagacctagccgcataaatggaattttcccaggaactcctttgaaaaaagatggtgaagaatgtactaacgaaggcaaaggaatagctgcacgaattcttgggccatccaaaccacctccttcaacatataatccacataaacctgttccttatccgatacctccatgccgaccacatgcaactattgcaccaagtgcttataacaatgcaggtctggtaccattagcgaatgtcatagctccacctccacctccatatactcctaatcctgtaggaacagagaatgaagacctttcgaatccgtcaaaacctatacagaatcaaacattttccaccccagcaagtcaactcttttctcctcatggttctaatccttcaacacctgctgcaactcctgttcctactgcatccccagtcaaggcaattaatcatccatcagcatcagcagctgccaccgtttctggaatgaacctgctgaatactgtccttcctgtgttcccagggcaggtctcctcagccgttcacacacctcggccatcaataccaaacccaacagttatcagaaccccttcattg

SEQ ID NO: 63173 - DNA, 711 bp, Homo Sapiens
ggacctatgaatttgtactttttgccatctcaccctgtttacatgccataggtgttctggtctggctgatgggtgcctgttaaatcaggttgtgctgccagtgagttgtagatttatgctggaagaatggagaatggaaacaggccttcagcccattggctgcgctggagaggaaagcatggttcctttcttaaagaaatcttccatgttttctctaagtaacacttctttattgagcatttaatgtggacatactataaaaaagaatttttaatgctaatgagaggtttagcacttaagatcagattcaagagaatatagattcctgataaatttcactgtttgcaaattgagcagtgctgcaacatgtactgtatgaaggccataaaatagagctagtcatggataacagaccttaaccagttaggtgctagatcctaagaggcactcacaaggccagcaggtgcttccttggctcccatgatcgatcgaggcatagtgaaagaagggcaaagacagctttccagagctttgtgctcaggctactaaagtagttgttataggtgtgttaacgaagaagcttagtgaggagcagaatgtggtactatattcatttaactcaacccagaaccattggtcagaattggtgggactggcatcttccctcagacttgcagttgatagaggctgtggtgttctcactagaacttt

SEQ ID NO: 63174 - DNA, 601 bp, Homo Sapiens
taagcctttcttccttttgagagagcaccgccgatggtggttatactccttgtgtattctctctctcctactggttatatcttgcaattatgcatctatgactcgtcagctcggttgctttatcatgaataatgtgtgtgaccttgcagttcttccacagttcagcaaacaagtgctagcttcactgaccaaaaattaaggaaggaaaacacagtttttaaaacgatccatcttttaacagccgaaaccgatgtgtctatggtgctgcaccttgctgttgtacttctgaaatcagacgtgtgtgaacgatcatttctgacttaaccgtgagatgctcacgagtacccttcctgttgttttgttagcattgaaatcgagactatttatttggaatatatacaacagtgtttttccactgtatttcatttgcaaaagttgagaactgctttctctaccctttgccaaattaatgaatatccaatatgggattttcaaagactccgatatggtgaacctattaaacctagaaattgtattcatcctttcatgactgtggcctgagttccccagccccaccacccctagacaccgtcgaaggggt

SEQ ID NO: 63175 - DNA, 536 bp, Homo Sapiens
tcacaggtcactgcaactgccgcccaggggtgtctggtgtgcgctgttgaccagtgtgcccgtggcttctcaggaatctttcctgcctgccatccctgccatgcatgcttcggggattgggaccgagtggtgcaggacttggcagcccgtacacagcgcctagagcagcgggcgcaggagttgcaacagacgggtgtgctgggtgcctttgagagcagcttctggcacatgcaggagaagctgggcattgtgcagggcatcgtaggtgcccgctacacctcagccgcctccactgcactcaggcttgtgtaggctacagaggagctgcggcgtgaaattggggaggcctctgaggcacctgactcagctcgaggcagacctgacagattgtgcaagatgagaacttcaatgccaaccatgcactaagtggtctggagcgatataggcttgcacttaatctcacactgcggcagctcgaccagcatcttgacttgctcaaacattcaaacttcctgggtgcctatgacagcatccgg

SEQ ID NO: 63176 - DNA, 276 bp, Homo Sapiens
aaacatcgatgaaaatgctccagtcactgaaagggctaaactgatttccttgccaactagtaaaaactggaccttcggaccccaggacgtcgatgaactgatcttcatgctgagcgacagccctggggtcatgtgccggccttcccgagtcaagcagatgtttgcctccagagccctgccggaagtcggtgtatgattgggactgctcgttaacacaagcgagatgaagaaactgatcacccacatgggggatgagcaccaagcgatcctctagag

SEQ ID NO: 63177 - DNA, 554 bp, Homo Sapiens
taaaatattttcattggctttgcaaatagcagaaaagttgtcaaaccaagggggaaaagctactgcagtatttctgcctctttagattcacagaagtcttcaggagcaaacacaagcaaagacagaccacatgccagtggtactgatggagatgaaagtgaggaagacccacctgagcataagccaagcaaactgaagaggagccatgaactggacattgatgaaaacccagcttcagactttgatgacagtggttcccttctaggattcaagtatggctcaggacaaaaatatggtggaatcccaaatttcagtcatcggcaggtcaggtatttagagaagaatgtgaagcttaagtctaagtacctagacatgcgcagacaaataaagatgaaaaacaaacacatcttctttaccaaagagtcagaaaaaccatttttcaagacaaagcaaaattctgagtaaggtagaaaaattcctcacatgggttaataaaccaatggatgaagaagcatcacaggaatcatcttctcatgaccatgtgcacgacgctt

SEQ ID NO: 63178 - DNA, 474 bp, Homo Sapiens
cccccgtcgaccttctgctctctaggggatctttacggagccataggcttttttagtgagactgactcgcaccgtagtggtagggaagcagaaggacttagtccagcgaatactttatgtcctgacctactttctccgttgctctgagctacaagagaaccagctgacctggagtggcaatcatggtgaaggtgaccaagttttaaatgggagcaagatcataacagccttggagaaaggagaggtggaggagtctgagtatgtggtcattacggtgaggaacgagcccgctcttgtaccccccatcctaccaccaacagcagcagagagacacaacccctgggcgacagggtttcctgagtgcccagagtgccctgacagtagagacctgtgtcttaaacctgacaaagaagctaacaggaggccagagcagggttctgaggcttgcagcgcaggttgcctggggccagcatc

SEQ ID NO: 63179 - DNA, 449 bp, Homo Sapiens
atgggtgctccatcccccctgagtgttgtttctgtgttggacaattctatgcaaactagagccaaagtggaagagggtgcaagtccctgcctggggccccagacgccccctcctttcttgctgcctggagcaggggcagtgctgttagtggctactccatggtgtgaacagcccatcctggccaccttccacaggaaacctgacctgaaggacagaagaggaaggaagcaggctttgccacaaatgtcagtgcagaactctggctggccccaccaagaagacagcatccaagccccgggatccaggtccaccagccaactcagacagtgactcaggccacctgccgggggaggaccctgaggatacccatgctcaggtagtagagtcgtgcccttcctctgagaccaacatgtcctctatcctgtggagtggccacccttttccaccaa

SEQ ID NO: 63180 - DNA, 474 bp, Homo Sapiens
ctgctccgcccctctctgccagacccgcccggaacggggctcgtcgccgccagtagccgcagcaccgcagccttgggcctcgcgccggctatggccgtgccctggggctgagccctcaggttgtgaccgagattcccgacgagagagactgaggggaagagaggaaggaggggcgggctcctggcaaggcattcgctcctgagcggaatcctgcaaagatggagaaggaggagacaacccgggagctgctgctgcccaactggcagggtagtggctcccacgggctgaccatcgcccagagggacgactgtgtgtttgtgcaggaggtgacgcagaactcccctgcggcccgcactggggtggtcaaggagggggaccagattgtgggtgccaccatctactttgacaagctgcagtcgggtgaggtgacccagctgctgaacaccatggtgcaccacacggtgggccttgaag

SEQ ID NO: 63181 - DNA, 598 bp, Homo Sapiens
tagtcccacctcaggccatctttctctcaaacgctgcctcctgtcatatacccaaagcttctgccacatggactctttggcccagtaacaacatattcttttgtgtttctttgcctttatacatcctattctgaccataatgtactttcttccctcagttccacaggaaaaattcctagtcatccttgtagaaccagttcactgttccattccctcctgaagcttccccacatcctccgtgctccccatcccccttcagcatttggtccccatctccatttcagaacaccttcgacggtgttctgaagataaatgccaaaaatttcagctcttattttaatggagtgttaaaattctgattcatatagtcttaaattatcaactccttaaatgtgcttttgaaccaatttgcagaagctcacatagcaagttcataagtttccaaaaaggaagcccatacataacagctggcaggtgtctcgctcctaaccactcaaacatgctcctgacgaccttctcctctcctacaaccactttcctgcagcttcgcacagcgctcactacctgcacagcactcttcctctccccctctttcccc

SEQ ID NO: 63182 - DNA, 302 bp, Homo Sapiens
aggtaaaaatctgtaaatgtgcaccaagagcaaaggatcaacttgtagtcatgatgttctgtaaagactacaaatccctttgtttttctcaattgacttaactgcatgatttctgttttatctacctctaaagcaaatctgcagtgttccaaagactttggtatggattaagcgctgtccagtaacaaaatgaaatctcaaaacagagctcagctgcaaaaagcatattttctgtgtttctggactgcactgttgtccttgccctcacatagacactcagacaccgtcgaagggggatcctt

SEQ ID NO: 63183 - DNA, 1134 bp, Homo Sapiens
  misc_feature (1064)..(1064): n is a, c, g, or t
atgttaaagcatgaccgggatcgagctttctatggactcaagcaggtgaataaggccaatgaagccatggcaattgacacattgctcatcagcgatgagctgttcaggcatcaggatgtagccacacggagccggtatgtgaggctggtggacagtgtgaaagagaatgcaggcaccgttaggatattctctagtcttcacgtttctggggaacagctcagccagttgactggggtagctgccattctccgcttccctgttcccgaactttctgaccaagagggtgattccagttctgaagaggattaatgattgaaacttaaaattgagacaatcttgtgtttcctaaactgttacagtacatttctcagcatccttgtgacagaaagctgcaagaagggcactttttgattcatacagggatttcttatgtctttggctacactagatattttgtgattggcaagacatgtatttaaacaataaactaagaaggaaataatctccacgtactaccatcttgattaaattgtgtaattttttataggaattatgagttatctgtagtacttggaaacagaaaatgtgtgtatttaaagacgatgcctatgcagtatattgtttgggatagattgcaaaatttcacactgcatgctttgaaacagttgttccttagaaaaagcttttgctatcttatcctgtttacattatttctttattttaattctgcttggatgttcttgcattgcatttaatgatcccttttctccccacctccacacactacatttttgtttagattgtaaatagttttactattttaaatgattgccgtacaattagtagacttgaagacaagttttaaatatttttcttcaaaggcttgttaaaccaatcatgttaaaaggaaattcttggttttggtttgttgttgttagcattagtcatatttgatttagagggtaacttaaatcagttatttttagctttttagaactttgatctgctagggattgtcaaaataatctccttgaggcatcttttatttttaaaatgagaattanagaatgtgattttgccttgttatgtgggctaattaagtgggcaaagcttgggaagtcatttcccagtcct

SEQ ID NO: 63184 - DNA, 1007 bp, Homo Sapiens
  misc_feature (87)..(120): n is a, c, g, or t
  misc_feature (575)..(595): n is a, c, g, or t
ggtgcatttcttcactccgaagccaaatgacaaataaagtccaaaggcattttctcctttgctgaccaaccaaataatatgtatagnnnnnnnnnnnnnnnnnnnnnnnnnnnnnnnnnnccacagagagagagctgcaagagcatggaattcatgtgtttaaagataatcctttccatgtgaagtttaaaattactatatatttgctgatggctagattgagagaataaaagacagtaacctttctcttcaaagataaaatgaaaagcacattgcatcttttcttcctaaaaaaatgcaaagatttacattgctgccaaatcatttcaactgaaaagaacagtattgctttgtaatagagtctgtaataggatttcccataggaagagatctgccagacgcgaactcaggtgccttaaaaagtattccaagtttactccattacatgtcggttgtctggttgccattgttgaactaaagcctttttttgattacctgtagtgctttaaagtatatttttaaaagggaggaaaaaaataacaagaataaaacacaggagaatgtattaaaagtannnnnnnnnnnnnnnnnnnnngccaattaacagtatgtgccttgggggaggagggaaagattagctttgaacattcctggcgcatgctccattgtcttactattttaaaacattttaataatttttgaaaattaattaaagatgggaataagtgcaaaagaggattcttacaaattcattaatgtacttaaactatttcaaatgcataccacaaatgcaataatacaataccccttccaagtgcctttttaaattgtatagttgatgagtcaatgtaaatttgtgtttatttttatatgattgaatgagttctgtatgaaactgagatgttgtctatagctatgtctataaacaacctgaagacttgtgaaatcaatgtttcttttttaaaaaacaattatcaagttttttttacaataaacagttttgattt

SEQ ID NO: 63185 - DNA, 1381 bp, Homo Sapiens
  misc_feature (544)..(545): n is a, c, g, or t
  misc_feature (547)..(548): n is a, c, g, or t
  misc_feature (783)..(797): n is a, c, g, or t
  misc_feature (986)..(986): n is a, c, g, or t
  misc_feature (1010)..(1010): n is a, c, g, or t
  misc_feature (1349)..(1349): n is a, c, g, or t
  misc_feature (1353)..(1353): n is a, c, g, or t
caaatgtaatgtcagacttgctgccattttacacatgtgctgatgtttacaatgatgccgaacattaggaattgtttatacacaacttgccaaattatttattacttgtgcacttagtagtttttccaaaactgctttgtgcatatgttaaagcttatttttatgtggtcttatgattttattacagaaatgtttttaacactatactctaaaatggacattttcttttattatcagttaaaatcacattttaagtgcttcacatttgtatgtgtgtagactgtaactttttttcagttcatatgcagaacgtatttagccattacccacgtgacaccaccgaatatattactgatttagaagcaaagatttcagtagaattttagtcctgaacgctacggggaaaatgcattttcttcagaattatccattacgtgcatttaaactctgccagaaaaaaataactattttgttttaatctactttttgtatttagtagttatttgtataaattaaataaactgttttcaagtcaaaaaaacannanncagcgaagccaacgacgctacccacacccacagactattctactatgtgttgctataataccaaatcaaacgccagccgcgcccccctcccgtgaaagagaggcgtgttgctacacccaccccacaggagaaagctgtccctatatccccgcctttacacactttcttctgaacggggccccctctgggcgcgccgcgcgaagatagctgttcacaccacacacctcgtggagtnnnnnnnnnnnnnnntccgccccccaccgcccaatggaggagaaaaacggggcttaattatatatttgtttccataaataacgaggagaaacattcaatgtgttaacacaataatcaccaatacacccggggagagaatactccccccccgaccacgacagctttagaatcatgcaccctggtctcccgtggcgggtctgtggngcaaacgcgagacggggtttggcnttgtcctcctcaacaacaccttcccataatcaatgcctcccccatgaccgcactccaccgacgagcgcctctctcctcggcaggaggtagatctcttcaaccaaactatgaagagccgcccactccacatacgaaaataatccacaagcagcacgaatgcaaggcacaccaacaaaccccggccgcgccccgcctccctcccagcattcctcctccgcacagacccaacaattacggatgtgtgaccacacgaaagatgtcacatatataagaatcactggggctccccccagcaaaaattatcctctcctaccatcggccgccagttcttgtgcacanagantttgtacttggtaaacaaacaaaacaca

SEQ ID NO: 63186 - DNA, 358 bp, Homo Sapiens
aagtacagggataacaggtgtgagccactcgactcagccaataatgcatattttgatctccaccttgctttactgtcagaatgagtacgacagagaagaaatcattaaacaccaggattctacttcctgctggagttttctgcctgagatgttaggagaggaaactctcaggatctcagaaaatcacatctatcacggttggtagaagtagattctagagtcagccagaactgagttcaagtcccaactgcatggctttgggcaactgacttgtcctctctgaggcccagattccctttcggtaatgtggagatggcagtgtatctacctcacaaagcagtggtgagattacaataag

SEQ ID NO: 63187 - DNA, 1244 bp, Homo Sapiens
acaggagtctttgctttgggacggcgggctgagcaacttaaactatttgaaatgctagtgatcgaagctcgccagccactgttgcggcatggtccagttcgtgaggctctgctcaccctgctggatgcctgtggcagccctgtgcccagtaagcccagcaactggatagaaggcttggtgctacttctcagccagctgtgtgtttgtgtggcccaggagccttcattgctcgagttcttcctgcagccacctcctgagcctggagccgctccccgtcttcttctcttttctcgccttgtcccttttgtgcatcgagagggcaccctgggccagcaggcccgtgatgccctacttcttctcatggctttgtcagctgggagccccactgtgggccgctacatcgcggatcactcttacttctgcccggtgctggccacagggctcagtgccctgtactcatcactgcctcgaaagattgaggttccaggggatgattggcactgtctgcgacgggaagactggctgggagtgccagcccttgtactcttcatgagttccctggagttctgcaatgcagtaattcaggtggctcaccccctggtgcagaagcagttggttgattatatccataatgggttcctggtgcctgtcatgggtcctgccttgcacaagacctctgtggaggagatgatcgccagtaccgcctacctggaacttttcctacggagtatctcagagcctgctttgtccgtaccttcctgcgattcctgttgttgcaccggatgaaccccacacatcctcgacaccctcgttgctcgtatcggcagtaactccggctctgcatggtctctctgagtctctttcaggaccctcctggaacctcagttgtgaggatgtccctgctgccggtggttctccgcgtcatctcgtccctgtacccaacgttatgctgagccaaaacccggcggcccgacgtggccctatctggcgacgcgtgaccagtttcctctcccaaatccacgctggagtcggccaggcccagccactcgccaagcacgcccaggcccggcctgcacccagactggaccccccctggcgaagccgggccacaccactcttgggctcccgcgacaacgggcgacaaacggcgccgagcacggatggtcgcagccacagcggatcggagcgaagaacgagccgagcgcgtagcgcgccagcgccacgccacgcgcgagagcgagagg

SEQ ID NO: 63188 - DNA, 392 bp, Homo Sapiens
gtacttcgacggtgtctggagtcggctagtgctatcacccaacatgccccatgcattcctcacctgtgacactgtgatttttggctgggctattggtggagagggcttttcttatccacctcatgttggattatccctggcactccattagatccgcattatgtgctcctagaagtccattatgataatcccacttatgaggaaggcttaatagataattctggactgaggttattttacaccaatggatataacggaaatattgatgctggcggtgatctgaggctgggcctctggggtgagcctcttccataccatccctccagggatgcctgagttccagtctgagggtcactgcactttggagtgcctggaagaggctctggaagccg

SEQ ID NO: 63189 - DNA, 826 bp, Homo Sapiens
ggggcgcgttgtttcccgcggtagtcagggcagtttctaccgcaggcttaaggaggcttcgggctcctgggatttctgtccgcgctcctggccctcgtccttcgcgccagagcaggttcgcaaactcctcagacccttctgctcccggccgccgctttccgccggggcgagacccccaggttcaaaatgagcctgtttggaacaacctcaggttttggaaccagtgggaccagcatgtttggcagtgcaactacagacaatcacaatcccatgaaggatattgaagtaacatcatctcctgatgatagcattggttgtctgtcttttagcccaccaaccttgccggggaactttcttattgcaggatcatgggctaatgatgttcgctgctgggaagttcaagacagtggacagaccattccaaaagcccagcagatgcacactgggcctgtgcttgatgtctgctggagtgacgatgggagcaaagtgtttacggcatcgtgtgataaaactgccaaaatgtgggacctcagcagtaaccaagcgatacagatcgcacagcatgatgctcctgttaaaaccatccattggatcaaagctccaaactacagctgtgtgatgactgggagctgggataagactttaaagttttgggatactcgatcgtcaaatccctatgatggttttgcaactccctgaaaggtgttactgtgctgacgtgatataccccatggctgtggtggcacttgcagagagggggcctgaattgtctatcagctagaggaaccaccttcttgaattcaggaggatagaaatctccctgaaa

SEQ ID NO: 63190 - DNA, 595 bp, Homo Sapiens
ttcgcgtagctcactgcgatgatgctgctggcaacgctctggatcctcttctacctcctccgaaccgtgggctgcccctgcgcggtaccctaccgggacgcgcacgctggccccatctggctccgaggtgggctggtgctgtttggaatctgcaccctcatcatggatgtcttcaagaccggctactactccagtttctttgagtgccagtcagccatcaagatcctgcaccccctcatccaggctgtgtttgtcatcatccagacctactttctctgggtctctgctaaagactgcgttcaccgtccacctggatctgacctggtgtggtctcatgttcacactcaccaccaacctggccatctggatggcggccgtggtggatgaatctgtgcaccaatcccactcctacagcagttctcacagcaacgccagccacgcccgtctcatctctgaccagcatgcagacaagccggtcggaggagactcctgcctctgcagcaacggccgtctgccagatcttccagcaggggtacttatacctatatcccttccacatcgagtccagcctcttcgactacaccatgctgtatgt

SEQ ID NO: 63191 - DNA, 1085 bp, Homo Sapiens
ccaaagacggggtttcattagagttggtgatgtatgaagggaagaaaattcatggctgactcagggacccaatctatgataaaacctatgctggtggtagactagggttgtttgtcttctctcaagaaatggtgttcttctctgacctgaaatacgaatgtagagatccctaatcatcaaattgttgattgaaagactgatcataaaccaatgctggtattgcaccttctggaactatgggcttgagaaaacccccaggatcacttctccttggcttccttcttttctgtgcttgcatcagtgtggactcctagaacgtgcgacctgcctcaagaaaatgcagttttcaaaaacagactcagcattcagcctccaatgaataagacatcttccaagcatataaacaattgctttggtttccttttgaaaaagcatctacttgcttcagttgggaaggtgcccattccactctgccttagtcacagagcagggtgctattgtgaggccatctctgagctgtggactcaaaagcattttcaggcatgtcagagaagggaggactcactagaattagcaaacaaaaccaccctgacatcctccttcaggaacacggggagcagaggccaaagcactaaggggagggcgcatacccgagacgattgtatgaagaaaatatggaggaactgttacatgttcggtactaagtcattttcaggggattgaaagactattgctggatttcatgatgctgactggcgttagctgattaacccatgtaaataggcacttaaatagaagcaggaaagggagacaaagactggcttctggacttcctccctgatccccacccttactcatcacctgcagtggccagaattagggaatcagaatcaaaccagtgtaaggcagtgctggctgccattgcctggtcacattgaaattggtggcttcattctagatgtagcttgtgcagatgtagcaggaaaataggaaaacctaccatctcagtgagcaccagctgcctcccaaaggaggggcagccgtgcttatatttttatggttacaatgcctcttctaagacggac

SEQ ID NO: 63192 - DNA, 512 bp, Homo Sapiens
ctcaaaggggtttgcccttgttggtgttggatttgagcatcttcaattaagttaatggatctgttacctattagagaacttcatggtcagaatcctgttgtaactccatgcaatatacagttcctgagtcaatttgaaatgcagtccaggataactacacaatccggacaaatgtctggggaaggtcaagctggtcctccaggaggcagttcccgtgcagcatttccacaaggtggtagaggacggggccgttttccaggggctgttcctggatggggacagattttcctagggccagcaggaccaggagggcctaccacccaccttttctcagctggacagactccaccacgtccacccttaggtcctccaggcccacatggtccagccaggtcctccacctcctgatcaggttctgcctcgtcctctagctgggcatctctaatcgaggagatcgcctgtacaccatccagttctttttcgtggacaaccttttggcagcctacacttcg

SEQ ID NO: 63193 - DNA, 733 bp, Homo Sapiens
gactacaggaccactcatgaagtgtcctttgaggaaacggtggacgtgcttatggaagcagccgacacggtgagagtgaccccatgcaagggggtctcctgagaatatcatgctggggcagctggctccggccggcactggttgctttgacctcctgcttgatgcagagaagtgcaagtatggcatggagatccccaccaatattctcggcctggggtctgctggacccaccggcatgttctttggttcagcacccagtcccatgggtggaatctctcctgccatgacaccttggaaccagggtgcaacccctgcctatggcgcctggtcccccatgtgttgggagtggaatgaccccaggggcagccggcttctctcccagtgttgcgtcagatgccagcggcttcagcccaggttactcccctgcctggtctcccacaccgggctccccggggtccccaggtccctcaagcccctacatcccttcaccaggtggtgccatgtctcccagctactcgccaacgtcacctgcctacgagccccgctctcctgggggctacacaccccagagtccctcttattcccccacttcaccctcctactcccctacctctccatcctattctccaaccagtcccaactatagtcccacatcacccagctattcgccaacgtcacccagctactcaccgccccgaccttagctctcaccatcgctcttctactatgaacc

SEQ ID NO: 63194 - DNA, 471 bp, Homo Sapiens
tctacacgctcacacacacagatggggaaaggtacataataagttgcttatggtggtttctaggaagtgaaaggaacttggtggttgggggaagagtgtgtggaaacttctgtttacattgtcttttaaaatgtaccatgtacacacgatacctattcaaaaatgaaatgtattcttcacctcaggaagatctatgagagacatattctgtaaattatgaaccaatactttgacttctgtttacatttttttaatgtaccgtgtgcacatgatacctattcaaaaatgaaatgtattcaccttgggaagttctataaaaaaattctgtaaaaaattatgaacaaccctttgacacagcgattccttccccaggaatttatcttataaatacacttaccactcgtgtgaaaataagtacagtgctatgtgaaacatcagtaagaagcagacaccgtcgaataagctccgcta

SEQ ID NO: 63195 - DNA, 591 bp, Homo Sapiens
agacgatatccgaccttgagttacagtgccaagagttcatcagaaatagccaaggcttagagatgtttggagatgatgacaagcggaaaatacagtctcagttcaccgatgcccagaagcattaccagaccctggtcattcagctccctggctatccccagcaccagacagtgaccactactgaaatcactcatcatggaacctgccaagatgtcaaccataataaagtaattgtaaccaacagagaaaatgacaagcaagatacatggatgctgatggagctgcagaagattcgcaggcagatagagcactgcgagggcaggatgactctctttaacctccctctaagcagaccaggggtcttctcaccacatcacagtgaaaattaacgagcttaagagtgtgcagaatgattcacaagcaattgctgaggttctcaaccagcttaaagatatgcttgccaacttcagaggttctgaaaagtactgctatttacagaatgaagtatttggactatttcagaaactggaaaatatcaatggtgttacagatggctacttaatagcttatgcacagtaagcactgctctac

SEQ ID NO: 63196 - DNA, 993 bp, Homo Sapiens
tccaataggggaggaggatgaggacgaggaggatggggagagcggtgcaccttcctggtggggctcattcagaagcaccgacggcggcagaggaagatgggcgaggacatgcacaccatcggctttggcatctatgaggttccagaggagttaagtgggcagaccaacatccacctcagcaaaaacttcttcctgacgaatcgcgccagggagcgctcagacaccttcatcaacctccgggaggtgctcaaccgcttcaagctgccgccaggagagtacattctcgtgccttccaccttcgaacccaacaaggatggggatttctgcatccgggtcttttctgaaaagaaagctgactaccaagctgtcgatgatgaaatcgaggccaatcttgaagagttcgacatcagcgaggatgacattgatgatggattcaggagactgtttgcccagttggcaggagaggatgcggagatctctgcctttgagctgcagaccatcctgagaagggttctagcaaagcgccaagatatccagtcagatggcttcagcatcgagacatgcaaaattatggttgacatgctagattcggacgggagtggcaagctgggggctgaaggagttctacattctctggacgaagattcaaaaataccaaaaaatttaccgagaaatcgacgttgacaggtctggtaccatgaattcctatgaaatgcggaaggcattagaagaagcaggttttcagatgccctgtcaactccaccaagtcatcggttgctcggtttgcagatgaccagctcatcatcgattttgataattttggttcgggggtttgggttccggctgggaaacgctattccaagatatttaaagccagctgggatcccgaagaataacggggaacaaatagaagctccaacccttatcctccttggggccccggtttccccaatgaaccttttgaaaggtaatgagcttaatcctggccctggc

SEQ ID NO: 63197 - DNA, 326 bp, Homo Sapiens
  misc_feature (295)..(295): n is a, c, g, or t
agtgtatgtccaagctggccaagttcaagccattgtggattgaggagccaacctcccctgatgacatgtctggggcactccaccattttccaaggcactggtcccattaggtattggtattgccacaggagtacagtgccacaatagagtgatatttaagcaactcctacaggcgaaggccctgcagttcctccagattgacagttgcagactgggcagtgtcaatgagaacctctcagtattgctgatggccaaaaagtttgaattcctgttgccccatgctggtggagttgcnctctgtgaactgttcagcatctcggatctta

SEQ ID NO: 63198 - DNA, 1144 bp, Homo Sapiens
  misc_feature (697)..(697): n is a, c, g, or t
cctagaggaccccagacagcggaccccatggtgactatgccaggagagactcttgcttctcgagttgcagcatcccagctcacttgcttaggttgtcttgagcttattgctaaaaacagacaagaatatgaagacatagctgtgaaggctgggaactgatctagaatacctgaagaaagttcgtggcaaagtctggaagcaaagaatatctagccctctgttcaacaccaaacaatacacaatggaactagagcggctctatctacagatgtgggagcattatgcagctggcaacaaacctgaccacatgattaagcctgttgaagtcactgagtcagcataaataaagactgcacaggagaattacccctatacctgagcctcaaccttctgggggaaagggaactagataacatacttcttacttgtctgtacagtaccttgttgcagatgggtgatatataatggtaatagaatagcacagccagacttgcttcctgcatggtagggagagacacaaaagatgggaaactgcttttccacaaggaatctccgtagaattttgcggcgaccagatggtgcataggtctggaaggtctgatctcccttggtcttccatgggatggttagtgtggaggggagatatagattgtccgggccgctttgtgattccatggattgattcagtcttctgganttttttttctttatattttgggtactggagcttttaaaaatgtttggtttcaggtatttttattcatgtgaagtgtatatgattctcttgagataaggttttaagctaaaatgttactccctgttttagtttctgaactctgacagattgacagggactttgctggtgtagtctttttataggttttataaaccacttgagcctatatcagtcgttttagtgtctgacctaatatttggagctatcagtgctttgttgatttagatgatgactcaagattttttctggtccatttcccatttccttttcttccctgacccccataccctcacccttaaaattctcctgtaactcaactaacaaaatcaagcctgattcaaaacatcctagggtgttttaaacacaccatctggtgccaaatgaagatttttaggagtgattactaaa

SEQ ID NO: 63199 - DNA, 703 bp, Homo Sapiens
gcgaatataaccagatactcacccagcatatgtagaactaatgaataatcaaaataatttcatcaacttttagaatattttatgttgcttgcactataggagtcataaaaggaacttagttaaaatatgttggattgttaaacatttggggaaatatgaactgtattttaaatttgttaggtctgaagaatctaaaactgttaatttaacccttaacttgtgcctagaaactacagcacatataaaatatgtacacaccagcctgttgctgtacttttctgcttattttacagcctcaaatatttctcattatcttgtcacttagttcttcatgtttctccttctgacttttaataatggtaataggaaaaccaaaccccaagcttttcagaacttcagtgtgaggtttcctattttgacaagttaacttgtaaatactcaggttttacgatgtataatttacctaatagaccaaactaactcatggagatattttgaactattatttaggtacaaactttataaagaatgttagtatgtcataaaatataacattacagcttatttaaaaccaaatatagttgaacatatttaaaatacattttcacagaatggatgaattagttgtttcttcagagttacttatgaacagttgaatgctttaagatgttctgtctgtaggtaacatctaataacaagtggg

SEQ ID NO: 63200 - DNA, 977 bp, Homo Sapiens
  misc_feature (653)..(653): n is a, c, g, or t
agacatcatgacagtacacagctagttctaaagaaaggtcggggtggaactgcaggaatggcatttgtgggaacagtgtgttcaaggagccacgcaggcgggattaatgtgtttggacaaatcactgtggagacatttgcttccattgttgctcatgaattgggtcataatcttggaatgaatcacgatgatgggagagattgttcctgtggagcaaagagctgcatcatgaattcaggagcatcgtgttccagaaactttagcagttgcagtgcggaggactttgagaagttaactttaaataaaggaggaaactgccttcttaatattccaaagcctgatgaagcctatagtgctccctcctgtggtaataagttggtggacgctggggaagagtgtgactgtggtactccaaaggaatgtgaattggacccttgctgcgaagggaagtacctgtaagcttaaatcatttgctgagtgtgcatatggtggctgttgtaaagactgtcggttcctatccaggaggtactttatgccgaggaaaaaccagtgagtgtgatgttccagagtactgccagtggttcttctcagtttctgtcagccagatgtttttattcagaatggatatccttgccagaataacaaagcctatntgctacaacggcatgtgccagttttatgatgctcaatgtcaagtcatctttggcacaaaagccaagtgtgccccaaagattgttccatggaagtgacattctacacaggtgacagatttggcaattgtggttactctggccatgaatacaagaagtgtgccactgggaatagctttgtgtggaaagcttcagtgtgagaatgtacaagagatacctgtatttggcattgtgcctgctattattcaacacgcctagtcgaggcacccaatgttggggtgtggatttccagctaggatcagatgttccagatcctgggatggttaa

SEQ ID NO: 63201 - DNA, 926 bp, Homo Sapiens
  misc_feature (542)..(560): n is a, c, g, or t
  misc_feature (574)..(615): n is a, c, g, or t
ctgtgtacacctcaaataccaccccaacccactccctgtagtgaatcctctgtttagaacaccaaagataaggactagatactactttctctttttcgtataatcttgtagacacttacttgatgatttttaactttttatttctaaatgagacgaaatgctgatgtatcctttcattcagctaacaaactagaaaaggttatgttcatttttcaaaaagggaagtaagcaaacaaatattgccaactcttctatttatggatatcacacatatcagcaggagtaataaatttactcacagcacttgttttcaggacaacacttcattttcaggaaatctacttcctacagagccaaaatgccatttagcaataaataacacttgtcagcctcagagcatttaaggaaactagacaagtaaaattatcctctttgtaatttaatgaaaaggtacaacagaataatgcatgatgaactcacctaattatgaggtgggaggagcgaaatctaaatttcttttgctatagttatacatcaatttnnnnnnnnnnnnnnnnnnnggggggggcaatcnnnnnnnnnnnnnnnnnnnnnnnnnnnnnnnnnnnnnnnnnntttcattgtgcatcagtttccatgaaagacctgaataccaccttacctcaaattaagcatatgtgttacttcaaggaataccttttgacataagatggttgaccaacggtgctttttcttcgggcttgaagttcaccatcctctttcattccaaactgcaactttgtaacccaggagaatgccaatactattcccccaactaactccaataacttacccttctggaatgtttaccaaatggaattttaacagggcctaagtgactttattttacatggcctcgcctaaaaccacaaacgcaaatggccaag

SEQ ID NO: 63202 - DNA, 433 bp, Homo Sapiens
agacgggccgtatcagattaaagaggacatcaccaccacacgttacagtatcggcggcctgagcccctatctcggagtacgagatctgggtgtcggccgtcaactccatcggccatggggccccccagcgagtccgtggtcatcccgcatcatggcgagcaggccccggccagcgcgccgcggaacgtgcaagcccggatgctcagcgcgaccaccatgattgtgcagtgggaggagccggtggagcccaacggcctgatccgcggctaccgcgtctactacaccatggaaccggagcaccccgtgggcaactaggcagaagcacaacgtggaacgacagcctgctgaccaaccgtgggcagcctgctaggaggacgagacctactccgtgcgggtgctcgcttaacctctatcggcgacggacccccactca

SEQ ID NO: 63203 - DNA, 331 bp, Homo Sapiens
atgctcgtccgccaaggtgtacactcaactctgtgactggtggagtgttcggagtgattctcttcgagatgctggtggggcagccgccctttttggcacctactcccacagaaacccagctgaaggtgatcaactgggagaacacgctccacattccagcccaggtgaagctgagccctgaggccagggacctcatcaccaagctgtgctgctccgcaagaccaccgcctggggcggaatggggccgatggcctgaaggcccaccccttcttcagcgccattgacttctccagtgacatccggaagcagccagccccctctagtgccccag

SEQ ID NO: 63204 - DNA, 397 bp, Homo Sapiens
atctcaggccaggacgaggaggaagaagaggaggaggaggagatggtggccgaggaaagcatggcttctgcaggccctgaggactttgagcaggacggggaggaagcggctctggccccgggggcacctgcagtggactcgttgggcatggaagaggaggtggacatcgagactgaggctgtggcccctgaggagcggccctccatgctggacgagccccccttgcctgtgggtgttgaagagccagcggactccaggtagccgcctgaggaaccaggcctgagccaggaaggggccatgttgctgtctccagagccccctgccaaggaggtggaggctcgacccccattgtcccctgagcgagctccagaacatgacctggaagtggagccggagc

SEQ ID NO: 63205 - DNA, 907 bp, Homo Sapiens
ccacgcgtccgccgcggcctgccctccaggcggaggagcccggactgcggaaggatggagctggccgccggaagcttctcggaggagcagttctgggaggcctgcgccgagctccagcagcccgctctggccggggccgactggcagctcctagtggagacctcgggcatcagcatctaccggctgctggacaagaagactggactttatgagtataaagtctttggtgttctggaggactgctcaccaactctactggcagacatctatatggactcagattacagaaaacaatgggaccagtatgttaaagaactctatgaacaagaatgcaacggagagactgtggtctactgggaagtgaagtacccttttcccatgtccaacagagactatgtctaccttcggcagcggcgagacctggacatggaagggaggaagatccatgtgatcctggcccggagcacctccatgcctcagcttggcgagaggtctggggtgatccgggtgaagcaatacaagcagagcctggcgattgagagtgacggcaagaaggggagcaaagttttcatgtattacttcgataacccgggtggccaaattccgtcctggctcattaactgggccgccaagaatggagttcctaacttcttgaaagacatggcaagagcctgtcagaactacctcaagaaaacctaagaaagagaactgggaacattgcatccatgggttgatgtctctggaagtgcaaccacccaatgtctctggaagtgccacctggaagtgccacctggaagtgtctctgggaagagcacccaccactggttcagcccttccccctggctggtttctggtcttccagagggccttacaccacctaacccacattcctttttcttaaagcatg

SEQ ID NO: 63206 - DNA, 1083 bp, Homo Sapiens
agcggaccagcgaatttgagctgaggggctggcactcttttttgctacctgtttacaggcctggaaccatgattgtgttgagcaacattggcagcctgacttcatctttatttcctggtgctttttgacaagaacccaatttgtctctggatagcaacttcagtgtatggggcttcagtggcaaccacatttccgagtggtgtttcttggattgagcagtacacgaccatccatgtgaaatctgcagcattttttgtaattggtgcttccctgggagaaatggctattcctgcagtcattggaattcttcaaggaaaataccctgatttgcctgtagttctgtatacctctttgggagcatcaatagctactggtattttatttcctgtgctatataaattagccacttcacctcttgatcgccagcgaaaagaagacagaaagagtgaggaccagaaagctctgctctctagctccgggctaaatgaatatgaggaagagaatgaagaggaggatgcagaaaaatggaatgaaatggattttgaaatgattgaaacgaatgatacaatgaggcattctataatagagacatctagaagtagtctgacggagcccacagctgaagtctataatcaatacccatcaaatgcactggtgtttgagtcttctccttttaatactggcagtgcccatgtgaagcacttgccagaaaccaggacaaaagggactaacgtttagagaagatggattactcactgacatctttgaataactgccacttctaaggacgccattcagagcagagcattagcagaatttcaccatgctttggggattaaaatttttaggtccatattatagcaaatgctaaaaatttttgaaatgttctgtaattcccagagtcttccataaataaccaaatggtctcatacacgtacaataggatcttgttataacgctatcatttgacatgtgactgattaggaaatattttatggtctccacccctcagagcacccaaagaaggcattgtttttgagaaggggggtattctcagaatgagaccaataggagggattgagt

SEQ ID NO: 63207 - DNA, 604 bp, Homo Sapiens
  misc_feature (255)..(263): n is a, c, g, or t
tccacaaacaggatgataggaaaatcagttcttttaaaatttcttcaagaaaatccaggctatcacatagtctttctgtgtgacttattaggagataggaagagcattgggaagcttgcacagctagctatgcatctacattttggtttgggtgttagtttatgtaaattgttcttaatatgacgtgttcaataatcttcacataaacttcctgttctccaaaacctcaaagagatagagttaatgagttgttgnnnnnnnnnaaatgggggtagttttctatctgtcatgggctctagcatctactccgctacccaattctgtcatctccgagctgagtttcctcttctgaggcagaggctggagcagttctttttcagttctcatcctctccatcccaatccagtatatcaatcaactctaactcggagacgtctagctggcaatgtttctaaaactttcactggatttctttagacattgaagcaaatatttttttcttagaattgctatctctagattatgatatcccatgtatatgcttttgcacgtttgaaaagttcaattaaccacttttgactaggtaagtctttctacaaacctt

SEQ ID NO: 63208 - DNA, 893 bp, Homo Sapiens
gggcgccggagctgggagccgcgcgggtaggagcccggcggcaggtcccagcccggggctagagaccgagggccggggtccgggcccggcggcgggacccaggcggttgaggctggtcaggagtcagccagcctgaaagagcaggatggatcttgatgtggttaacatgtttgtgattgcgggcggcacgctggccatcccaatcctggcatttgtggcttcatttcttctgtggccttcagcactgataagaatctattattggtactggcggaggacattgggcatgcaagtccgctatgttcaccatgaagactatcagttctgttattccttccggggcaggcctgggcacaaaccctccatcctcatgctccacggattctctgcccacaaggatatgtggctcagtgtggtcaagttccttccaaagaacctgcacttggtctgcgtggacatgccaggacatgagggcaccacccgctcctccctggatgacctgtccatagatgggcaagttaagaggatacaccagtttgtagaatgcctgaagctgaacaaaaaacctttccacctggtaggcacctccatgggtggccaggtggctggggtgtatgctgcttactacccatcggatgtctccagcctgtgtctcgtgtgtcctgctggcctgcagtactcaactgacaatcaatttgtacaacgggctcaaagaacttgcagggctctggccgccgtggagaagattcccttgatcccgtctaccccagaagagatgagtgaacatgcttcaggtctgctcctatgtgccgtttcaaggtgcccaggcagatcctgcaaggccttgtcgatgtcgcatcctcataacaatttctaccgaagttgttttggac

SEQ ID NO: 63209 - DNA, 997 bp, Homo Sapiens
gggatgttcttttaagatgaatcttttgatgtctgataccaccaaatataggtggtagggagagttggaggctggccctttgagcaggccattagcttacttgctgggcatttccgcatagcttattgcctacctttttgctggaaacaaactgatttgaaaaacaaaatctatgaagactgcagctaaggattttatcggtagacttaagagcttttgtccttgtggatattttagtggaaccacatcagtctcaatactgtcattttacactgactcagagcagctgacttcattccttgccatgatatatatttaaggcaggcattgtaacagacataaagacaacttatctgtttcagcaggaaggattcagtttatgaactctcagaccagatcatgttgaacaaggagactttgatgtgtgtcatgagaaaactcattctttacttcccagtcaatttaaaggccagctatcctgagctactcgaatgaatgcactggttaaacattggaaatagtttgtttatatccttgtctctctctaggccaattgtgattacatgactcgactctacatctcgtcaaacaaggcctaggtctggttgctgtagactgctcgccctcaacaaataaaatctggttgactagcctccttgtatatacaactattatttgttaagaagaaattatcgtcaattttctactaccttccaattgtcagctctttttttcctctctggtttttcctatactttacagaaaaagacattgatctatactgcccattccctctaatcctgccctactcagtcaaaaagaatgactttagatgaagatgatcatctgctccagtctaaaataaccattgatataagaatgggggattaaaaagccaaaaaccctaaaacttaattctaggaggccgaatacggtccccctgtctccctgccccaaatcccttcaaattctttgaaccgccccctttcaaccattt

SEQ ID NO: 63210 - DNA, 424 bp, Homo Sapiens
gagtctttaattcacttttaatagtataaacctcatttaggtagtagtattaagccacaacaataatgccacattgaaacagcatttaataaaatgcataaagctaattcatgcactgcaatactctatatacaaacacaacaatgcaaattcttcttcaagactgaagacattgattagatataaaattcagtttaaaaagaacatgctattttttaaatgccatcacataaacaaagtgatttcacagggagaagaaagctgtataaagctgcagctttcaacaggttttaaacctggcattaaaatgtaatggcaaaaccaatattttctatattgtgaagggcaaaggttacagaaacggtcccaagaaaatctaacacccaaattttcctttgatagatagatgcctttaaagggctgg

SEQ ID NO: 63211 - DNA, 556 bp, Homo Sapiens
ctgtggaacgttgaggacttgaaagagccaccgaaaaatggaatctctacgaagctcatgaatatatttttgaaagactccatcaccacgtgggagattctggctgtcagcatgtcggacaagaaagggatctgtgtggcagaccccttcgaggtcacagtaatgcaggacttcttcatcgacctgcggctaccctactctgttgttcgaaacgagcaggtggaaatccgagccgttctctacaattaccggcagaaccaagagctcaaggtgagggtggaactactccacaatccagccttctgcagcctggccaccaccaagaggcgtcaccagcagaccgtaaccatcccccccaagtcctcgttgtccgttccatatgtcatcgtgccgctaaagaccggcctgcaggaagtggaagtcaaggctgccgtctaccatcatttcatcttgcactcaggcagtgacatggtgcaggcagagcgcagcgggatccccatcgtgacctctccctaccagatccacttcaccaagacacccaagtacttcagacaac

SEQ ID NO: 63212 - DNA, 1598 bp, Homo Sapiens
  misc_feature (1139)..(1139): n is a, c, g, or t
  misc_feature (1143)..(1143): n is a, c, g, or t
  misc_feature (1145)..(1147): n is a, c, g, or t
  misc_feature (1149)..(1149): n is a, c, g, or t
  misc_feature (1152)..(1152): n is a, c, g, or t
  misc_feature (1159)..(1159): n is a, c, g, or t
  misc_feature (1161)..(1161): n is a, c, g, or t
  misc_feature (1177)..(1177): n is a, c, g, or t
  misc_feature (1195)..(1203): n is a, c, g, or t
  misc_feature (1241)..(1241): n is a, c, g, or t
  misc_feature (1278)..(1278): n is a, c, g, or t
cgctgggtgtgcggtgttctgtctccgctcccgtttcgctgtcacagcccgttccttcccggagcccgggacaggctgggcgcgcgcccgtgacgcgtgaccaaaagcaaagacggccatgaagtgagatcgtgcaaagtagcagataaaacgggcagcatcactatttccgtgtgggatgagatcggaggtcttatacagccaggggatattattcggttgaccagagggtatgcatccatgtggaaaggatgtctgacactttatactggaaggggtggtgaacttcaaaaaattggggatctaggtgcggtgcaggcagccgcaatgcgagattccatacactactaccctggtaatgatctccaccctgacctggaggagccatcctctctaggggtgtaagattttgtatggtttattcagaagtgccaaatttcagtgaacccaacccagattatcgaggacagcagaacaaaggggcacagagtgaacagaagaataattccatgaatagtaatatgggtacaggtacatttggaccagtgggaaatggtgttcacactggccctgaatcaagggaacaccagttttcacatgctggcagaagcaatggccggggacttataaatccacaactacaaggaacagctagtaatcaaacagtgatgaccacaataagtaatggcagggaccctcggagaagcctttaaaagatgacctatgctaaatactcatgtgtagtttttatactacatgccctacttgaacacttattgcacttttatttattgttaactgtgaaaagtacgtcctttattgggtttccttttatattcttggtttgttaagaagaatggtttgtttttatagcaaaactgttaagctgctcgagtctcctgttgaagaatgggaacactgaaaagtaggggcatttatttatagagtacaaagattattggatagcctttaaaaacctgcacccatttcatgggtgagttacttaagacatcagctttatagcctctatgagtctatcttctgtataagttttgtaatatttaacataacgcttaatgggagatgttcttctggtctgtattcagatattgcccaactaagcaatacccatcaaaagncccngnnnanggntggaaancncaaccataaaaaaacncccggggggaaaccggtnnnnnnnnnaacaaagcccaagggaaaccttgaagacactactgggnttgaatccccgggaaccccaggggagctggatattgnaataagccgctccctgggaaaacctgggcgggagcgttggggtttgcttaaagccttttaacaaaatggcaagggggtcacaacgggtctgtaaaaaccttgaaccggccgaggtattagccccccttgggaccctggcggagggaatatctgggcaagttgaaaaacagaagacaccccccggccgccgacaatttggccaggtaataattacaaagtcgggtgaaacccttctcccgagaatggggggcgaccacaaaaagctatttttgacaaacaacttttttaggggcacctcggcccgttttgtaccccataaa

SEQ ID NO: 63213 - DNA, 903 bp, Homo Sapiens
  misc_feature (652)..(652): n is a, c, g, or t
  misc_feature (658)..(658): n is a, c, g, or t
  misc_feature (680)..(680): n is a, c, g, or t
  misc_feature (745)..(745): n is a, c, g, or t
  misc_feature (859)..(859): n is a, c, g, or t
ggggcgcgctgctggtgctgttgccgccgctgctctagctgccgtcagtcaggctgcgcccgcgtcttcagggcccagtccctcggacccatcgccgcttctagaccctactgcggtctcggatattgccgggaaaatgtctgatgaattttcgttggcagatgcactacctgaacactcccctgccaaaacctctgctgtgagcaatacaaaacctggccaacctcctcaaggctggccaggctccaacccttggaataatccgagtgctccatcttcagtgccatctggactcccaccaagtgcaacaccctccactgtgccttttggaccagcaccaacaggaatgtatccctccgtgcctcccaccggaccacctccaggacccccagcaccctttcctccttccggaccatcatgtcccccacctggtggtccttatccagccccaactgtgccgggccctggccccacagggccatatcctacaccaaatatgccctttccagagctacccagaccatatggtgcacccacagatccagctgcagctggtcctttaggtccatggggatccatgtcttctggaccttgggcgccaggaatgggagggcagtatcctacccctaatatgccatatccatctcccagnccatantccgctcctcctcctccccaancccctggggcagcaccacctgttccatggggcaccgttccaccaggagcctgggggacaccagcnacatatcctgccccctacaggatcgtatcccacacccaggactctattctactcccaggaaatcctttccaagtgcctttccagaaccttctggtgcctccaccaatgcttggngggcccccatttctaccatttaggttaacaagtggacggagaaa

SEQ ID NO: 63214 - DNA, 920 bp, Homo Sapiens
  misc_feature (548)..(548): n is a, c, g, or t
  misc_feature (632)..(632): n is a, c, g, or t
  misc_feature (739)..(739): n is a, c, g, or t
  misc_feature (848)..(848): n is a, c, g, or t
  misc_feature (890)..(890): n is a, c, g, or t
taaagtagccatatgtaacgggattttaaaaatatatacattttacaacatggactagaaaaggaccattagatcaggggttggcaaactatggcccacgaatcaaacctggcctgccacctgtttttatacaacctgtgagctaagaatggtttatatgttttcaaatgattgggcagaaaatcaaaagaagaacaatatttcatgacacctgaaaattctatgaaattcagatttcagtgtccataaacaaaatgttattagagcatagccacacccattcatttatggtattgtctgggactgctttcttggcagagttgaatagttgggacagggacagtatagcctgcaaagcctaaaagatttactacttgtctccttaaagaaaaagtttgccagctcctgatctagaccaagagggagatattgaccttacttgcatttatccggcattatttcaacacctcctgtgaagaaagtacttttctggcatagctaccgtgagttctcagcaggaacttcccagcgatgataatgtacatganattagccacgtaacaagagtctatttgcctttgaaaaaacaattatccttgaacttcctccagctatgcagggattctcattanagagctgatctgcatctgtttatccattttagtagcttttaaatatgattttatgtgaagtgccatttttcttatctactaaagagagacagcagaaataaagatcngaaagcaatggtgagcaatctggtttactggtaacttcaatatgaactgtgaatgtgccacatgactttttcctctaaaactggaatcctagggttttaatttactggngtgcagctattttaaatagcatttacttggagaaaaaaaggnaggttgggcattgtttcatggctaaacttt

SEQ ID NO: 63215 - DNA, 1059 bp, Homo Sapiens
  misc_feature (657)..(657): n is a, c, g, or t
  misc_feature (775)..(775): n is a, c, g, or t
cacaaacggaagtcttaaaaactttttgctctggtcagttacaggtggatccccaataatctgtttttggttttctgatggaaataatagaattaggggaaatcaaatctggttggtaggtgtctacagtattagaagagggtataagggcactgtttaacactaagttctaatacttccagaaactgtgcattccagatgtacatactgaatgctcttatcattttgaaatgggctcttgattaatagacccatattttttagtggcttctatgttgtatatttgtctaaaatgaaagctcttttgcgttctaaaactacaatatatgtcatcttattttccctgagtatccaagtatagtgcagattctatgtaaaactactaaatgacactggaatatgtttagtagattagggggaaaaactataaaggtttatacaattgtttgtagttacatttaggatggacttatccctttggagaagagtgaagtttgttttttcgccatgtgatgaagaccactgtgattttttaaaaaagtagatagtacttaaaatggcgtaataattctgcacttgaatttgtactgtttacagcacatttggaagattttaaaactttttattgtcttataaatagcattcacttattatttntggatatttaagggttccatttaggtaaccctggattttggacaaagggggacccaattagcccagccggttttctttccatggttaattaaaaagggaaaggtagaaagacctttanattcaacagggccagccaggcaaattcgggttaaaattcccctttccttaaagggtgggggtccttatgggtctcccggcttttttaatggactttaattttttacaggactttggtccaatccactttgaaatgaaatgggttggggggtaactttttttcctcccccacaaactaaaaggtgtgtttacacaaactcataagtggggtggggaacacaaatttaggcccaatccactggaaaaatggcattcaaaagtgtgtgccaatttttgtgatgtgtc

SEQ ID NO: 63216 - DNA, 1331 bp, Homo Sapiens
  misc_feature (1117)..(1127): n is a, c, g, or t
  misc_feature (1217)..(1217): n is a, c, g, or t
gtaaactctgagtggactgtatcatttgctattctaaaccattttacacttaagttaaaatagtttctcttcagctgtaaataacaggatacagaattaacaagagaaaatgtctaactttttaagaaaaaccttattttcttcggtttttgaaaaacataatggaaataaaacaggatattgacataatagcacaaaatgacactcttctaaaactaaatgggcacaagagaattttcctgggaaagttcacatcaaaaagagtgaatgtggtatatttctaaatgatatggaaaatagagacagatttgtcctttacagaaattactgagtgtgaataaaaacttcagatccaagaaatatataatgagagatataatttttgttaataagacaaaggtaatatattggatacaaagacacaaatgtattgtgtgttcaattattttgttgtcttgagatttaatattctttccaagagcttttaatgaagcagagagctagtacttcattttcactggatacattttcagcatcatgagttgtcacagcctctgagcccctgatctgaagccagaagggctgagtgtattgtaaacttattcttgcatgttgctgtctgggaatggaccacactacagcaggtagttctgggggcgatactgccgaaaggcccgaacacatgtattttggctgcaattgaggaacttgggatgctattaattttgtatttcagcaactgccccttctcctatcccaaagcaccaattactgccctctgcctcagcagtaccagtataagatgacattccaaagactggaggcaactcagcctgagttaattcacaaaattatgccatgctggggcttgagcttgagcttgggcttaggcttgggctcagcttttgaccctcaggcatctcctttcccttcctgtcttcctctcccttctcctctgctgcagcatgattttcttaatcttcagacactcactattttcatgaacagttaccctctgtccccacaacaaagacaactcatggcctccttttggcccttgtgtaaccatttggcaaacctgtggctttgcagaattgttcccaggtcacaaggggannnnnnnnnnnagcaatgatatccctgtctgggtcacttttaaagcttgtaaccggcccccccaaattttaatcttaaatgtttttccgcttgtgtttagngctgctgctccctctgttcatggtattggcgccagttatcacgggccttgggttccacagtataaaagagtccaaccggaaaacaaacaaatagagaacacaacacaaaaaaag

SEQ ID NO: 63217 - DNA, 1086 bp, Homo Sapiens
  misc_feature (116)..(116): n is a, c, g, or t
  misc_feature (911)..(911): n is a, c, g, or t
  misc_feature (982)..(983): n is a, c, g, or t
ttccatatgataaaactaaaggactaaatttgttttataatgatgtcttagagggactgaaaagtttaaggaggcgatcaaactaaaatgtcttaatggctgtgtgacacacgtanggaaaggaaagggggtcacgcacatcatgtactggaatgatctgcattaaacattgacttgtcttcagaaataagactgaagggttttgttgttccttacgagttttccgtgttacatcacctaaaagagatttcttttaaaaactttctaagactctttgcaaaatgtatattactaacatagtttggaagaaaaattgagtagtggtaagttttgttcaagcacaatgttgaatgttaagcttcctgtattaattttagttcagttaatggttcagcccatacaaaggtgctatcctagggattttatgaattcctgaaaggaaaatagaatatgatcaattccttgccctgtggaagagtgcagaactgtggttttgttttcctttgacttctgtaaaatgtgaccgtttgacatctgtggtagattgaacggaatatcacagctgctgagtttactccatagctttcaaaccttttttattttaagaaattcttgaaaaaccctatgttccatgggaacataaagttattatagtgcctcctaaggggttaatataaatcaaggaggaagtttatatttaaggaagaattggagtgacgtatcttagaaaaggaaaggctgatgtttccatatagcttgctctccaccaggcctatcatttttctttttagagacaaacgtgacagggctagtcttgtctctctcatatgctaggtagcaaatggggtgatatttttatagaagtgggcaaaaattattttctcaattttactgagtaggcacagaagaanagtacagatagggctgatggttattgccttattttgactgcatttctcttaaatggatcatttaaattagnntcttcagtaacagttttactgggttggttccattccctgaatatggcaggctaatttgtaacagaatagggatttaaggaataccgacctattaaaggagaac

SEQ ID NO: 63218 - DNA, 419 bp, Homo Sapiens
tgtttgaaggcagtgggaacatgtcatacacgaagaaatgctaacggaaggatttgttatgtttaggatcttcccttggaaactaaaaatagaatattaatgacattactgtttgtagaatgacatatgcagattttctcataagcagtcattgtgtttgccagtaatgtttgagagacatgtaagttgaaagttttgctaaattataaagctcctttaattcgttggttttgattctcttattctcttgtcttttctaaatgttaacaaaatatatcttaacagattacatgaaatttaggaattatttaaaagttaccattagctctaaaattaagattcggatgctttatttatagtaactgaaggccttaataaatgtttatgttttgattttttcgaattttaattgtagaagt

SEQ ID NO: 63219 - DNA, 732 bp, Homo Sapiens
gccgtgcacatggctcccaggaacagttgtgaaggagaagatgaggaagaaatggcgcatcaggaagaaggcaaagagcagctttcagaaacaggaggcagtggggaagatgagccaggaaatgaccccagtgagaccacccaaaagaagatcaaaggccagccctgcccaaaaaggctttttaccttcagtcttgtgaactcctatggaacagctgacataaattcacttgcagctgatggaaaactacttaaactcaactctcgatctacactggccatggattgggacagtgaaactcggagactttactatgatgagcaagaatctgaggcctacgagaagcatgtgagcatgttgcagcctcagaagaagaagaagaccacagtggccctgagagactgcatcgagctcttcaccaccatggagacccttggggagcatgacccctggtactgtcccaactgtaagaagcatcaacaggccacaaaaaagtttgacctatggtccttgcccaagatcctggtggtccacctcaaacgtttctcctacaacagatactggagggataagctcgacacagtcgtagaattcccaatcagagggctgaacatgtccgagtttgtctgtaacctgtcagcaaggccttatgtgtacgacctcattgccgtgtccaatcattatggagccatgggggttggccactacactgccttcaaggggatctctaga

SEQ ID NO: 63220 - DNA, 884 bp, Homo Sapiens
acgaagatcgcgtccccatgtatgaagaacagtggtcatattatgatgacaaacagccctacccatctcggccaccttttgataatcagcactctcaagaccttgactccagacagcatcccgaagagtcctcagaacgagggtactttccacgttttgaagagccagcccctctgtcttacgacagcagaccacgttacgaacaggcacctagagcatccgccctgcggcacgaagagcagccagctcctgggtatgacacacatggtagactcagaccggaagcccagccccacccttcagcagggcccaagcctgcagagtccaagcagtattttgagcaatattcacgcagttacgagcaagtaccaccccaaggatttacctctagagcaggtcattttgagcctctccatggtgctgcagctgtccctccgctgataccttcatctcagcataagccagaagctctgccttcaaacaccaaaccactgcctccacccccaactcaaaccgaagaagaggaagatccagcaatgaagccacagtctgtactcaccagagttaagatgtttgaaaacaacagatctgcatccttagagaccaagaaggatgtaaatgacactggcagttttaagcctccagaagtagcatctaaaccttcaggtgctcccatcattggtcccaaacccacttctcagaatcaattcagtgaacatgacaaaactctgtacaggatcccagaacctcaaaaacctcaactgaagccacctgaagatattgttcggtccgatcattatgatcctgaagaagatgaagaatattatctaaaacagctgtcatactttgaccgaagaagttttgagtataagcctcctgcacac

SEQ ID NO: 63221 - DNA, 630 bp, Homo Sapiens
  misc_feature (13)..(13): n is a, c, g, or t
ccatgtaaccacngtactctacctccagctggctatttgttcaagtttgcagaacttggagaaaacaattttctgcctgcagaagctgatttctttgcatcctcttaatctttggaactggggcaaattggcagaggcttacctgaatctggggccagctctttcagccgcacttgcgtaatctcagaaacagcacagtcttcacctcaagtgacaaaactatcaaatccttctttccacactcaggaaaagactgtcttttgtgttttcctgaaaccttgcctgagagctctttattttctgtggaagcgaatagcagtaatagccagaaaaaggaggaagctgtgacgaatatccaaaactgtatggcagaaaagagagaaacactgttgatagagactcagcagatagcatgtgcctctattatacgataccaggcttgagattcagtttaccaaacctcaccaaacatcgtttggtttggagaggaacttaagagtaccttcagcaggcaattgtaaaattaaatgcaagggctttaggtacaaagaagacactatagcgtaggtgatacgtcgcaggttatggacatgacatatcccagtagatcatagtaacagtgacatatgc

SEQ ID NO: 63222 - DNA, 1155 bp, Homo Sapiens
ggagaactggacgttgtgaacatgagttagctggtaaatgtcctcttaacaagatccaaaaaatgagacttctagcaaagattgatttgccttatgttatgggctatttgtgtagcagaagattgcaatgaacttcctccaagaagaaatacagaaattctgacaggttcctggtctgaccaaacatatccagaaggcacccaggctatctataaatgccgccctggatatagatctcttggaaatataataatggtatgcaggaagggagaatgggttgctcttaatccattaaggaaatgtcagaaaaggccctgtggacatcctggagatactccttttggtacttttacccttacaggaggaaatgtgtttgaatatggtgtaaaagctgtgtatacatgtaatgaggggtatcaattgctaggtgagattaattaccgtgaatgtgacacagatggatggaccgaatgatattcctatatgtgaagttgtgaagtgtttaccagtgacagcaccagagaatggaaaaattgtcagtagtgcaatggaaccagatcgggaataccattttggacaagcagtacggtttgtatgtaactcaggctacaagattgacggaggtgaagaaatgcattgttcagacgatgggtttttggagtaaagagaaaccaaagtgtgtggaaactttcatgcaaattccccagatgttataaatggatctcctatatctcagaagattatttataaggagaatgaacgatttcaatataaatgtaacatgggttatgaatacagtgaaagaggagatgctgtatgcactgaatctggatggcgtccgttgccttcatgtgaagaaaaatcatgtgataatccttatattccaaatggtgactactcacctttaaggattaaacacagaactggagatgaaatcacgtaccagtgtagaaatggtttttatcctgcaacccggggaaatacagccaaatgcacaagtactggctggatacctgctccgagatgtaccttgaaacctgttgattatccagacattaaacatgggggtctatatcatgagaatatgcgtagaccatactttccagtagctgtgggaaaatattactcctattactgtggtgaaccttttgggac

SEQ ID NO: 63223 - DNA, 1235 bp, Homo Sapiens
  misc_feature (858)..(858): n is a, c, g, or t
  misc_feature (896)..(896): n is a, c, g, or t
  misc_feature (1042)..(1047): n is a, c, g, or t
  misc_feature (1049)..(1049): n is a, c, g, or t
ggggctcttaggaagcctgggaaggaccggtgtgctaggagatgatcggggaaagcatagtcccctgtctgtggcaccagacactcccgactgtgcgctgactctccccgcccagccagcagccttttccagagaggctgtggtccatagcctctgttcgttttcactgcaggaccaggcacgaaagttaaaacaaaatgaagattttttctgaatctcataaaacagtgtttgttgtggatcactgcccttatatggcagaatcttgcaggcagcatgtcgagtttgatatgctggtgaagaatagaacccaaggaatcattcctttggcccccatatctaaatcattgtggacttgctcagtagaatcttccatggaatattgtagaataatgtatgatatatttcctttcaaaaagctggtgaattttattgtgagtgactctggagcacattttttaaattcttggactcaagaagaccaaaatttacaggagctaatggcagcattagccgctgttgggcctcctaatcctcgggcagatccagagtgctgcagtattctgcatggccttgttgcagcagtggaaactctctgcaaaattactgaataccaacatgaggctcgtactctactcatggagaatgcagaacgtgttggaaatagaggacgaataatctgtattactaatgcaaaaagtgatagtcatgtgcgaatgcttgaagactgtgtccaggaaacgattcatgaacataacaagcttgctgcaaattcagatcatctcatgcagattcaaaaatgtgagttggtcttgatccacacctacccagtttgggtgaagacagccttgtatctgnatcgttctaaaaaagagttgtccccggttttaaccagntgaagttcatagtgttcgtgcaggacggcaatcttgctaccaaattgaatattttagtacagcaacattttgacttggcttcaactactattacaaatattccaatgaaggaagaacagcatgctaacacatctgccaattatgannnnnnanctactttcctccaaaagatgcacatgtataattttcctgaaaagtgggtggattccccatcctaagggggcgggccaatccgaaaaggggctccctttacaaaaaaacaattaaccctttaacggggggggtcacaccccagggaacacataaacctttgggaattcacccctcaccgggtcccta

SEQ ID NO: 63224 - DNA, 1048 bp, Homo Sapiens
ggggctggagtttgaagagcgggcagtggctgcacacgccaaactttccctatggcttcggtgaccagggccgtgtttggagagctgccctcgggaggagggacagtggagaagttccagctgcagtcagacctcttgagagtggacatcatctcctggggctgcacgatcacagccctagaggtcaaagacaggcaggggagagcctcggacgtggtgcttggcttcgccgagttggaaggatacctccaaaagcagccatactttggagcagttattgggagggtggccaaccgaatcgccaaaggaaccttcaaggtggatgggaaggagtatcacctggccattaacaaggaacccaacagtctgcatggaggagtcagagggtttgataaagtgctctggacccctcgggtgctgtcaaatggcgtccagttctcgcgcatcagtccagatgggtgaagaaggctaccccggagagtttaaagtctgggtgacatacacccctggatggcggagagctcatagtcaactacagagcaccagccagtcaggccacacccattcaacctgaccaaccattcttacttcaaccctggcaaggccaggcttcccccaaatataaatgaccatgaagtcaccatagaagcggatacttatttgcctgtggatgaaaccctgattcctaccggagaagttgccccagtgcaaggcactgcattcgacctgagaaagccagtggagcttggaaaacacctgcaggacttccatctcaatggttttgaccacaatttctgtctgaagggatctaaagaaaagcatttttgtgcaagggtgcatcatgctgcaagcgggcgggtactagaagtatacaccacccagcccggggtccagttttacacgggcaacttcctggatggcacattaaagggcaagaatggagctgtctatcccaagcactccggtttctgcctggagactcatagctggcctgatgcagtcaatcagccccgcttccctcttgtgctgctgtggcctggtgaggagt

SEQ ID NO: 63225 - DNA, 816 bp, Homo Sapiens
attagattgctcttttactgcacacgagaagattgtccagttccattgggagaaatatgcatgctcctggcatgaagaagatcaagttagacactccagaggaaattgcacggtggagggaagaacgaaggaaaaactatccaactctggccaatattgaaaggaagaagaagttaaaacttgaaaaggagaagagaggagcagtattgacaacaacacaatatggcaagatgaaggggatgtccagacattcacaaatggcaaagatcagaagtcctggcaagaatcacaaatggaaaaacgacaattctagacagagagcagtcactggatcaggcagtcacttgtgtgatttgaagctagaaggtccaccggaggcaaatgcagatcctcttggtgttttgataaacagtgattctgagtctgataaggaggagaaaccacaacattctgtgatacccaaggaagtgacaccagccctatgctcactaatgagtagctatggcagtctttcagggtcagagagtgagccagaagaaactcccatcaagactgaagcagacgtttttggcagaaaaccaggttcttgatagcagtgctcctaagagtccaagtcaagatgttaaagcaaactggtagaaatttttcagaagccaagagtgagaaccgaaagaaaagctttgaaaaacaaaccctagaaggaaaaagattatcacaactatcaaacgttattcgaaccaagaaccaccctccatatctcttggaaatgcttctagctcgggacttcacatgaaagaaatgtgatttttgccatgg

SEQ ID NO: 63226 - DNA, 451 bp, Homo Sapiens
cagctgcgtccatcagctggagacacatgtggttcttgacaactctgctcctttggggctggctactactgcaggtctccagcagagtcttcacggaaggagaacctctggccttgaggtgtcatgcgtggaaggataagctggtgtacaatgtgctttactatcgaaatggcaaagcctttaagtttttccactggaattctaacctcaccattctgaaaaccaacataagtcacaatggcacctaccattgctcaggcctgggaaagcatcgctacacatcagcaggaatatctgtcactgtgaaagagctatttccagctccagtgctgaatgcatctgtgacatccccactcctggaggggaatctggtcaccctgagctgtgaaacaaagttgctcttgcagaggcctggtttgcagctttacttctccttctgatgggagcaaga

SEQ ID NO: 63227 - DNA, 1157 bp, Homo Sapiens
  misc_feature (1120)..(1120): n is a, c, g, or t
aggtaaactcatgtcaagtggtttgtgtacagattatttgtcacccaggtgctaagcctagtacccagtagttattttccctgctcttctccctcctcccaccctccaccctcaagtaggccccagtgtctgtgttcctttcttgtgtccttgagttctcatcatttagctcctacttctaaatgagaacatgtattggttttctgttctgtgttagttgctaaggataatggcctccagctcagatggaatatctctatcatatagacctgttgttacagggcaggatcggatgatggacactgaagtcctcagcttgctaagttcagttgctctccctagcctcctttggcttcagagtctttgattccatctatcctggtattttttgtgtgctgatgtttagttctggattggcttcagctgtgctaataggaagggcgttgtcttttcaagcaatcttaaaaggtggtcaatcaaaaggccagagtctgaatcccttctgtggcttaaataatttgaggatcaagtccagtgtcttgttaatccctgttctactgtgccagacactatcttgaatgcttttatatgttcaggttcaaaatcgctctttcataccaggggatgatagtaacgtgtaacttgcaatagattccttcatcttagtaataagatgatcagtctagttaggacaaaatagagattgaataaattaacttttccaagtttacagagtaaaaatgagcagatctctgcctggttttgtgaaaaagagttagcactggtaaatagaatatttctactcctacaccattctttcagtatatcatcactgaagacaggaagataggcacacagattcttcctcgtagtaattcatagtgcactaggtgaaagagatgaagtatgtattaaaagtacaatgtgatggcatttattattcagataatcccaggattctagaagaaaataaagaagagtgacagttcagttagggtggtgaacttccagaggagcactgctttagctgaacttgagagcattgtgcaaaagcacagtagtctgtttagaactagaaataacctagcttgtgccaacttcgggagtatttagacataanccctagaaggtagggcaaaggttagatccttaaacgg

SEQ ID NO: 63228 - DNA, 628 bp, Homo Sapiens
gaaatactttggaacagactaagttatttaagtaaaataattgtcttatgtaatattacaatcatgttttgattttctatttgttttactgattcacttgagggtggcggagaaaaatgtgttaaaatgctttttagttttggaagtgggtatatttgaggttatatctcatttagttatttgtttactgttggcaccgaattcaacaatgaagtatatgcaactcttacaagacataaattttaataatattctaatgcaaattactgacccctcagtgcattaaaattatttcctaatttatgagcctcttagtttggaggttgcttgaagccacaaataaaactcaaatgagagtcagttctttgtcccactgtagtttgcattttgtttagtttggttttagctctactaaggtttcacatatgtggctattgccacattcctctactgttttctttctgatactggacatgctagtaacttggagaggagaataaaagaatgtctcctggaattttacattcccattaatgtcctcattcaattggcagacctaggatgtatggctaactctcaggccattatgtttttcatggctcatttcccaaactgcattgttggtagg

SEQ ID NO: 63229 - DNA, 959 bp, Homo Sapiens
ctataacggtccgttttgtagcgaggcctgggtggcgaattcggcacgaggctgcgcctgcgcgccgctggcctgacggaggggagcctgaccgatgcctgagcgggctgctacgtcccgcggtcggagccgcgtcttctccctggctccgccaccagcctggggcatcggtgtggtggtgcccaggtgtgcccctggtgtgcatggcccatcctgtgagtgctgcatgggctgactggccccaccatccgtgccactgggacggcgtgcgcggagaaggcagggaagaacctacggcagatgagcaaggactaccaacaagtgttgctggacgtcctggcggtcattgcggcggttccctcctggcatgccagaggaacagcgagaagggctccaggaagaactgcttgacatcatcctcctcatcttggagcgcaagcctcagctgcactactaccagggctaccatgacattgtggtcacattatctgctggtggtaggcgagaggctggcaacatccctggtagaaacctcatctacccaccacctcagggattctatcggatccaacaatggccaacaccaagcatatattagcctatctgatgcccatcattgaccaggtgactccagagctccatgacttcatgcagagtgctgcggtactggaccatctaaggccctacagctgggtcatcaacctggtaacgggacatgtactgtctgaataccagcacgtcgagcggataaatgactatatcctggacctggcgaccccatgtgtactgcgcgcaatttcaacttcggccggtgcggtgagagtgggcggcaggacatccggcgcgaggaggcgaagatccactgtggagcattgtggacgctgtaggaacggtgggacctcggcgtcccgcccaaaccttgggtggtcacagggaattcccataaggaggagcattgc

SEQ ID NO: 63230 - DNA, 1148 bp, Homo Sapiens
  misc_feature (884)..(1006): n is a, c, g, or t
  misc_feature (1008)..(1014): n is a, c, g, or t
  misc_feature (1022)..(1036): n is a, c, g, or t
  misc_feature (1061)..(1070): n is a, c, g, or t
ggcagtgtttcttatgaacaagagccacagtacagagcttcaagttatttaaaatactaagtcatcttacgtttccattttattaacgggatgttgcaatcgtttgtaaactaataaacttataaagtgattggcacaaagactccttgagcaaaagctgtgcagttaagtacaaaaagatacttaatttggagactcttacagtaatttttgccatgtcaaaacaatggcttttacattgaaagattaatagaaactctacatatgttaatttttttatagaacctgactcaaatcaaggtactctccattttattgccttacctgaatcagtcctttttggttggtaatagatttttttatacacccacgtttgatttaaaagtaaattctagttcttaagcacttttaacaagaaatccagaagcacatttttctgcacaaacaagttacaaagttcaaaagtgtttcttgtgcattagctttgagattcagtttttaactttgtaaaccacatctgagagacttgtcatttctacattgtgtgtgtttaatttcttttgattccattttggttaagagagcagtaaatagattttctggtattcttgttcacttgattacatttgtataaagttctgattgccagttgctcagataacaagtgacaaggcagaattctttaaatcagtaaagttccttaagcctaaggctaaatcttgaatacattgttgaattctttaatatcctgatggcaagcagactgatagctgcacatttggcatgctttgtttaatggattttatttttaattgcagatttatttggcaatgtacagtaaattttgtaaacttgcatcaagtttatgaataaagaaccatttnnnnnnnnnnnnnnnnnnnnnnnnnnnnnnnnnnnnnnnnnnnnnnnnnnnnnnnnnnnnnnnnnnnnnnnnnnnnnnnnnnnnnnnnnnnnnnnnnnnnnnnnnnnnnnnnnnnnnnnnnnnannnnnnngggggggnnnnnnnnnnnnnnnaaaaaactttttaaacccttttttnnnnnnnnnncccccaagggagaaggaacccgggcttaatttttccccaaaaaaaccggggccagaacaagggggttgggtccccccc

SEQ ID NO: 63231 - DNA, 1193 bp, Homo Sapiens
  misc_feature (209)..(303): n is a, c, g, or t
  misc_feature (317)..(333): n is a, c, g, or t
cacagttgaatcagtgggattaatacctataatctctggttttcaaaggtaatatggaatatttgacacttggtaaaaggtgaactacctttgtagtgaatcttttcctcttggtagcatcaacactggggataaatcagaaccattctgtggaatgaaatgtttctcaagagcctataatatagtagatagtgcatattaagatgtcnnnnnnnnnnnnnnnnnnnnnnnnnnnnnnnnnnnnnnnnnnnnnnnnnnnnnnnnnnnnnnnnnnnnnnnnnnnnnnnnnnnnnnnnnnnnnnngagaccctgtctcnnnnnnnnnnnnnnnnntcaatttagctagcaggaatttgacatttaaagagggaatcttctctacctctacaaaatcaacacttaacacttttttcaccttcagaattatttagaatgtggatttactttgtctagttttttcctttatagtgtaatttattgttactctctatttactgactaccagagatatacaaaatactgtgcaaaagattgttactgttcaaagagcttacaaactaaatttaaaagaatagcaagtctgaaaaatagaagatagtcaaatatttgtttatgctaagaactgtttttaattttcagctttgatgtaaattgctagcttaggtgtctttagttcaagcatgttaggaaatcctctttattcttaaatatagatacatgtctgcatatatgattgaattttagagccagaaagcatgtagagcagttgtgattagtagaaaatacactgacaagaagatatttgcatttatttcccaaagctgccagtaactagattttgtgacttaagtcattttacctctccttgattagagcttcctgaggcatgcacactggcactgcaaatcacagacaggcctagatacagatcccctcaccccttgctacatccaaaggtggcctgggtggctggagcctctgggccagaaccacctttgtccattttcctcagtgtgcctacagcatcgctttccatgtgtgccataacttgggaatagttgggatgtgttgcttaactcctttgcaccattagttatctgtgagaccatctattccacactcttcattttttaaaaagagacaataattatttttaacttactgaagtttaaaattacctagcatttctgatt

SEQ ID NO: 63232 - DNA, 358 bp, Homo Sapiens
aacaaccagtttatttgcacataggtagcttctgtttgaaggaaggtaaagttataaggaaactcaaatactataagatgtgtcaaggtatttctccagaattaattgcaaagctagtgctgaaggattttaatcagcttctaaaattttcttctcaataaggcatatgttttgattacttagggaagattcctcatttttatatgcccgttatgcatttaatccacatgataggacattaaaaattaatataaagtaaagatcgtgctcatactgtacatatatttctgtgcatagaaactacttgttaatagtttattatcgaagctgtcagcgaccttcaagaggggtgttacat

SEQ ID NO: 63233 - DNA, 1123 bp, Homo Sapiens
  misc_feature (345)..(348): n is a, c, g, or t
  misc_feature (352)..(352): n is a, c, g, or t
  misc_feature (687)..(743): n is a, c, g, or t
  misc_feature (1073)..(1073): n is a, c, g, or t
tggacacctcaacttccagattgagcaccatctttttcccacgatgcctcgacacaattaccacaaagtggctcccctggtgcagtccttgtgtgccaagcatggcatagagtaccagtccaagcccctgctgtcagccttcgccgacatcatccactcactaaaggagtcagggcagctctggctagatgcctatcttcaccaataacaacagcccccctgcccagtttggaagaagaggaggaagactctggagccaaggcagaggggagcttgagggacaatgcccctatagtttaatactcagagggggttgggtttggggacataaagcctctgactcgnnnntttnccaacacactttaatttactcaaaagtcttcctaaatccaaatgaaaacgagaacccgccccgtcattaacgcacccaaaaaaccccgctagacctcttccacctcccctcccccacccttttgtgcgggcacggccctctgtcccctcaaaaaatgtttttctaaacataatatccccctggggtgccctgggtccccccctcgcggttttacgacaaaaatgctgggcccacgagccccggccctttccaatgacggaaaatcccgcccgggccaaacaaaagattaagggggttggggaaatgttccctccaaggccgccattaaactacannnnnnnnnnnnnnnnnnnnnnnnnnnnnnnnnnnnnnnnnnnnnnnnnnnnnnnnnacagacaatttacacaagacgtgatccttccccccgggggcgccccctagttaatcggggcaaaacccggttgtagacaggccggggaaccctatatacgcgcgggagagcgtggtcctacattcacctacaaaacttctgaggtctcccccgtggctatacttttccgcaccttcacctcctgaaggagaacagcgccgccacgcttactccccactctcataacaaaactttttcccgctcgccccagacctgcggagtacacacaccctcgctgagccaacgaatgacgctcggccagtggggaagaacgccaagaatacgcggcgntcgagtatgggtactatataatctcgccacacttgtatcctcccccccct

SEQ ID NO: 63234 - DNA, 753 bp, Homo Sapiens
  misc_feature (639)..(665): n is a, c, g, or t
caagatgaattattaaaatctccatcaaacgtgccttaaagctaaagcattttgacaggagtatttaaacttagtccaggatattttcctttgtgttttataactttacagaggaccaaagcaattcttgttttagtttctttgcgaagcctgctcctccttcccttcataaggactttttttgtctttctttaacgcccaggcttcgtcttatttctactgtttttgtcgcaacttccattgatttatgtcccttccctcccccctaagtacatcagggaacctttccacactataaatgatatgactactgtttggggtttctgggcccccatccgtgtacgtatgtggcatttccaggtatgactgagtgtgagagacatgtcagaggctcttcagtgatttcttgctattgaccgatgcttcactgtgccaaaagagaaaaaaaatgttgggttttgtaattaaattatttatatatttttgaaacccgaattgaaaatgttgcaggcaacgggctacagctttattagtggttctctaactgtggtctccttggggccaagcaattttctttaaaggaaaagttgattatgtatgtgggggtgccaggaccactgcccttgaaagcaagtgtgnnnnnnnnnnnnnnnnnnnnnnnnnnngtgtctgtgtacatattcatgtataaattttatgaaacccaagcatagtgcttattttttaataaaacaactgacttaacacattgtg

SEQ ID NO: 63235 - DNA, 1608 bp, Homo Sapiens
  misc_feature (663)..(710): n is a, c, g, or t
  misc_feature (730)..(751): n is a, c, g, or t
  misc_feature (971)..(989): n is a, c, g, or t
acctatccgatgcggggaagtactctttgcagttggtggttggtgcagtggagatgccatttccagtgttgaacgatatgatccacagaccaatgaatggagaatggtggcttcaatgagcaaaaggagatgcggagttggggtcagtgttcttgatgatctgttatatgcagtaggaggccatgatggatcctcttatctcaatagtgttgaaagttatgaccccagaaccaaccagtggttctccagtggtggccatgacatcacgccgtagtggagttggcctggcagtggtcaatggacagctcatggcagtaggaggttttgatggcacaacatacttgaagaccatagaagtttttgatcctgatgccaatacatggaggttatatggcgggatgaattaccgtcggctagggggtggcgtaggagttattaaaatgacacattgtgaatcccatatttggtgaacacagagaagacagtcttgtatatattcctctgtattctggggagctttgaccttggagctttgtacagcttgagaaaacattagaacaaattttattatttgccggtgcctcaacaaatggaaatacaatccaatgaaagtacttcacctgcaagatgcacaataattttcaactctgtgcagaagaatannnnnnnnnnnnnnnnnnnnnnnnnnnnnnnnnnnnnnnnnnnnnnnnaacttatccttcctcccacnnnnnnnnnnnnnnnnnnnnnnttccaagcagcaaaacttactttgtttgtaaggtattcatttaggtttgaaaatactatttaataagggcagaagggctatatatgatttggctattatttctagacactccatccacatgattccactaacaaggattaccaggaataaaggtaggtatgcaaaatgtattagctacccattattctcgcactaaccaccagaagacttgaaaatcttnnnnnnnnnnnnnnnnnnncaagaaaaggcaacatctcattttaaatagtacaattcagaagggatactaaatcaataaaaaccaggactcagacactacagttttcatcagtgtaattttatgtcttgtttctttctatatgaacttgtttatttagtctttttttcataatattctcatagagtttctgctagatctagagctctgctcagtgcctcttataaaaacaatatataagtctcatatgctgtcttgagaatccaagagaatcacatgcagctctgcaacagtttttgctcaaaaatgttactgactaaagcaactgtccttcctgtttccttattgctaccaaggaccagcagggagaaatgtcttctcccagcagtgaattctgttatgcaatttattcttgatgctcaggcctggttaagctgaggcttacctttaataacagcctccaagggaatgaattattcagttaatgtaatagcacacattaaagagtgtaaaatcaatttgaggcatttttattaataatcttgggttccttttataccaaaccaaggggatcatttaatcctccatttccaaaaagggcccattgggttaacttaatttccccctcaaaatttggccc

SEQ ID NO: 63236 - DNA, 304 bp, Homo Sapiens
tatgggcttttgtatagttgttttaagggaaacgaaatggaattcgaagggaccttttcactaaccccacttctgtgtgttctgcatggcgcctgccccagggcatctgccaactccagtatcagctctcacagtgtacttggtaccatccctgggctctgctggcgagacgtaacagctgtagagatgaaaacaggctgccagaggctggcacacgcctggccggcttttctccatctggggacagtcctactccaagaacactgcacaccagctcctcacacagatcccacttactcttttt

SEQ ID NO: 63237 - DNA, 1007 bp, Homo Sapiens
  misc_feature (169)..(224): n is a, c, g, or t
gttccctggtcgattttattactacctgccacgaaccccatagtatgctggtaccggtccggaattcccgggatggcgcgacgtcggccgtgcggggtcccggcgtcggcggcgcgcgcgctccctcctctcggagagagggctgtggtaaaagccgtccggaaaatgnnnnnnnnnnnnnnnnnnnnnnnnnnnnnnnnnnnnnnnnnnnnnnnnnnnnnnnnactgctccataaaaatacagactcaccagttcctgctttgatgtgacatgtgactccccagaatacaccttgcttctgtagaccagctccaacaggattccatggtagctgggatgttagggctcagggaagaaaagtcagaagatcaggacctccagggtctcaaggaccaacccctcaagtttaaaacacggtgaagacacgataagaaagaacgagaaagagggcaagcatgagcccgtgcagccatcagcccaccactctgctgagcccgcagaggcaggcaaagcagagacatcagaagggtcaggctccgccccggctgtgcctggaagcttctgcctcccccaaacagcggcgctccatcatccgtgaccggggacccatgtatgatgaccccatcctgcctgaaggcttggacacggaagcttaagcaaaggaaatctggccgctctgcctgggaagtatgatgtgtatttgatcaatccccagggtaaagcctttcgctctaaagtggagcttgattgcgtacttcggaaaaggtaggcgacacatccctggaccctaatgattttgacttcacggtaactgggagagggagcccctcccggcgagagcagaaaccacctaagaagcccaaatctcccaaagctccaggaactggcagaggccggggacgccccaaagggagcggcaccacgagacccaaggcggccacgtcagagggtgtgcaggtgaaaagggtcctggagaaaagtcctgggaagctccttgtcaagatgc

SEQ ID NO: 63238 - DNA, 310 bp, Homo Sapiens
gggaacattttatcctacctgaaagtaaacgagtaattgtgaagcataaggactctgagggctaatacaactctgtcttcatgtgttgactgcctggcacatagtattcattctcttccctttaacatagaagtgtccagctgcgtacagtctagtaaccagcaactgtaaacgaacctgtgcctctaacaagcgattctaaaccacctatgagtatttcttttagggctcacttaaatacatgtttgtatatactgtattctagccagaataattttagatctggattcagataggaggggtaccgagc

SEQ ID NO: 63239 - DNA, 567 bp, Homo Sapiens
ttaaattaaaaaacaatttattgaaaaagagtaatgctttatacaaattcccattataaaaccccaaaatgtctattggtctgtttccaggtgtggtagaagaatataaaaagatcaaaattggataaattctattgtaacaatttcgttggtcattttgggccataaaatttttttgtaatgtttggtaactgatatccacatggaattacactcacacatcatgaagatctatgtatgtggcaaaagccatttaaattttaacttccaaaagcatatattctcaggtttggaaggcacactaaaatttattaggtccaattcctcataagacacggtgggtgactttccttgtgtagtttattatgaagtaccatttccaaactaactatcctagcagcgtcagctgccagctaacagcaagagctctgagggcatcactgaacagatagcaccttatgagttattatgattcaaaaatctcccttgctgttggatttaccaacacgtaggcttttatttcttcgccattacatgcgtgtttagccacagaaagcatcgggcccc

SEQ ID NO: 63240 - DNA, 1166 bp, Homo Sapiens
  misc_feature (875)..(884): n is a, c, g, or t
  misc_feature (1095)..(1095): n is a, c, g, or t
gggaagcagtctctttggtcagtaacaagtgcaatggaaagaaaacgatcccttccttcttccactttcacagcttttctctgaactaggagaacctgggggtggatttgggtgggtggggccaaagaggaggcttctattgataaatccagagcctcaaggggcccagccacgtcaaacttctctccctcagggactctccagcaccaaaaggcagaaggtggaagccgtttttcccccagagccctgtgtttttgtgaaggcctcactgtggctcctctgttttacatactcattagtaagtgggaggtccactggggcaacagacactgccacaatttcagtgttgtgttcagccaaggggacggtctgggcaggcagcttaagtgtgagtttagtcacaactcctgagtgtcccgctctcctgcttacctaggaggtgagtgccaggaaaatacaccaaatgcttctagtattgtttccccacttaaaatagtcctgcttaaattcacatggtgtggtctgatgttctgagagcatcaggaaatacaacccttttgcccatttacccttctccccggatcccaaggtggtctgttgctctggcttcctttcattgtcttaggccttcatggagtggatgctgcctcctcctggctgtttttgtgcctgtttgaagctactgctgcctccatttctgggaaagacctttgagagcctagcccaggcctaagggctatgtttggtaccagtgttttgtctttagcttttctatgtgattgtgccgtcattctgttttaagctcatggatcaatggatttgtttacaatgtgatattttctattaaatccagtattttctaaccccacccattnnnnnnnnnnttattaatatggccgggcccctccgcccctccaaaaaacttttccaaaacattttgctttggcgccccgggccccagaagggaaaatggaaccttgggccaataccttgtcttccctaaggaaaatcctggctcagtgaacacacgggctttggaattcttccccacgataaaagaacgcgcccgcgggcggttaatcccaaaccgttttnggaaaacacaatacgccaaaaagggagagttcctggaaggggcttatacaccgggtggaacttacttccac

SEQ ID NO: 63241 - DNA, 825 bp, Homo Sapiens
  misc_feature (508)..(545): n is a, c, g, or t
  misc_feature (650)..(669): n is a, c, g, or t
ggtgacctaggcgccaacgacgaactgatttccttcaaagacgagggcgaacaggaggagaagagctccgaaaactcctcggcagagagggatttagctgatgtcaaatcgtctctagtcaatgaatcagaaacgaatcaaaacagctcctccgattccgaggcggaaagacggcctccgcctcgctccgaaagtttccgagacaaatcccgggaaagtttggaagaagcggccaagaggcaagatggagggctctttaaggggccaccgtatcccggctaccccttcatcatgatccccgacctgacgagcccctacctccccaacggatcgctctcgcccaccgcccgaacctatctccagatgaaatggccactgcttgatgtccaggcagggagtctccagagcacaccagccctcaaggatgcccgacgcccatcaccggccaacattgtctcgacccccctttctttgctgcactcaaggaaatgactgttcccatttgtannnnnnnnnnnnnnnnnnnnnnnnnnnnnnnnnnnnnntccgcgaccctgaaaaggcatcccccccttacaaagagtccgggcagcccccgttgcacagccacccatcaaccctctcttccgcccccttaccacctcttttannnnnnnnnnnnnnnnnnnntctttttcatcactccatcacctgtgtccctattctgcactctacgcccccctctttctacattcccatccccgccaccccgctatccatctctctgctcccatccgcgcatttacgcccccctaatacctccaacgcgcactcatccctgcacat

SEQ ID NO: 63242 - DNA, 672 bp, Homo Sapiens
tctcttgtctcaggtgctcatccacataagcttaactctaaccaggctctggcaaacccagtttcaacacacaccattttaactcccaattccagcctcctgtctacttctcacgggacaagaatgccatcattatctacagcagttcagaatatggggatgtatggaaatctgccttgtaatcaacctaacacatacagtgtcacttcaggaatgaatcaattgacccgacagagaaacccaaagcaattgttagcaaatcaaaacaaccctatgatgccacggccacctaccttagggccaagtaataataacaatgtagccacttttggagctggatctgttggtaattcacaacaattgagaccaaatttaacccatagtatggcaagcatgccaccacagagaacatcaaacgtaatgatcacatccaacacaactgcaccaaactgggcctctcaagaaggaacaagcaaacagcaagaagccctgacgtctgcaggagtccgcttccccacaggtacacctgcagcctataccccaaatcagtcactgcaacaggcagtaggtagccagcaattttcccagagggcagtggctcctcctaaccagttaacaccagcagtgcaaatgagacccatgaaccaaatgagccaaacactaaagaactta

SEQ ID NO: 63243 - DNA, 266 bp, Homo Sapiens
agccactctggagtccgtcgtacaggagagatttgggtctcgctgtgctagaatattccgtctagttttgcagaagaaacacatagagcagaagcaagtggaagactttgcaatgattcctgcagaggaagctaaggatatgctatataagatgctctcagaaaatttcatgtcactccaggaaattccctaaacaccagaccatgccccatccggaccttctatttatatactgtgaacatcctgtcagctgcccgagtggtccc

SEQ ID NO: 63244 - DNA, 1098 bp, Homo Sapiens
ggtccggaattttcgggatgagtgactctgcttccgtttctggttttgctctagtgtttgggtttcttcgcggctgctcaagatgaaccgactcttcgggaaagcgaaacccaaggctccgccgcccagcctgactgactgcattggcacggtggacagtagagcagaatccattgacaagaagatttctcgattggatgctgagctagtgaagtataaggatcagatcaagaagatgagagagggtcctgcaaagaatatggtcaagcagaaagccttgcgagttttaaagcaaaagaggatgtatgagcagcagcgggacaatcttgcccaacagtcattcaacatggaacaagccaattataccatccagtctttgaaggacaccaagaccacggttgatgctatgaaactgggagtaaaggaaatgaagaaggcatacaagcaagtgaagatcgaccagattgaggatttacaagaccagctagaggatatgatggaagatgcaaatgaaatccaagaagcactgagtcgcagttatggcaccccagaactggatgaagatgatttagaagcagagttggatgcactaggtgatgagcttctggctgatgaagacagttcttatttggatgaggcagcatctgcacctgcaattccagaaggtgttcccactgatacaaaaaacaaggatggagttctggtggatgaatttggattgccacagatccctgcttcatagatttgcatcattcaagcatatcttgtaaaacaaacacatattatgggactaggaaatatttatctttccaaatttgccataacagatttaggtttctttcctttctttgaaggaaagtttaattacattgctcttttattttttcccttaagaggctcattgcttgggacctgctttcttcgtactacaatttgcttccttttttttcttttgaaaaacgaactcagtttaaaaggattttttacctcggatgacttggttttccttccttaataaaaatttgaaataaaacctagggaaatgggatctttaaaagtctatgacaggggtaacttctacagcctccaaatggacct

SEQ ID NO: 63245 - DNA, 973 bp, Homo Sapiens
  misc_feature (417)..(417): n is a, c, g, or t
  misc_feature (447)..(465): n is a, c, g, or t
  misc_feature (505)..(536): n is a, c, g, or t
ggatttataatggaaggaattttttaaaaaattttaagctgtgcactttcaagtaagatctgaattctaatgctggcttgtgcctcttactatgtggtttggtcattatagataatgcccagtttcagtttccccatctttgaaaaggagataatatgttatctcttgggagtagttctgaatatgaagtgtgttgatacaagaagcactgccaatgtttctgtttcttaaatttaaaactggcctggtttgccttttttatcaagagagcttaacagataaaaaatgaaattagtctattttctacttgccagcagagtatctgtcttattttaggatgcagtgtgaaacttaccattcaactgaacaggtagttgtccactaatgaaaataaaacattttctctaagcaaacccngaaaatcaaaccccatccaacacctctgtnnnnnnnnnnnnnnnnnnnacagtgccgcactacgacccaccccactaatcaactagtnnnnnnnnnnnnnnnnnnnnnnnnnnnnnnnntgtgcgttgctccgcagaggtttgaccgcgccgtaagccccctcgtcttgctgtgtgaatagccccggcttgcccaccccaatttccctccacccaaccagaccagtcggctccgcgggtgaccgccgctcgcctgagctgaccggcctgcccagtcaatcgctttatcgccgccgcctctttctcccacaccatgagtaaccccctcgtccttgaccccccagtgtattggcttgtctcgctctcaccctcgctggattacccctccgatctcctacatgctatcatcgccgccccgccgcgagcacttttcctctctttaccccaccacgtttgttgacgcgggccctttttcctctcccctcgcgatgtttcaccgcccgccgactctctcgccccacccagccccgcatcgtgtcttctctggtgcgggtcgc

SEQ ID NO: 63246 - DNA, 320 bp, Homo Sapiens
agtctgtcccgggtgacccgcattgaggagcggtataggcccagcatggaaggctaccgggcacctagtagacaggatgtgtatgggccccaaccccaggttcgggtagttgggagcagcggtggatctgcatcgctttcatccagagccttatgggctagaggatgaccagcgtagtatgggctatgatgacctggattatggtatgatgtctgattatggcacgtgcccgttcggtctgggacaccctctggactctcgtcggcgcctcaggagctatgaagacatgattggtgaggagtgccatcgaattcaccacc

SEQ ID NO: 63247 - DNA, 371 bp, Homo Sapiens
cggtaccctgtattggtggtgctggccgtccgcacgtggcactggctgatggtggtggccgagttcctcagcttaggctgctacgtgtcctcactcgcttttctcaatgaatattttgatgttgcctttatcaccaccgtgaccttcctgtggaaagtgtcggcgatcaccgtggtcagctgcctcccgctgtatgtcctcaagtacctgaggcgcaagctctctcctcccagctactgcaagctggcctcctaaggggctgtgcacccccagcgggctggccccagcaccttctgcccttcccagcaccttgtgcccttgccagtgaacgcagggtttgccattgctaccaagcaagcaccaccaataca

SEQ ID NO: 63248 - DNA, 1280 bp, Homo Sapiens
gagcttctgctctggggactggtgatgcagggattaaagtgtgaagactgcggcatgaatgtgcaccataaatgccgggagaaggtggccaacctctgcggcatcaaccagaagcttttggctgaggccttgaaccaagtcacccagagagcctcccggagatcagactcagcctcctcagagcctgttgggatatatcagggtttcgagaagaagaccggagttgctggggaggacatgcaagacaacagtgggacctacggcaagatctgggagggcagcagcaagtgcaacatcaacaacttcatcttccacaaggtcctgggcaaaggcagcttcgggaaggtgctgcttggagagctgaagggcagaggagagtactttgccatcaaggccctcaagaaggatgtggtcctgatcgacgacgacgtggagtgcaccatggttgagaagcgggtgctgacacttgccgcagagaatccctttctcacccacctcatctgcaccttccagaccaaggaccacctgttctttgtgatggagttcctcaacgggggggacctgatgtaccacatccaggacaaaggccgctttgaactctaccgtgccacgttttatgccgctgagataatgtgtggactgcagtttctacacagcaagggcatcatttacagggacctcaaactggacaatgtgctgttggaccgggatggccacatcaagattgccgactttggtgatgtgcaaagagaacatattgcggggagagccgggccagcaccttctgcggcacccctgactatatcgcccctgagatcctacagggcctgaagtacactttctctgtggactggtggtctttcggggtccttctgtacgagatgctcattggccagtcccccttccatggtgatgatgaggatgaactcttcgagtccatccgtgtggacacgccacattatccccgctggatcaccaaggagtccaaggacatcctggagaagctctttgaaaggggaaccaaccaagaggctgggagtgacgggaaacatcaaaatccatcccttcttcaagaccataaactggactctgctggaaaagcggaggttggagccacccttcaggcccgaagtgaagtcacccagagagtacagtaactttgaccaggagttcctgaacgagaaggggcgcctctcctacagggaccagaacctcatcgagtccgtggaccagtctgcattcgctgggcttctcctttgtgaaccccaattcgagcactc

SEQ ID NO: 63249 - DNA, 1081 bp, Homo Sapiens
  misc_feature (1006)..(1020): n is a, c, g, or t
aagcgtatgtgacatatagaccagtggtaagaaagcaggctggtacggtcggatatccgggatatcgtcgcccacgcgttcggtgtggttggtggtgacataggcttctttttacatggtgctgcagcccagctaattaatggtgcacgtggacttttagcaagcgggctcacgtggaagagactgaacctggcatggaattcctgaagatgttggggtttttttctttcttaatcgaaagttaacatgtctgaaaagtttgttagaactactgcggaacctcaaaatcagtagattgtggaagtgattcacagctaaactttttccttggccctccttgtgttctaattgcttgcaagtgtaatactaggatgtccaagatgccagtttttgcttctttgttagttgtcagctgcttttatcaaatttcaggccattatccaacaaacactataaaaatatttgaacaattggatttcaaacattttcgttttgtggagtggtgctcaccaagtggtacagccctaagcaagtgaacacaaacacatttaagtgtattttgtctgattagatgttagccagttatgctatttcattcaaatgtctgaaaaaatcaattgactattcccttttcctaaagggcagagacagataatctcacttccagagcaatgacttggagaaaaaaaagtgttggtctttttgctcttttgtaattaaatccggatgtacctcaaacgacttaagcctgtggtgataagatgctttcctcagcagaaaggagggaaaaaaaacaactggaactcaaagcttgaaattctgtggcaaaacatgagatgtccaggattggaggttgaaaagatttcactacagtgttctgcaatagttggagcagataactttcagtgtagccacagccatggactccagatttccagattttcaagacctggacctggaacccgaaagagcttgtcacgatgcggcaggaacactggaggttgannnnnnnnnnnnnnngaattttgggactgttgaccttgctgtgagcaaagagacaacgactgagcaacaccaccaa

SEQ ID NO: 63250 - DNA, 530 bp, Homo Sapiens
tgtattggtggtgctggccttctctgtggaactgctctggcagtcatcgtgcctgaaggagtacatgccctttatgaagatattcttgagggaaaacaccaccaagcaagtgaaacacataatgtgattgcatcagacaaagcagcaggaaaatcagttgtctcatgaacatgagcacagccacgaccacacacagctgcatgcctatattggtgtttccctcgttctgggctatcgttttcatgttgctggtggaccagattggtaactcccatgtgcattctactgacgatccagaagcagcaaggtctagcaattccaaaatcaccaccacgctgggtctggttgtccatgctgcagctgatggtgttgctttgggagcagcagcatctacttcacagaccagtgtccagttaattgtgtttgtggcaatcatgctacataaggcaccagctgcttattggactggtttcctttcttgacgcatgctaggcatagtagcggaatcgaatcatggaagcacttgcagc

SEQ ID NO: 63251 - DNA, 494 bp, Homo Sapiens
cctgactgtcttaaagattatgctagctttagaacacatgcaaacagctgcagctctgtgattaaaatgttaaggtcactagaatagtgttaggaaaatgttaatagataattctgctgcctctattagcttatgtatgatccttaatagcattgcttctccttcagtttctatttaggaggtgaagaatcttttaataaggtagaaagttgctttatttaaatttgtactgtagaatgtttgtgatgcagtatttgtaaaattgatatgaaaaataatttctcaaagtctattgtttgatctagttattttaataaaggaactctagaagtttcaagtggccagtgaagtgtgaggaatagagagtaaaggaaataattaataatggtgaccctctgttaagtggtttactttttccattaatataaatttcatttggaaagattaaaaaagcaagtttgattgaacttgataaatcagaaatattttccagc

SEQ ID NO: 63252 - DNA, 555 bp, Homo Sapiens
  misc_feature (101)..(101): n is a, c, g, or t
gaaaaatcagtcttgacacctcttcggggagatgtagcctcttgcaatacccaagtggcagagaaaccagtgctcactgctgtgccaggaatcacacggcncctgaccaagcggcttcccacaaagtcatcccagaaggtggaaggtagaaacctcagggattggagactcattattgaatgtgaaatgtgcagcacagaccttggaaaaaaggggtaaagctaaacccaaagtgaacgtgaagccatctgtggttaaagttgtgtcatcccccaaattggccccaaaacgtaaggcagtggagatgcacgctgctgtcattgccgctgtgaagccactcagctccagcagtgtcctacaggaacccccagccaaaaaggcagctgtggctgttgtcccgcttgtctctgaggacaaatcagtcactgtgcctgaagcagaaaatcctagagacagtcttgtgctgcctccaacccagtcctcttcagattcctcacccccggaggtgtctggtcccccctcatccgcggatccaatggggtaccgagctgggat

SEQ ID NO: 63253 - DNA, 291 bp, Homo Sapiens
ggatgatgatgatgatgaagatgacacagggatgggagatgagggtgaagatagtaatgaaggaactggtagtgccgatggcaatgatggttatgaagctgatgatgctgagggtggtgatgggactgatccaggtacagaaacagaagaaagtatgggtggaggtgaaggtaatctcagagctgctgattctcaaaacagtggtgaaggaaatacaggtgctgcagaatcttctttttctcaggaggtttctagagaacaacagccatcatcagcatctgaaagacaggc

SEQ ID NO: 63254 - DNA, 749 bp, Homo Sapiens
gggtccggaattcccgggatcaagtatccacagatctaacacctcagactttcagtgaaaaagttctacaagggaaaaatcattgggtgattgatttctatgctccttggtgtggaccttgccagaattttgctccagaatttgagctcttggctaggatgattaaaggaaaagtgaaagctggaaaagtagactgtcaggcttatgctcagacatgccagaaagctgggatcagggcctatccaactgttaagttttatttctacgaaagagcaaagagaaattttcaagaagagcagataaataccagagatgcaaaagcaatcgctgccttaataagtgaaaaattggaaactctccgaaatcaaggcaagaggaataaggatgaactttgataatgttgaagatgaagaaaaagtttaaaagaaattctgacagatgacatcagaagacacctatttagaatgttacatttatgatgggaatgaatgaacattatcttagacttgcagttgtactgccagaattatctacagcactggtgtaaaagaagggtctgcaaactttttctgtaaagggccggtttataaatattttagactttgcaggctataatatatggttcacacatgagaacaagaatagagtcatcatgtattctttgttatttgcttttaacaacctttaaaaaatattaaaacgattcttagctcagagccatacaaagtaggctgattcagtccatgacc

SEQ ID NO: 63255 - DNA, 591 bp, Homo Sapiens
  misc_feature (556)..(556): n is a, c, g, or t
gaatcatcaagaaatgtcgcacgagcccagacgcctttgtgcagctggccctccagctggcgcactacaaggacatgggcaagttttgcctcacatacgaggcctccatgacccggctcttccgagaggggaggacggagaccgtgcgctcctgcaccactgagtcatgcgacttcgtgcgggccatggtggacccggcccagacggtggaacagaggctgaagttgttcaagttggcgtctgagaagcatcagcatatgtatcgcctcgccatgaccggctctgggatcgatcgtcacctcttctgcctttacgtggtgtctaaatatctcgctgtggagtcccctttccttaaggaagttttatctgagccttggagattatcaacaagccagacccctcagcagcaagtggagctgtttgacttggagaataacccagagtatcgtgtccagcggagggggctttggaccggttgctgatgacggctatggtgtgtcgtacatccttgtgggagagaacctcatcaatttccacatttcttccaagttctctngcctgagacgacccctatccgctatccaaatggta

SEQ ID NO: 63256 - DNA, 1248 bp, Homo Sapiens
  misc_feature (1159)..(1159): n is a, c, g, or t
  misc_feature (1165)..(1165): n is a, c, g, or t
  misc_feature (1180)..(1180): n is a, c, g, or t
  misc_feature (1217)..(1217): n is a, c, g, or t
  misc_feature (1228)..(1228): n is a, c, g, or t
ggaattcccgggatggacctccctggtcggaagtggccgtgagcccaagccgcggtcccgggccggcacccaggatgggcgaggtggaggccccgggccgcttgtggctcgagagcccccctgggggagcgccccccatcttcctgccctcggacgggcaagccctggtcctgggcaggggacccctgacccaggttacggaccggaagtgctccagaactcaagtggagctggtcgcagatcctgagacccggacagtggcagtgaaacagctgggagttaacccctcaactaccgggacccaggagttgaagccggggttggagggctctctgggggtgggggacacactgtatttggtcaatggcctccacccactgaccctgcgctgggaagagacccgcacaccagaatcccagccagatactccgcctggcacccctctggtgtcccaagatgagaagagagatgctgagctgccgaagaagcgtatgcggaagtcaaaccccggctgggagaacttggagaagttgctagtgttcaccgcagctggggtgaaaccccagggcaaggtggctggctttgatctggacgggacgctcatcaccacacgctctgggaaggtctttcccactggccccagtgactggaggatcttgtacccagagattccccgtaagctccgagagctggaagccgagggctacaagctggtgatcttcaccaaccagatgagcatcgggcgcgggaagctgccagccgaggagttcaaggccaaggtggaggctgtggtggagaagctgggggtccccttccaggtgctggtggccacgcacgcaggcttgtaccggaagccggtgacgggcatgtgggaccatctgcaggagcaggccaacgacggcacgcccatatccatcggggacagcatctttgtgggagacgcagccggacgcccggccaactgggccccggggcggaagaagaaagacttctcctgcgccgatcgcctgtttgccctcaaccttggcctgcccttcgccacgcctgaggagttctttctcaagtggccagcagccggcttcgagctcccagcctttgatccgaggactgtctcccgctcagggcctctctgcctccccgagtccagggccctcctgancgccanccggaggtggttgtngcagtgggattccctggggccgggaagtccacctttntcaagaagcanctcgtgtcggccggatatgt

SEQ ID NO: 63257 - DNA, 285 bp, Homo Sapiens
ggacccggtataggctgaatcgtacggggctaggcttgagcttgtctagcatgactgcattggactgtgctggatgaggtccgggttgtgcctggggattgtcaggcaggcctgtggcgagtaggactcatctggccatcctctcctgaccctggggctgagcaggaggaagagcaagcagtccctgagggactataagaaggttcagatccagctggagaatctggagagcagtgttcgggaccgctgcaagaaggtattcacagacctcatgactgagatgac

SEQ ID NO: 63258 - DNA, 328 bp, Homo Sapiens
ataagcgatgaggggcagtacttttgcgttctgaagcgcatggagcagcacgtggccgatcaaatctccaaaatgatggagctggccagagagaaacaggcggcagagctgaaggccctgaaggagacgtcggagaacgacaccaaagagatgatgatatagcttggagacaaagagactggagcggatcctgtgcatgatcaatgtcaccacagacaagatggcccaggagaggttgaagagagagattaacaactcccacatccaggaagtagtgcaggtgatcaagcagatgacggagaacttggagaggcaccaggagaagctg

SEQ ID NO: 63259 - DNA, 420 bp, Homo Sapiens
aaattgcagataaaggggattactgctcctctgctctaaagttggtgtttgggtgatcagaagcaggtagccaatgggaagagcacttctgagtgataactaaagcagtttggtggccttttcacattctccaatgttcaagcatattttccactttctattttctctttcacctcattttgcctctctatcccccatccctgcttatttcttaagcccattgatggcactcattaaattgtatttagggctaatgagtcgttgttccttaatatcgttttcaatatgccacaatttaggacacatttaaaattttctaaaacaatatcctaatcaatattgactaatttgagccacattgccaactctaactcagcacacactgccagtcttccccaatatctgtctcctctcaattac

SEQ ID NO: 63260 - DNA, 875 bp, Homo Sapiens
ccagtactatagcggtcctttaggtagcgaggcctgggtggcgaattcggcacgaggtcgagatcagcgagaccccatgtacgagagatacagagacatgagagactcccgagatcctatgtacaggagagaaggctcttatgaccgatacctacgaatggatgactattgcaggagaaaggatgactcttattttgaccgttacagagatagctttgatggacggggccctccaggcccagaaagtcagtctcgtgcaaaagagcgtttgaaacgtgaggaacggcgtagagaagagctttatcgtcaatattttgaggaaatccagagacgctttgatgccgaaaggcccgttgattgttctgtgattgtggtcaacaaacagacaaaagactatgctgagtctgtggggcggaaggtgcgagacctgggcatggtagtggacttgatcttccttaacacagaagtgtcactgtcacaagccttggaggatgttagcaggggaggttctccttttgctattgtcatcacccagcaacaccagattcaccgctcctgcacagtcaacatcatgtttggaaccccgcaagagcatcgcaacatgccccaagcagatgccatggtgctggtggccagaaattatgagcgttacaagaatgagtgccgggagaaggaacgtgaggagattgccagacaggcagccaagatggccgatgaagccatcctgcaggaaagagagagaggaggccctgaggagggagtgcgtgggggccaccctccagccatccagagcctcatcaacctgctggcagacaacaggtacctcactgctgaagagactgacaagatcatcaactacctgccagagcggaagg

SEQ ID NO: 63261 - DNA, 471 bp, Homo Sapiens
ctctaagatccctcttgctttgggacggcggaagctattgctgttcaagaccttctctcggaaagtggtggtggttgtccctaatgaggaatattggaagaagaggctggagttgaggaaggaagtagagggagatgatgtgcctgaatctataatgctggagatgaaagccaacttctctttgcctgaaaaatgcgactatatggatgaggtgacatatggggagctggagaaggaggaagctcagcccattgtcactaagtacaaggaggaggcaaggaagcttctgcccccctccgagaagcggacaaatcgccgaaacaaccgaaacaagcgtaaccggcagaaccgaagccggggccaaggctatgtgggcgggcagcgccgaggctacgacaaccgggcctacgggcagcagtactgggggcagcctggaaacagaggtggttaccgtaatttctatgatcgata

SEQ ID NO: 63262 - DNA, 605 bp, Homo Sapiens
acttcagcacctcccattacacactgcttctcttctctgaggtagtatgtatctggttctaaccgttaaggtttataactgtggctaattcacataacttctctgagtctgaatttcctgcctacaaaatggagaaataggaccttccacacagggtgcatgtgaggatgaaaggagtgaatgtataaagacacctttcccgattacccatactaccctcattatgactcttaacattagagagggctaaacaagggcagtgagaagactggcaggcagcagaaatcattttctttttgatctcacacaccagggcattccccgtaagaggcagtgagatgtagcctggccctggaactagaaacagaggtgtctgctgtgctagtgcctgagatgcacgatgctggggtcaaagacttgtgtccccacctcaggctgccaggatggcgtgcgtgccgtgacagggctcccgagtcatgcactcaggcagacagcaggctggagcccagcattcaggggtggcttcttgtctgtagagccgcatggcactcttcccacctcagtgcccacagccaaggtagggtcacttaccaagccaacacgta

SEQ ID NO: 63263 - DNA, 556 bp, Homo Sapiens
cactttgtagaaggcttaccacagaatgacttgcagcactatgcatttcattttgaaggctgtctttatcagataacttctgtaattcagtatcgagcaaataatcattttataacatggattttagatgctgatggaagttggctggaatgtgatgacttaaaaggcccatgttctgaaaggcacaagaaatttgaagttcctgcttcagagatacatattgttatttgggaaagaaaaatatcccaagtgacagataaagaagctgcctgccttccacttaaaaagactaatgacctacacgctctcagtaatgagaaaccagtatcttcaacatcgtgttctgtgggtgatgctgcctcagctgaaacagcctcagtaactcaccctaaagatatatcagttgcccctcgtactctttcgcaggacacagctgtaactcatggagatcatttactttcaggtccaaaaggtttggttgacaactattttaccgtctgacacttgaacgaaactatccagacaaacagcctcacgtttcacacgttacaattct

SEQ ID NO: 63264 - DNA, 986 bp, Homo Sapiens
  misc_feature (296)..(296): n is a, c, g, or t
gttacactgggtcgagttcagcctaatccatctaaacatgttcccacatccccatccccctcaccactgtgcagtgtgtatgcagtttgtgcgaaaggaaaacctactctctctggcctgtcagcaccagttttgccgcagctgctgggagcagcactgctccagttctcgtcaaggacggcgtgtgcgtgggagtctcttgcatggctcaggactgtccactccgtacaccagaggactttgtgtttccattggcttcccaatgaagaattgagagagaaatacaggcgctaccntcttcagggactatgtggagagtcattaccagctccagctgtgccctggtgcagactgccccatggttattcgggtacaggagcctagagctcgccgagtacagtgcaatcggtgcaacgaggtcttctgtttcaagtgtcgtcagatgtatcacgcacccacagactgtgccacaatccggaaatggctcacgaagtgtgcagacgactctgaaacagccaactacattagtgctcacactaaagactgtcccaagtgcaacatctgcattgagaagaatggaggctgcaatcacatgcaatgctccaaatgtaaacacgacttctgctggatgtgtctaggagattggaagactcatggcagtgaatactatgagtgcagtcgttacaaggagaatcctgacatcgtgaaccagagccaacaagcccaggcgagggaagccctcaagaagtacttattctactttgagaggtgggaaaaccacaataaaagcttgcagctagaggcacagacataccagcggattcacgagaagattcaggagagggtcatgaacaatctggggacatggatcgactggcagtacctacagaatgctgccaagctcttggccaagtgtcgatacaccctgcaatacacctacccatatgcatattacatggactcgacccagtgtgaggatcctctag

SEQ ID NO: 63265 - DNA, 329 bp, Homo Sapiens
taggccggaggactcaagacccttctcttgcttgtcacccgctccaggttggagccacagacacccaccgccaccccggctgggtctgcgtcctttcctgtgcctttccctccagaatgcggcctcagacctagaagctcaacccccccatgagggccacgtcctggggtagctcctgacctccgaccttatgtccaaaatttcacacccatggtttttcatttgacccgcccccttctcgctcataatgacacccagctcctttgagaggatcagagcccattgcacaagaagagccgctgccaaccatccgtgtccccagcctaaac

SEQ ID NO: 63266 - DNA, 454 bp, Homo Sapiens
agacatgagctcttcacactttagctggatgacagaaagtcgtcgagtcttgtcagaaaggtctacaccatcctgctgattcagtgctggtgacttggctgtcgtggctctctttactttctgtgaccctgtcaaggactatgtccagggcaacccaggctggtactgtgcatcctatgctgtgttctttgcaacctagctgaccctggcttgctgttctggacccaggaggcatttcccctggaacctgattctcctgaccgtctttaccctgtccatggcctacctcactgggatgctgtccagctactacaacaccacctccgtgctgctgtgcctgggcatcacggcccttgtctgccctctcagtcaccgtcttcagcttccagaccaagttcgacttaccatcctgccagggcgtgctcttcgtgcttctcatatcatgggccgagct

SEQ ID NO: 63267 - DNA, 309 bp, Homo Sapiens
tacatagcaaacgagatagatggtgtgggtgatgtggaagaactggaacccgtgaacactcccattgcgttgttcaccataagagatccagaaggtaaatagcaaggttaactgctacctggatggtgaagggccgttttaggttatcaccttacaaaccatacaataatgaatattgtagctagagaccacgaaacctatggactatgagctacagcagttctatgaagtagctgtggtggcttggaactctgagggatttcaggcactaaagggtcattaaagtgcaacttttagatgacaattact

SEQ ID NO: 63268 - DNA, 967 bp, Homo Sapiens
ccagcaagaagtcccgggctttgttcctgtcagccgctgttttcggcatcttcagtatttgcttcggacccacaaacgtcttcctgattgcgcattactcattcctttctcacacttccaccacagaggctgcctacttttgcctacctcctctgtgtctgtttcagcagcataaagctgctgcagtcgaccccctaatttactattacgcttcctctgagtgccagaggtacgtctacagtatcttatgctgcaaagaaagttccgatcccagcagttataacagcagtgggcagttgatggcaagtaaaatggatacctgctctagtaacctgaataacagcatatacaaaaagctgttaacttaggaaaagggactgctgggaggttaaaaagaaaagtttataaaagtgaataacctgaggattctattagtccccacccaaactttattgattcacctcctaaaacaacagatgtacgacttgcatacctgctttttatgggagctgtcaagcatgtattttgtcaattaccagaaagataacaggacgagatgacggtgttattccaagggaatatagcaatgctacagtaataaatgaatgtcacttctggatatagctaggtgacatatacatacttacatgtgtgtatatgtagatgtatgcaacacacatatattattaggagatgcagtatagaataggcactttaaaaccactcttatccaccggaaaccaagaaattatgaaaataatctctgattcccatgatataatatgcaaagtctaggtggtagagtatagcccatgaacaatatcatggtgttcatcagaagggagagatccatagttggggattgtacacttatggcaaataagtgtatctagaaattgtagacggcaaggtttacagtaatataagaggtaagacttaatactatatgtgcgtagaagtatagaga

SEQ ID NO: 63269 - DNA, 560 bp, Homo Sapiens
  misc_feature (45)..(58): n is a, c, g, or t
tgtgtgaggtactctagagcatccccattatacgcaggcaggtannnnnnnnnnnnnntagtcatagttgggttccagctcctggcttgatgagcccagggcgcttacaggcagcccatgaagttgatggacagttttagcatgagaatcacacagggtccctgtcctgggctcctctaaagccagtggatttgctgggcaccagagacaaatcatggagatggctgctggtggctcccaggttggcccagatggggtgagctgacatactacaggcccatcccaggccccgtgggctctgcttctggggctccataccctgccctgcaggggtgctgtgtttttcacacatttctttccctgaagccttctgtaacctgtcattttccttccttcctcttccggagcctgctgctttctctggacctgtctccacctcccacacagctcatcgtgaacaccacttggtgatggagggagtgggcccgtgtgtggtccccaagtgaggccacttgggagtttgtccttttcctcctttgcttcactcccagcagcagacc

SEQ ID NO: 63270 - DNA, 257 bp, Homo Sapiens
acattgtcaacttccttacagtggggtctgtgctccaaatgtggcacattgtggacaagtgcactgaactactccgagaaggccgggcctcagctaccaccaccatcactactgctgcagccacctctgtcactgtccctggtgctgggctgccatccgggagtgggggcactgtggcccctgctaccatgggctctgcgcgctcccatgcctccagccgggccagtgagggtcaatctcccagaaggatcctctgg

SEQ ID NO: 63271 - DNA, 538 bp, Homo Sapiens
  misc_feature (120)..(120): n is a, c, g, or t
tactccctgtcccggattgcagtttcttcatataatctatggtaaaaatacggaaaagaatggcagcggaaacgcagacactgaacttggggcctgaatggttccgagctctgtccagtngtgggagtattacatcccctcctctttctccagcattgccgatagtataaattagcagattatcgttacggcagagaagaaatgttagcacttttccttaaagacaacaagataccttcagaccttctggataaagaatttctggcctatcctccaggaggaaccccttccaccattggctctggtacccctttacagaagaagaacagagaaacttttccatgtctgtaaatagtgctgctgtcctgcgattgacaggacgaggaggaggaggaacagtggtgggggctccctagaggtcgaagttcttcaagagggcgaggcagaggcagaggtgaatgtggtttctaccaaagaagttttgatgaagtagagggtgtttttggtcgagggggtttgtgggtggggtaccgagctc

SEQ ID NO: 63272 - DNA, 597 bp, Homo Sapiens
tcagaaggtacgggcctggggccctgggctggagggcggcgtcgttggcaagtcagcagactttgtggtggaggctatcggggacgacgtgggcacgctgggcttctcggtggaagggccatcgcaggctaagatcgaatgtgacgacaagggcgacggctcctgtgatgtgcgctactggccgcaggaggctggcgagtatgccgttcacgtgctgtgcaacagcgaagacatccgcctcagccccttcatggctgacatccgtgacgcgccccaggacttccacccagacagggtgaaggcacgtgggcctggattggagaagacaggtgtggccgtcaacaagccagcagagttcacagtggatgccaagcacggtggcaaggccccacttcgggtccaagtccaggacaatgaaggctgccctgtggaggcgttggtcaaggacaacggcaatggcacttacagctgctcctacgtgcccaggaagccggtgaagcacacagccatggtgtcctggggaggcgtcagcatccccaacagccccttcagggtgaatgtgggagctggcagacaccccaacaaggtcaaagtata

SEQ ID NO: 63273 - DNA, 1240 bp, Homo Sapiens
ggaattcccgggatggaagagctgggagggccggaaccagaacccaagcgtgatcctgaaccggagcccgagcctgctgcagagtgtcagcatgctgcgcttcctggcaccccggctgcttagcctccagggcaggaccgcccgctactcctcggcagcagccctcccaagccccattctgaacccagacatcccctacaaccagctgttcatcaacaagtgaatggcaagatgcagtcagcaagaagaccttcccgacggtcaaccctaccactggggaggtcatcgggcacgtggctgaaggtgaccgggctgatgtggatcgggccgtgaaagcagcccgggaagtcttccgcctggggtccccatggcgccggatggatgcctctgagcggggccggctgctgaaccgcctggcagacctagtggagcgggatcgagtctacttggcctcactcgagaccttggacaatgggaagcctttccaagagtcttacgccttggacttggatgaggtcatcaaggtgtatcggtactttgctggctgggctgacaagtggcatggcaagaccatccccatggatggccagcatttctgcttcacccggcatgagcccgttggtgtctgtggccagatcatcccgtggaacttccccttggtcatgcagggttggaaacttgccccggcactcgccacaggcaacactgtggttatgaaggtggcagagcagacccccctctctgccctgtatttggcctccctcatcaaggaggcaggctttccccctggggtggtgaacatcaatccgggggtatggcccaacagcaggtgcggccatcgcccagcacatggatgttgacaaagttgccttcaccggttccaccgaggtgggccacgtgatccagaaagcagctggcgattccaacctcaagagagtcaccctggagctgggtggtaagagccccagcatcgtgctggccgatgctgacatggagcatgccgtggagcagtgccacgaagccctgttcttcaacatgggccagtgctgctgtgctggctcccggaccttcgtggaagaatccatctacaatgagtttctcgagagaaccgtggagaaagcaaagcagaggaaagtggggaacccctttgaagctggacacccacgcaggggcctcaggtcggacaaggagcagtctgaacgagtcctaggcacaatccagcttggccatctcgagcttc

SEQ ID NO: 63274 - DNA, 267 bp, Homo Sapiens
caagtgcttcctgtctcggacagatctgcagcttgcagtgaagctttcaagcaccgtggtgagaagctgtttgtgtgtgaggagtgtgggcaccgggcctcgagccggaatggtctgcagatgcacatcaaggccaagcacaggaatgagaggccacacgtatgtggagttctgcagccacgccttcacccaaaaggccaatctcaacatgcacctgcgcacacacacgggtgagaagcccttccagtgccacctctgtggcaagac

SEQ ID NO: 63275 - DNA, 533 bp, Homo Sapiens
tattggggtctctgggtccctaagtccactcgcctgcatgctaggcctcagcattcggagctcccaggaggaggagccggtggacccacagctgatgcgcttggacaacatgcttctggcagagggtgtggctgggcccgagaaagggggcggctcagcagcagcagctgcagccgctgcagcctctggtggtggtgtgtcccctgacaactccatcgaacactcggactatcgcagcaaacttgcccagatccgtcacatataccactcggagctggagaagtatgagcaggcatgtaatgagttcacgacccatgtcatgaacctgctgagggagcagagccgcaccaggcccgtggcccccaaagagatggaacgcatggtgagcatcatccatcgaaagttcagcgccatccagatgcagctgaagcagagcacctgcgaggctgtgatgatcctgcgctcccgtttcctgggtgccagacgaagcgccgtacttcagcaacctgtcctaatgatatttctactccacc

SEQ ID NO: 63276 - DNA, 471 bp, Homo Sapiens
gtaattccctttagagtctacaaaaatgtttttaaaaggatcaggtctgcttttagtttcatttttgtttctttcccgtcccactctttaaaaactggttccgtgaggaaaggcagaagccttccgtgtctcttgcaggctgggccggcttcatgccagtgcgagggcgtcccgtgcccacgtacatacgtatgtctccatgagttctgggctccactggttccaattgagctccagccctggttttcctacccatgcagttagggactttaatttaattttattttgtagggccaccgccttcaaacacaactgctacaacattctaataaaggctcatttaacccccaggctcctgtcgtgtgaatatcctcagtctgtaggaaactttttttgacacagcatagctatgctgtgtcaaaaaaagtgacgacgtcattatccactataggtcgcctgatcctgcaagag

SEQ ID NO: 63277 - DNA, 423 bp, Homo Sapiens
tgctctctggctgtgctcctgcttaaagaaatcagtccttcctttccgacttagtcctcgggaagaagtttcagactacaaggtatcattggaacatttcaagatcatcaaatcaaattccacagggattggtgaccaaccagaaggctcagacatctgattgctgacctgtccagacatcatctggtctccctgaacctgaaatcacaccatggatgattttgagcgtcgcagagaacttagaaggcaaaagagggaggagatgcgactcgaagcagaaagaatcgcctaccagaggaatgacgatgatgaagaggaggcagcccgggaacggcgccgccgagcccgacaaggaaacggctgcggcagaagcaggaggaagaattctttgggacaggttgaccgaccaggtggaaggtgaat

SEQ ID NO: 63278 - DNA, 605 bp, Homo Sapiens
catgtgctgtagtccagcggggacacatacaagctgaaaaggcacatgagaacccattcaggggaaaagccttatgaatgttatatttgtcatgctcggtttacccaaagtggtaccatgaagatgcacattttacagaagcacacagaaaatgcggccaaacttcactgtccccactgtgacacagtcatagcccgaaaaagtgatttgggtgtccacttgcgaaagcagcattcctatattgggcaaggcaagaaatgccgttactgtgatgctgtgtttcatgagcgctatgccctcatccagcatcagaagtcacacaagaatgagaagcgctttaagtgtgaccagtgtgattacgcttgtagacaggagaggcacatgatcatgcacaagcgcacccacaccggggagaagccttacgcctgcagccactgcgataagaccttccgccagaagcagcttctcgacatgcacttcaagcgctatcacgaccccaacttcgtccctgcggcttttgtctgttctaagtgtgggaaacatttacgcgtcggaataccattgcaagacatgctgatatgcgctggcctacagcacatgccggg

SEQ ID NO: 63279 - DNA, 339 bp, Homo Sapiens
atcccatgtgctgtacgccagcgtatagctcttactccacactcaccggcagccttacgatggacgataatagaaggattcaaatgctagcagacacggtggctactctgcctcggggacgaaaagcagcttgttttgaccagatcaagttctttaagtgacttttcctggtctcaaagaaagcttgttactgtggagaagcaggataatgaaacatttggatttgaaattcagtcttacaggccccagaatcagaatgcctgctcctcggaaatgttcactttgatatgcaaaatacaggaggacagcccagctcactgcgctggcctacagcacatg

SEQ ID NO: 63280 - DNA, 527 bp, Homo Sapiens
  misc_feature (422)..(435): n is a, c, g, or t
ctccgctggctcgggaagacaccgtgcccgccccaagagcaagcaccggccatgctgcagaggcaagacctcaattcttggctgccaagtttcatcagggctagggggctggtgccgcctcataggcagacgaggatcatcgctgggggacctttcccgtgggctttcttcctttctctctttgcctttagtttgcccgacaccagcagaaaagtggaccttgggggctggttctgctcctggcccccttgttcagcccctgccggcacacgggcggctcaccctggacactgtgatgcgcatgggctaggccagcgcccggggcttctgaaccgagcggggtgtttcatttttttgcttttccctgtcttaggctcccagtctttgactgccttcccatggcgatctataagttgaaagannnnnnnnnnnnnnaatcaccttatgatgatggagttaaaagtaaaccgtgcagaccctggggtccctgttgtacgctgcatcatcccgctggcctacagcacatg

SEQ ID NO: 63281 - DNA, 310 bp, Homo Sapiens
gagcagtcccagaagggggggctgtcggtggcggtgcctggggagatccgaggctatgagcgtggcacaccagcggcatgggcggctgccctgggctcgcctcttccagcccagcatccagctggcccgccagggcttccccgtgggcaagggcttggcggcagcccttggaaaacaagcggaccgtcatcgagcagcagcctgtcttgtgtgaggtgttctgccgggatagaaaggtgcttcgggagggggagagactgaccctgccgcagctggctgacaccttcgagacgctggcctacagcacatg

SEQ ID NO: 63282 - DNA, 2347 bp, Homo Sapiens
  misc_feature (1899)..(1930): n is a, c, g, or t
atagatactgggccggaattcccgggatcgcgagcacaacccatggctgcgctgggctgcgcgaggctgaggtgggcgctgcgaggggccggccgtggcctctgcccccacggggccagagccaaggccgcgatccctgccgccctcccctcggacaaggccaccggagctcccggagccgggcctggtgtccggcggcggcaacggagcttagaggagattccacgtctaggacagctgcgcttcttctttcagctgttcgttcaaggctatgccctgcaactgcaccagttacaggtgctttacaaggccaagtacggtccaatgtggatgtcctacttagggcctcagatgcacgtgaacctggccagtgccccgctcttggagcaagtgatgcggcaagagggcaagtacccagtacggaacgacatggagctatggaaggagcaccgggaccagcacgacctgacctatgggccgttcaccacggaaggacaccactggtaccagctgcgccaggctctgaaccagcggttgctgaagccagcggaagcagcgctctatacggatgctttcaatgaggtgattgatgactttatgactcgactggaccagctgcgggcagagagtgcttcggggaaccaggtgtcggacatggctcaactcttctactactttgccttggaagctatttgctacatcctgttcgagaaacgcattggctgcctgcagcgatccatccccgaggacaccgtgaccttcgtcagatccatcgggttaatgttccagaactcactctatgccaccttcctccccaagtggactcgccccgtgctgcctttctggaagcgatacctggatggttggaatgccatcttttcctttgggaagaagctgattgatgagaagctcgaagatatggaggcccaactgcaggcagcagggccagatggcatccaggtgtctggctacctgcacttcttactggccagtggacagctcagtcctcgggaggccatgggcagcctgcctgagctgctcatggctggagtggacacgagatccaacacgctgacatgggccctgtaccacctctcaaaggaccctgagatccaggaggccttgcacgaggaagtggtgggtgtggtgccagccgggcaagtgccccagcacaaggactttgcccacatgctgttgctcaaagctgtgcttaaggagactctgcgtctctaccctgtggtccccacaaactcccggatcatagacaaggaaattgaagttgatggcttcctcttccccaagaacacccagtttgtgttctgccactatgtggtgtcccgggaccccactgccttctctgagcctgaaagcttccagccccaccgctggctgagaaacagccagcctgctacccccaggatccagcacccatttggctctgtgccctttggctatggggtccgggcctgcctgggccgcaggattgcagagctggagatgcagctactcctcgcaaggctgatccagaagtacaaggtggtcctggccccggagacgggggagttgaagagtgtggcccgcattgtcctggttcccaataagaaagtgggcctgcagttcctgcagagacagtgctgagctgagtctccgccttgctggggcttgtcctagaggctccagctctggcacagtggttcctggctgctgccatgtctcagatgaggagggagacgaaggaggccgccagactcgagaggtgggaggaactcccttgcacacaccctgagcttttgccacttctatcatttttgagcaactccctctcagctaaaaggccacccctttagtcgcattgctgtccttgggtagaatataaaataaagggacttttatttcttnnnnnnnnnnnnnnnnnnnnnnnnnnnnnnnncaaaacaccaacaacaataaaaataagaatcacacgcaataccaaccaacaccacaaggaggcgcgcgcgctaaaagtccaccgcacgggggcagccacactgtgcgaccgcaacgaggcgcggcgcacagacgaccccacgaagagcgccgacactaaaaaaatgaaccaagtcgtgcgcgagttgacacaaacacaggagtggcgtgagaaaagactgccgagcagagtgaaaattataagtaagaccgacacaactagttgtaggggtagcacataatgtggggacaaacacaccaagaaggtaattagagccacaggagaaagataccacccactgcaggacatgtaatggtgactaagacagtggtctgattgcggtagaaaatgtgcgagtgaggttattagcacaattac

SEQ ID NO: 63283 - DNA, 607 bp, Homo Sapiens
acggcttcgacggaactttgtagtagtgatggcttggtttgtaattcatcatttcatctttcttggtcttgattaatcctgaaatccttaaaatggctggcatggttatgactttattgtggtaaccttggagatataagccctcttacgatcaaatacagaagcaaaaaatatattgttcaaactgatgccaggcctacctttattccctcccttaattactttttttctcattcagctcagatcatcctgcacttgacaaaatgaagttttaccaccatctacactatcattatttaactacacagtgaagatcaacagcaaaattcaagtagctttgccaatactagttgatactcagtgaaatcacgtcactattttgatgcctgaatccatacctttgtgatttatgtttaattacagaagcctattgccttgcagcaattttgttgttataatactgattaattggttactccttcttattataactcagtcatacctgtggtcactcttcattctctctatcctgacaaagcttccactggaaacttgccctcagattttataaatccgggggagtccttaattagataatagttccgct

SEQ ID NO: 63284 - DNA, 592 bp, Homo Sapiens
cattacacaggttttgttgtttggggtggggagggggcttttgttcccttttgacataatatagtcaatgcactaacaattatgtatattcaaacttgattattttaaattcgatcttcagctgtactgtaaatagggtactgcattgtagtctccatatctgtattacttttctgtaatatttaagagttgcttaaaagcatacaaaatgtactgttactaaaacagctaattatttctctctccccctttgacaggaaggggcttcagttgttcctccatggctagaaccataataaacaatgtacccgtaatttgtaacataaagtattgcaatatgttagtaacaatcttgcagccttcctttccaaagttcattttattttgatcagttcagtatattgcactaattattttaggtattttcattatatgaaagctaccatgtgtcagagatgatttaatctatttaagtgttggactgctaggagaacttgtacatttatgataatgcagaattaggaaaacggttcaccagtgtttagttttatattgaggtgctcaggttggaataaagtggtataaaaagcaa

SEQ ID NO: 63285 - DNA, 355 bp, Homo Sapiens
ctgaaaaaatcatacaactttgtgcttctattgcttttttgtgttttgttaagcatgtcccttggcccaaatggaagaggaaatgtttaattaatgctttttagtttaaataaattgaatcatttataataatcagtgttaacaatttagtgacccttggtaggttaaaggttgcattatttatacttgagatttttttcccctaactattctgttttttgtactttaaaactatgggggaaatatcactggtctgtcaagaaacagcagtaattattactgagttaaattgaaaagtccagtggaccaggcatttcttatataaataaaattggtggtactaatgtgtatccag

SEQ ID NO: 63286 - DNA, 641 bp, Homo Sapiens
ctctactcacgcttcacgattggtacactttcatcctgctccggacgtggagccgcagggccacgcggtccaccaatgacactcaatggtgtgtggtggcagtggtggccagtttctttatcttctggtttgccctaccaggtgacggtggcataattgatgtccttcctggagccatcgtcagccaccttcctgctgctgaataaagctggactccctgtggtgtctcctttgcctacatcaactgctgcatcaaccccattatctaacagtggtggctggccagggccttccagggccgacctgcggaaaatcacctcccaacaggctcctccggtacgtgtatgactgaagagtctgtggttagggaagagcaacgtcattcactgcgcttcacagtggacactatggcccagaagaccccaggcagtgtaggcgacagccctcattgggccactgtggcccgagtgtccccttccttcccggccattctccctcttgttttcacttcacttttcgtgggatggtgttaacttagctgacctaactttcatccatgtatgaccatgttttgcccagacttgtcgcgatccatctgccacgccggatatacactggacatcacgctagaccaagaggta

SEQ ID NO: 63287 - DNA, 687 bp, Homo Sapiens
  misc_feature (604)..(604): n is a, c, g, or t
  misc_feature (615)..(628): n is a, c, g, or t
tttgctccagtttttcagaagaagtgaagtcaagatgaagaaccatttgcttttctggggagtcctggcggtttttattaaggctgttcatgtgaaagcccaagaagatgaaaggattgttcttgttgacaacaaatgtaagtgtgcccggattacttccaggatcatccgttcttccgaagatcctaatgaggacattgtggagagaaacatccgaattattgttcctctgaacaacagggagaatatctctgatcccacctcaccattgagaaccagatttgtgtaccatttgtctgacctctgtaaaaaatgtgatcctacagaagtggagctggataatcagatagttactgctacccagagcaatatctgtgatgaagacagtgctacagagacctgctacacttatgacagaaacaagtgctacacagctgtggtcccactcgtatatggtggtgagaccaaaatggtggaaacagccttaaccccagatgcctgctatcctgactaatttaagtcattgctgactgcatagctctttttcttgagaggctctccattttgattcagaaagttagcatatttgttaccaatgaatttngaaccagggcnnnnnnnnnnnnnngggggatgtaaaacaactccctgccaccaaaataattaaaatagtcacatttgttatcc

SEQ ID NO: 63288 - DNA, 770 bp, Homo Sapiens
  misc_feature (647)..(655): n is a, c, g, or t
gaattgcagaccctgacgcgttatattgtgtgagtagtgtataattttaaaacttaaacaaactgtgtatttcaatagaggaggactttttgttttttaaatgtagctcttttagaaaacgatgaaaaggatgaagaggatatgtctctggattcaggggatgaaatctcacatatagaagtatgcagcaattttcattcagaaatatgggagaaagagaccaaaggatcacgtggaacagatcgcattaagtatactcaagttgagttgcaatcgtctcctgatgtgcaaaacagtttattagaagataagacttaccttgattctgaagagagaacttctgttgatatagtatgctctgaaggagagaacagcaattcgacaggaccagattcatatagtaactttcaggtttatcatagtcaattaaatatgtcccatcagtttagtcattttaatgttctcactcatcagacatttttggggacaccatatgccctttcatcaagtcagtctcaagaaaatgagaattacttcttatctgcttatactgaaagcttggatagagataaatctccacctcccttaagttgggggaaaagtgattcttccaggccatattcacaagagaaataactgtagtaacnnnnnnnnnaagagattgttgtggactttgtttattaacatttatatttcattctctaaacaaaggttcttgttctttctccaatgttttttcttttatttatatctgagggcctgtacaatct

SEQ ID NO: 63289 - DNA, 381 bp, Homo Sapiens
gggtgtagtagcgcgtctgtgctgcttccacctggtgcttcctgttcccaaatcacaagggcctgaaggtggtccctgctttctctttctctttctctgtgtctcagatggcgattttgctgacagctgccaagaaaatgcttcactcaacagtcctcatgtgcccagagatgtttatagaactgtttgaattgcagccatcccctgccccctcccaggctgaagatctgttctttttaagttgattcgggagtggcattcttttatacccaaagactgtagtgcatcttgaagagctcaaagcacatgaccgcacaaatgcttacagggtttcctcccgagtaatccaatctcactccccttgtaagggaattctggggc

SEQ ID NO: 63290 - DNA, 443 bp, Homo Sapiens
  misc_feature (42)..(42): n is a, c, g, or t
  misc_feature (54)..(54): n is a, c, g, or t
tggtgcgatccatgaagaacgctaccattccagatcactccntgacgtgatcanagagagtgagaacatccagctgggccaggacctgaagctatcgtgccacgtggatgcagtgccccaggagaaggtgacctaccagtggttcaagaatggcaagccggcacgcatgtccaagcggctgctggtgacccgcaatgatcctgagctgcccgcagtcaccagcagcctagagctcattgacctgcacttcagtgactatggcacctacctgtgcatggcttctttcccaggtgcacccgtgcccgacctcagcgtcgaggtcaacatctcctctgagacagtgccgcccaccatcagtgtgcccaagggtagggccgtggtgaccgtgcgcgagggatcgcctgccgagctgcaatgcgaggtgcggggcaagccgcgggcgc

SEQ ID NO: 63291 - DNA, 1259 bp, Homo Sapiens
  misc_feature (172)..(172): n is a, c, g, or t
  misc_feature (394)..(428): n is a, c, g, or t
  misc_feature (1042)..(1042): n is a, c, g, or t
tgaactcttaaagcttcatgagcagctgcttgagttcaggaagttcactgttagaaataggctttgttagctgactagggtcagggaaacttttctcttcaaatttgaaagctgtttctgttttcattttacattattattcagaaatggtagctattctatacctatggtntaagtaaatatttctgaataaggcttcaccatactgtaagcattttaggtagattgccttaaaggttatgggagggcatgagggaacacttcttatgagaaaacatttataaacaaaagaaacatttataaactaaagaaaaactaaaagaatgacagaacaatcatcttagcaccctttcctcacaataatataaaaatattaaaagaacataggcaggcnnnnnnnnnnnnnnnnnnnnnnnnnnnnnnnnnnnaaattgacttttataggtatttcctgaaagtgtatacaaattatttcctcgcccaaaataaagcaccacttcaaggtgtggtttgacattacatgctaatgaacaaacccagtatgcaagttattcttgcaccacatgctcaaatcttcttgaggtgcattaactcttttaggtaactagagcagtacttggtgaactagatcaggaggtcagtaaactttctgtggaagggccagagagtaaatattttaggctttgcagcccatacggtctctgtcacagctagtcaaccctgccattttaccacaaaagcagcaatagacattatgtaaacaaatgagcacagttatgttccaataaaactttatttacaaaaacagatgacatcccagatgcagaccatgggcaaccaaccattgcactggctaaatcattatttatggagaaatcctctttgtgtctctactctagatgcctaaaagagtttatatacttctaaaagctcctaacttatatccaaagaattgctttctgattcgtgtagtctctcccacagattcataaacttttatgacttatattgtttccaggtggggcatggtttattttcccangtttaacagtttccagaatagggggcattttatttttatcataattttaggggtggggtttaggaagtatcccttttctgggagaactgagaaaagggggggtatttaaattcccattcagggtcccagtacaggtaactaaggagttcataaataacttttaataaatcaatttaaaataaaattagaaacccactgaaaaaccaataaagggaaa

SEQ ID NO: 63292 - DNA, 769 bp, Homo Sapiens
cagattagatagaaaggtgcttattgccttacgcttactacatttaaatctttatttacctgggtttgagcctacagtctatttatgattacatatcaaaattgattaaaacacttccatttctaaaagttcaaatatacttgttaataaaaggattatcggcattaatactttaatttaaagaaaagttgtgttctgttttcctttctgtgtcttactccccccacactctccctcccccatcaccatcttcaattctaataaataatgctgatgttcaacagttgcagaaattgtgctattatgtaactgtgggccttgcccctgtctggccctctagatgatttgtagcagtgttattctacactttttaaaagaagcgtcctccttttgtccatgaatcatgtttaccccatacccagtggcagaggtgttctttaaagacttgaatatatgaatgtgtgtgtgtagttacttaaaggttattcctctttgtaataggaaactatatgggatgaacacttttaaactttccgacacaacttccattactaactttctaacagaacttccataactagaaggtggaaaccaaaaccctcatggtagtatttcctctggcagctggtgctgtgggcaactgttttgttcaatcgggtttcttttctttttgcctctatcatgcagaaatcaacagaatcactcacacatacaagtacactcacatacataaactattatttcttcctggagatcagcggggatcctc

SEQ ID NO: 63293 - DNA, 794 bp, Homo Sapiens
  misc_feature (673)..(685): n is a, c, g, or t
  misc_feature (687)..(693): n is a, c, g, or t
  misc_feature (707)..(708): n is a, c, g, or t
  misc_feature (744)..(745): n is a, c, g, or t
acagagaatgaaaagagttgattttggacctcggaccttgccgtggctaaatctttaccttctcatagctgatgggataatgttggaaagaaaggttctgaatcctttggccacattttgccctgcttctctcagggttaagggttctggaagaacattaagaatgagattgcaattgaaaatagtcattttgaatcctattgattattcaaaaattcaggctgatttgtcttttatcagaggtaggattctgttttatagtatagaatctactttatccttccttttaatagttcctttagacctgtgaaatttcttcactacatttaatagttctcctatttcccgctcccccatatcaattttccttttgtctccggggctgagtaaataaacatgttctgtcacaaatagcagcaccactttggattgattttgctctccaggacatcagcacatggccctgatcagcactaccacatccaaacataagtcactgaataacacttaatatttatgagttggtaatgacaagggacattgtataaagtactatttgctagattcatgcctcaaaagttattataaacagacctttattaaacacatcttgaaagatgtagaagtccctctatagtctagtatagtttacaatagaagttgtaagaccctnnnnnnnnnnnnngnnnnnnnaacatgggtcggcnncgcctcggccccttcgaagaaagcttttctagaacnncattcggtttgggcgccgcggggccccagtagggtaaagtggaacatgg

SEQ ID NO: 63294 - DNA, 530 bp, Homo Sapiens
  misc_feature (63)..(63): n is a, c, g, or t
cctgagagcaggatccaggcattccttaatttataattattccccctatcattcctttacagngcctaggtgctactcattatgtgttcattgaatttgactgacatagttaaaaacttaaggtttattttagactttcaaggaaacaaaagactttagagtcctctctctgtaattctgccccactcatttgtttaccctgggttttatacagttctcttccttctcccctcccacctttccctggctttttgcctccattccatgaggcatacagtaaggctgcctgctagtaagcagtcacataagtgggtacctatccagccattctcttttcagagcatataatactatcttagccaaacttgcctttgcttcactcatcatgcagccttctgggttggttgctatatatatcttttttccttgatgtcccattctcttccacagccctgaggtcttacgaatttttctactttctttttgctgttgatgaattgtttcattattaaatatatgcatgtatcaaa

SEQ ID NO: 63295 - DNA, 675 bp, Homo Sapiens
  misc_feature (406)..(561): n is a, c, g, or t
  misc_feature (575)..(610): n is a, c, g, or t
atggagttcctctcctctgctttcctcagaggatggtcctttaacatagccagaaacaagccctgtggtttgaaggtgtgctgtgaggatgggactaattgatacgcaccagtttacaaagacagtcttatcatccgagaatacaccatctttttctctggataattatttcttacatcatgcttgattcctacattttgttgggtctcaacattggctcacgaatgctgttaatatttattctgtattgataaaaagtctgtcttgccactacaagtaaatcccccatttaatattttcttctttagcatagcactgtcattttttgtgaaaatggttatgtttatttattacaatactgagtcatatataaattttcaataaaagcagaaactttcttcccttnnnnnnnnnnnnnnnnnnnnnnnnnnnnnnnnnnnnnnnnnnnnnnnnnnnnnnnnnnnnnnnnnnnnnnnnnnnnnnnnnnnnnnnnnnnnnnnnnnnnnnnnnnnnnnnnnnnnnnnnnnnnnnnnnnnnnnnnnnnnnnnnnnnnnnnnnnnnccccctgtgggggnnnnnnnnnnnnnnnnnnnnnnnnnnnnnnnnnnnncttcttttgggggggcggggcccgcccagaagaaaagaggaaacgggggaacaatgctttgcccc

SEQ ID NO: 63296 - DNA, 1196 bp, Homo Sapiens
gtggttcttgcaaagggctgggctggggcctgtgtctcaaccactcctgagaacacggacggtcaggagtgaggggctcagaccccgggttggtgagagggaggtgacagggagggaaggagcctgctggagggaaacctggctgggaggatgggtctgggcccaggctgtggcctaaggagggggaagaacagagcagggaaaggcagaaaaactgacacggtgggaggagggagatgaatgggagatgaaacagaatgtctcttggttgtaccatgtgacacaccctgtgcactggtcgctgtcttcgtggcttccacccttgttaatgatgctcctgcctctgcctcccagcccctcacccagcacagctctgcctggacttggagagatgggaggcagacccccaccaccatacatgctgtctgtggcccctcagacattctgtttcatctcccattcatctccctcctcccaccgtgtcagtttttctgcctttccctgctctgttcttccccctccttaggccccagcctgggcccagacccatcctcccagccaggtttccctccagcaggctccttccctccctgtcacctccctctcaccaacccggggtctgagcccctcattcctgaccgtccgtgttctcaggagtggttgaggacacaggggccccagcccaaccctctgcaccccccagcccggtcatctgcgccccacagcccctttggagctttttctcttgtcctctcactccttcccagaagtttttggccagaacttcattttgaaagtggtttttctcattctccattacctcccccaagctctcctccagcccttcccagggctcaagccctgctgtccctgagcgtctcctgggccaaagagaggagatgggggtgggagggactgagttgatgttgggtttttcattcaataaattggtgatttcttaccgactgccttgggcttctatgccccctcactgtgccacaggagctgcccaaccccttttccacagtgcagcccaactccagtgaaaatccaccaggaacgtaggtggaaagaagcgtactcccatgttctcaatcatggaaacaggcatgaaggtgtctcacctggcatgaggcaagcagaggtccggaaaacagaaaagatgtccttttccaacaccaaaaaccccgtttttt

SEQ ID NO: 63297 - DNA, 298 bp, Homo Sapiens
tgcttcacagtacccaaactgctttttccaactcagaaattcaatttggatttaaaagcctgctcaatccctgaggactgatttcagagtgactacacacagtacgaacctacagttttaactgtggatattgttacgtagcctaaggctcctgttttgcacagccaaatttaaaactgttggaatggatttttctttaactgccgtaatttaactttctgggttgcctttgtttttggcgtggctgacttacatcatgtgttgggataacatcgggatcctctagatcgcccagcag

SEQ ID NO: 63298 - DNA, 321 bp, Homo Sapiens
cgggatctggtaatcgctcctggcttccagatgtcgaaggactgatcctttggtaagctcactagaaacttctagctctacaagagtttgggatattaatgttattcagtaagtcccaagtttttcagagaatagattactaacaatgaggaatttatattccttggtttatttaggagtctaagatgcagagttcagaaagaaattactcagacctaactttgagtgcttaagctgccaacagttagaagatgctatttatttgtgtctgtaagtttgtacatagtaatgccagccttgttgctgaattttttatttggg

SEQ ID NO: 63299 - DNA, 1761 bp, Homo Sapiens
gggggccactcgagtatttgctgccgattgcctgtgtcgaatcatcaatttgtgtgagaatgcagaccaggctcactttgatcttgccttggcacgttctgctaaacttcgaaaccctacaaatgacctcttggtacttcatctctctgacctcattcgcatggcattcatggctgcaactgatcatagcaaccagctgcgaatggctgggctccaggcgcttgaagacattatcaagaagtttgcgtctgtgcctgagccagaatttccaggtcatgtgatactggagcagtatcaggctaatgtgggagctgctctaagaccagccttttcacaagatacaccatcagatataatagcgaaagcttgccaggtatgtagtacatggataggaagtggagttgtcagtgatctcaatgatctccgtcgagtacacaatcttcttgtttcttctctggacaaagttcaggctggaaaaggatcttccagccagctgtaccgagagagtgccacgaccatggaaaaactggctgttctcaaagcttgggcagaggtatatgtggtcgctatgaatattaaaaaggaagcagagtcaaaaccaaaaagagcaattaaaaatactgacgatgatgatgacgactgtggtaccatcgatgaactgccaccagatagtttaataacactggtacaacctgaactaccaacactcagtcgcctgtggttagcagcattaaaagattatgcactcttgactttaccagccgaattttctagtcagcttcctccagatggtggagcattttatacccctgaaactattgatacagctagacttcactatcggaattcctgggccccaattctccatgcggtggcactttggttaaatagcacaggatttacgtgctcagagtctacagaagcagcagcaatatctggtttacaaaaacgttctacatctgtcaatttaaaccaggcatcaggagcagtgggtagtgctaaatctttgccagaaattaacaaagacagaatgcatctgattttaggtgtgagtatacagtttctttgttcccctagacctgaggagcccattgaacatgttacagcatgcctgcaggccttacataccttgctagactccccttatgctcgagtccatattgcagaagatcagctgataggtgttgagttgctgagtgttttgcaccgccttctattgacctggaatccatcatctgtccagctgttggttactggagttgtacaacagatagtaagagctgctcaggattatttgcaagagaaaagaaacactctaaatgaagatgatatggaaaaagaggcctgtaccgtattgggagaaggaggtgacagcggtggtctcattcctggaaaatctcttgtgtttgcaactatggagctgctgatgttcattttagtacggcatatgccacatctcagtaccaaggtgtcagactctccaagtcacatagccactaaaactcgactatcagaagaaagtgctcgtttggtggcagccacagttaccatactctctgatttaccatccctttgttcacccgctggatgtatggcaatcctgcccacaattctgttcttaattgcaagaatattgaaagacacagcaataaagtctgcagataatgaggttcctccaccagtcagtgcagctcttcaagggattaaaagtattgtgacactttcaatggccaaaactgaggctggcgttcaaaaacagtg

SEQ ID NO: 63300 - DNA, 1671 bp, Homo Sapiens
  misc_feature (792)..(792): n is a, c, g, or t
  misc_feature (1521)..(1521): n is a, c, g, or t
acatgcaacagtcttttcactgcagctgaatgagttgtggcgcccacaatgctcccatgacaaggagctgacaagttccattttccgtcgcgggcatcttggaatcatgactcccacaatgccttgggcacttggtcgacagtggggccgcctctgacaaaacaatgtgagagggccgttgctccagggagaactgcaaatatcttcatccacccccacatttaaaaacgcagttggagataaatggacgcaataacttgattcagcagaagaacatggccatgttggcccagcaaatgcaactagccaatgccatgatgcctggtgccccattacaacccgtgccaatgttttcagttgcaccaagcttagccaccaatgcatcagcagccgcctttaatccctatctgggacctgtttctccaagcctggtcccggcagagatcttgccgactgcaccaatgtaggttacagggaatccgggtgtccctgtacctgcagctgctgcagctgctgcacagacacttaatgcgaacagacagacttgaggtattgtcgagagtaccaacgtggcaattgcaaccgaggagaaaatgattgtcgggtttgctcattcctgctgacagcacaatgattgacaccaatgacaacacagtcactgtgtgtatggattacatcaaagggagatgctctcggggaaaagtgcaaatactttcatccccctgcacatttgcaagccaagatcaaggctgcccaatacccaggtcaacccagggctgcaggctgcaccanggttgcagccaccgcagctgccatgactcagtcggctgtcaaatcactgaagcgacccctcgaggcaacctttgacctgggaattcctcaagctgtacttcccccattaccaaagaggcctgctcttgaaaaaaccaacggtgccaccgcagtctttaacactggtattttccaataccaacaggctctagccaacatgcagttacaacagcatacagcatttctcccaccagttcccatggtgcacggtgctacgccagccactgtgtccgcagcaacaacatctgccacaagtgttcccttcgctgcaacagccacagccaaccagatacccataatatctgccgaacatctgactagccacaagtatgttacccagatgtagaattttcatcactaaacaatcatgctaaagaggaaaggacagtgtgcttggttagagtaaaggacgaggtcattagccatattgtatatatcgtcaagcaacacacacaaaagttcctcagccacaagacatccacatattgcatgttaaccagaagaaaagacaacattttctggaaatccactgcacactgttgcctatacactttgtacatttaattgatatttgtgctgaggtgatattcctgtctaaaagaacaacattgtctttcttttctagcacagagttatgcattcaaagatgcatacctagttagtttcctatatattcatgccatcttgaanagacagactatggtgtaaccatgattctattatgtattggtacgtctgtagaccaagatataattttttaaaaataggttatttctttcaagtttacaaataacaaggtgcaccttgtattttaaaatgccattatagatgagagcgtgc

SEQ ID NO: 63301 - DNA, 348 bp, Homo Sapiens
ggctttctggttgtttttaaacaataaagcaataagaacaaatacaatacataggaagttaaaagcacaaaggaatgaacttattaatatttttgaaaaatgcactgggaaaaagttgatgtcaataacagtataaaacagccctatttcttgataaaaaatgacaaatgactgtctcttgcggatgcttggtactgtaatgttaataatagtcacctgctgttggatgcagcaataatttctgtatggtccatagcactgtatattatggatcgatattaatgtatccaatgaaataatcgacttgttcttgatagcctcattaaagcatttggtttttcacataat

SEQ ID NO: 63302 - DNA, 803 bp, Homo Sapiens
gggaccacacagtggttttttgacagtattgagaaaggtttttgtcaggatgaatccatatacaagacagaacctagaccagaagcaaagactatgcccaattcttcaactcctaccagccagatcaacacaattgataatgtcagcaatatttccaacataaatgcaagttgcgtaagtgaatcaatatgtaattcacttaacagcaaactggagcctacacttgaaaatctagaaaatctggatgtcagtgcatttcaagcacctgaagatttattagatggttgtcggatatatctttgcggttttagtggcagaaagctagataaactgagaagacttattaacagtggaggtggagttcgttttaaccagctaaatgaagatgtaactcatgttattgtgggagattatgatgatgaattgaagcagttttggaataaatcagcccacaggcctcatgtagtgggagcaaagtggttgctagagtgtttcagtaaaggttatatgctttctgaagaaccatatatccatgctaattaccagccagtggaaattccagtttcacatcagccctgaaagtaaagcagctctttttaaaaaagaagaaccgcaggcttcttctaagaaagacttttgctcctagtggaaaagcatgagcaagctgatgaagatctgctctctcaatatgaaaatggtagctccacagtagttgaggctaagacgtctgaagccaggccctttaatgattctactcatgctgagcccttgaataattctactcacatttctttgcaagaaga

SEQ ID NO: 63303 - DNA, 776 bp, Homo Sapiens
ggatgattctgaatttgaattaactttttggagaattctgtgatgcccttagaagaaattggacacgtattgagtgtcacaaagctggggctgggaattgctggtctaatgtttcattagacttaagaacctaaaatttttctcagttgggtggataaaaccactaacgcttagaaactgttttctcatgcagctatgtttctcttatttatgccttgaggactaatttctggttttctagctgttaatgcactgttgaccttcataatggtgccttacgcaagcgatcccttctgtgggggtctcatacaggggtgtgggcgatgcatgctttattaaggctcttgtttcacctggcagtgtactgtatcaacgtataatacagaaaaaaaatctctttaaggtcctccttcacaaagacatagagtgaaactccctttacatgtcagtatttgttcaacactttaggcaacttgactgtcagtgttaaaatggaaaacaggaaaatggaaaaatctgaaccaattctggcacccttgagactttcatatagaccttgcacaacaattgtatagatcacacaccggctgtatttaatatgtaacattttcacacatattaaagatacagaagtattaaaaaacccccaatgttaatgtatttgcttaaaaggcacaagtttcacatatctgtctagctatctgttggtaatacagaaagtatactactttttacaaaagctggtcagatcccgctatcccgtcgtaatcctcggg

SEQ ID NO: 63304 - DNA, 765 bp, Homo Sapiens
  misc_feature (252)..(261): n is a, c, g, or t
  misc_feature (589)..(605): n is a, c, g, or t
  misc_feature (607)..(616): n is a, c, g, or t
  misc_feature (699)..(699): n is a, c, g, or t
  misc_feature (729)..(729): n is a, c, g, or t
gggtaaatgtgaatggaaacttggaaatactcgtttttataaactacaaaaactttttgttgtttatcaggaaatccatatttattttgtaattaactgtcaagcctgtggatgatttttttgaacttggtagttcataaaggtttacagtgaataaaaggatatcatcttgagtatagcaatatcaaaaggaattcagtagttactgctgtttaggaatataaggttaagatatcatatgggtcaggtcannnnnnnnnnctgtgctggttgccacatcttagcaagcaccaaaaaactaaagcagtttttaaaccgatatttacgtaaagaaaatcataaaatccaatgcttctgcatactgtgttatgttacagtccagttttgtgtgctttactacacagtttggttacaggacttctgtgcattgtaaacataaacagcatggaaaaggttaaatacctgtgttcagattgtaagatctagtccggacttgctgtgtatattgtaacgttaaatgaaaaaagaacccccctttgtattatagtcatgcggtcttatgtatgataaacagttgaataattagaannnnnnnnnnnnnnnnnannnnnnnnnncctggcggccgcctccggccctccaaaagctttctaaaccattccttttgcgcggcggccccagtaagtaaggggacatgggncatagctggttcccttaggaaaacctgggncatggactagggcttgggatatccccaccattaaac

SEQ ID NO: 63305 - DNA, 1181 bp, Homo Sapiens
ggttgccaagctgtttctgagaaagtgaacgggacgctgggagacaggaaatgccttacttcactctggcccggcggacctcccaccacccagcagtgcactggggatggacaggcctggtgtgctgcgtgctcgcaaccacagatggctcctcggctttagacagaaaggggaaggggttctaagtcaagagcctttcagtgctccctcatattgagggcagtggcagaaaagtgaccactctgcaggctgggcccaggatgtggtgtcctgagatagttttgtatcttaaagactgaggcacagaagcgaaacgagaacacactgtttttgagacacagttgtccaaatgtttctggccagctccggcccctttttgtatgacacttctcttccaccctgcacagcacatgtgcccgtcattcttttaattttaaaagatgaaatggcagatgctagtaattcacagaatggcctcttgtgggggtgggtctgagggaagtcagctataaaacatttgctggagttttgttcaatggggctgtgcatttttatattatgtgtttgtaaatgacatgtcagcccttgtttcatgtttcctaaaagcagaatatttgcaacatttgttttgtataggaattatttgtgccacctgctgtggactgttttctttgcctagtgactagtgacctgtgttgtctaaacatgagtttcagccctttggttttgtttaataccatgtcaaatgcaaacttcaattctccccatttagctttattaaactgacgttctcttcaaaacttcttgctgaatggtactcagatgtgcattcacatacagatgtgttttgaagtgggtgtaccttgctttacctaatagatgtgtaaatagaacttttgtaagtcaaatcccattgtcactttgatttaaattattccagctgtgatgtgtcttcattttatagcagtttgacactggagcttttgagcttttttacctcacatcttttatcaaataatatttactgctttgaaaacatctacagcattggccagttcagtaggggaagcttgctttattaagacactctggagaaagacgtcagggaatccttgtatatgtcgtgggaatctactcctcatttatcgtgttgcgtaagtttacgtttttggcatcagcct

SEQ ID NO: 63306 - DNA, 542 bp, Homo Sapiens
  misc_feature (405)..(415): n is a, c, g, or t
agtgagccagggaccgcagccctgcagctctggaccctggctccctgaatgccacaataaggtatatttgagtggcaaagctgtacccctcacagtggccaagagccagttctctcgttcctccaaagcccacaatcagaagatgaagctcacttggggcagtagctgatgcaacttccaccttgctctcaggtggaacagaggtattttgggtctctctagcctgaaatgtcatcctcaactgctactgagtttaggggagggggaatgtcttgacagacatcactgcattgccctggaccgcctcctttatcccagtgtttgaggtacaagtaagaaggctgaccagcacctgtaacactgactttatttttaagtctgaaaatgtcttgggaaagttttacnnnnnnnnnnntcaacagaagcaagttatgaaaatatttgaccagcttcatctttggttatttcttattgcagctctgtaaggacagactgttcccaaagctccagccatggcaggaagggaagcaaatcagtccccc

SEQ ID NO: 63307 - DNA, 453 bp, Homo Sapiens
gcttcttcagtggcttccaactgcttttggaataaagtcctaaattcaaagatcttgtataaatcaggctcatctcgcaacaccctctttgttctctatggcctagacacactggctttcagttcattacatgtcttgcctcagaccctcacacactgtcctctctgcctgcaacactcttcctttcactttccacctagctgatcctaaatgttccttcctcagggaggtcttttctgatttcttggtgggtcaagactttctgataaatcagttagcaccatgcattttccagagtttttattacaattgtaaaattatggctgtaataggctggctgcgctgctagattgtaagctcacgagggcagagatcttgttcacatcttgctcactgctatattctcattgctgagcacacagttgcagctcaataaattttgaatgaactcca

SEQ ID NO: 63308 - DNA, 853 bp, Homo Sapiens
  misc_feature (752)..(752): n is a, c, g, or t
ggcggcttcctgtggtgtttgtggacgtcctctgcctgtgccctgaatccgctcctgaggctaagcgctcccaacgagaagggtccacgggaagccctcacctctgtaaacacaccctgggccagcgctcgcatccgaggggagccgccggatgtggaagaagactcggctttcctgcagccatttagtgccgccccatgctaggttatttgacattgtgcagtgtagagttgccttaaagtgcgtgatctgccagtgctttcttcaagtcacccttgccccgattcctcctgtttgcgctccccagggttgctcaagtggaaattttgtcagctgtttagccttttcgtacttggcgtgatgtcaacttcacttctaatctgcaaaagcagaagctgtttcctagtttagcctcgcgtgtgtttacctatatggagtagctcgcagagatcacagaaatgcttgcagcctaaggcagggttttcagaccgtgggtcccagcccatttagtaaaatgggaaatcaattagcaagtggtcaccagcattacacagcaatgaagcagaataaagtaggccagaatgcatcatgtagtaaaggcaagtactgttttgtgaaaccttttcacccatacatctaaatgtgagaactgggttgcaatgccaagaacatttccttggctggcgaagttgtgaagccaaaataaaggtggaaaaccactaactaacagcattctgttcttgatctggagnccccaccccccatgtagcccggcgcgtccctccccccgaattgcacgccatctctaccgcattaaatactcgctcgcatgtatatcgaggcagacacacga

SEQ ID NO: 63309 - DNA, 909 bp, Homo Sapiens
agtttgccaaggaaattgacatctcctgtgtcaaaattgagcaggtgatcggagcaggggagtttggcgaggttctgcagtggccacctgaagctgccaggcaagagagagatctttgtggccatcaagacgctcaagtcgggctacacggagaagcagcgccgggacttcctgagcgaagcctccatcatgggccagttcgaccatcccaacgtcatccacctggagggtgtcgtgaccaagagcacacctgtgatgatcatcaccgagttcatggagaatggctccctggactcctttctccggcaaaacgatgggcagttcacagtcatccagctggtgggcatgcttcggggcatcgcagctggcatgaagtacctggcagacatgaactatgttcaccgtgacctggctgcccgcaacatcctcgtcaacagcaacctggtctgcaaggtgtcggactttgggctctcacgctttctagaggacgatacctcagaccccacctacaccagtgccctgggcggaaagatccccatccgctggacagccccggaagccatccagtaccggaagttcacctcggccagtgatgtgtggagctacggcattgtcatgtgggaggtgatgtcctatggggagcggccctactgggacatgaccaaccaggatgtaatcaatgccattgagcaggactatcggctgccaccgcccatggactgcccgagcgccctgcaccaactcatgctggactgttggcagaaggaccgcaaccaccggcccaagttcggccaaattgtcaacacgctagacaagatgatccgcaatcccaacagcctcaaagccatggcgcccctctcctctggcatcaacctaccgctgctggaatgctgagcggggatcctgtaa

SEQ ID NO: 63310 - DNA, 442 bp, Homo Sapiens
ttgaaggcagtgccgaagatgaagtggagaccacatactcaaggtttcaagacttaatcagagaactgtctcatcgtgatcaaagtgaaacacgggaactagctgaaatgccaccacctcaatcaagacttttgcaatatagacaagtacagagtagaagcccaccagcagtcccatctcccccatccagtacagaccacagtagccacttttctaactttaatgataacagcagagacattgaagtagccagcaacccagcatttccacagcgcttcccaccccagatattcaactcacctttctcgttgccatctgaacaccttgcccctcctcccttgaaatacctggcacctgatggagcatggacttttgctaacttgcaacagaatcacctaatggggccaggttttccctatggcctacctccattgcctcacag

SEQ ID NO: 63311 - DNA, 446 bp, Homo Sapiens
aaccaacatgaagcacatggaaacttgggacttgaggacaggctgccctttgaagagaaggtggaggtggagaatgttatgaaaaggaagttttcactaagagcggcagagttcggggagcccacttccgagcagacggggacagctgctgggaaaactattgcttaaaccacagcccccgtgtcctggaagccccaggattcttcggaacagccgcaggagaagctctgcaagaatccatgtgcgatgtttgctgctggagagatcaaacgccgacaggggagggccttcttgactcacccagcaaaccatgtctataaagaaagatggcactgttgaagaaaagcggggaggaagattggagaaacagactcagcaggaggcaggagggcggcagcgccgccacagccgcacacccagaagcaggcgtccctcatcagaagcgt

SEQ ID NO: 63312 - DNA, 690 bp, Homo Sapiens
  misc_feature (31)..(31): n is a, c, g, or t
gcacgagtagtattctctatgctagaaaggnctccagttcagttgtagaatggactcaggccccaaaagaaagaggtcatcgaggatcagaacatctgaacagttacgaagcagaatgggacatggttaatacagtttcatttaaaaggaaaccacataccaatggagatgctccaagtcatagaaatgggaaaagcaaatggtcattcctgttcagtttgacagacctgaaatcaatcaagcaaaacaaagagggtatgggctggtcctatttggtattctgtctaaaggatgacgtcgttctccctgctctacactttcatcaaggagatagcaaactactgattgaatctcttgaaaaatatgtggtattgtgtgaatctccacaggataaaagaacaacttcttgtgaattgtcagaataagagtctttcacagtcttttgaaaatcttcttgatgagccagcatatggtttaatacaaaaaattaaaaaggacccttatacggcaactctgataggattttccaaagtcacaaactacaatatttgacagtttgagaggcagcgatccctctatacatcaacggaccacttcagaaatggccgattttcttagtgatgctattccaggtctaaagataaatcaacaagaagaaccaggatttgaagtcatcacaagaattgattt

SEQ ID NO: 63313 - DNA, 260 bp, Homo Sapiens
ccatcacatcagtagctgcccttggcccagccagcctcaggtcagcctgtctccctgaagaatatctccacagacacatcgggttactacatctgtacctccagcaatgaggaggggacgcagttctgcaacatcacggtggccgtcagatctccctccatgaacgtggccctgtatgtgggcatcgcggtgggcgtggttgcagccctcattatcatttggcatcatcatcttatctgctgcattctgctgtgattggg

SEQ ID NO: 63314 - DNA, 425 bp, Homo Sapiens
ctgacagccaacgaggtcctaagctcacccctatatcatctacagtctttgagctgattacatcatatggatcgtcaccctacttcaatttactctgtgtcttcaagatccactaagcttcggccacagccccgttcgtcactctgacaggcctcctgagccacgcctctgacgtggtcctttaccatcagcacaagcagcccgaagtgaccaacccatgtgaccgcatgaaatgcgagtggctctgcctgctgagccccagtgggcctgtctgcacctgtcccaatgggaagcggctggacaacggcacatgcgtgcctgtgccctctccaacgccccccccagatgctccccggcctggaacctgtaacctgcagtgcttcaacggtggcagctgtttcctcaatgcacggaggcagcgcacc

SEQ ID NO: 63315 - DNA, 701 bp, Homo Sapiens
gtttcctgtatctttttaatcaagtctagaaactatgttcatcagtcactcatttttaaggtcgggagttagattttatgatagaattatgactgttagcttttctccttatagcatcttagtcttagaaattggtgggttgtaataatcaagggcttcattccttttatgtcatttctagacagttttgaatctaggttaataacactttatttataaagcacctcaatgtcctgtgaacactaattattttaaatgtgttaatactgtgcctttgatttgttagctttaaagttagtttaagacttttacactgccagtattgagccatgaataatttagtgtaacctgtattacaagtacattgatgaattctgtatcttctttggtttcctgtatctttttaatcaagtctagaaactatgttcatcagtcactcatttttaaggtcgggagttagattttatgatagaattatgactgttagcttttctccttatagcatcttagatcttagaaattggtgggttgtaataatcaagggcttcattccttttatgtcatttctagacagttttgaatctaggttaataacactttatttataaagcacctcaatgtcctttgaacactaattattttaaatgtgttaatatctgtgccttattttgttagcttttaagttagttaagataacctgg

SEQ ID NO: 63316 - DNA, 740 bp, Homo Sapiens
  misc_feature (570)..(591): n is a, c, g, or t
tttcgcctccttttctccttggcgactctcccgtgtgttgccctgtctctcccccccgttcgttgtttttcctcttctgtctctctcccgctctgtgctgcttcccttcgttgctgttggtccccccgggcgggggcgccatgacgcggcaccaactcatctccgtggtctggggtcccatggataacgatgaggcgacattagtacaggggaggtaaagaattttctaataacttgttacctatgcctccggaaatcatgcaagcttgcttcctgcaaaggggggcgacaatgttcattactcacaaattgtgttggcttcaggcctttggtgttctgtctgtactgaataaatacgaatggttccagctgatcaggactgcactctcttctcggctgcactaaagctggcactccaccagccgttctcatgcaaaatacctgtgtcagaatactcctttcatccaccactcagccagaagtcttcaggccagactccgcatgggacttgtccaaaaaaaattctaatcaaaagaggaaaattttggaatatgcctggaatagtggaannnnnnnnnnnnnnnnnnnnnnataggcccatatgctctatctcaagaaacaagatgattgtaaaaatgtccatgattaaactattggcagattatgctgtgtaatctctgtagtctaaatgagttctttgttctgttctgctgccttctacgttttcttgtcctttcaga

SEQ ID NO: 63317 - DNA, 426 bp, Homo Sapiens
gtctaattgtatgaataggtgtcagtatgttgaagattactttcttttgtgactttcttctacctcatgccactgtttaaaagtaaaatgtattttaatgatgttagaataagactaccatcctaaatatcacctacttatgaataacatgtaataatttttaacattaatgattccataaattgtattattgggattagaatgtgctttatgacaggttagtgtttcctctgaggcagaaaactcttttttggagatatcttccatcaagcagtactcgtgcccatatacaatctcttagtggctaggagaaataaataaaagggccataatggtttgttctctttcagacataatttagtaggggacaagaagtctgttcttcagtgagtacactagagatttactctggtgactgccttttga

SEQ ID NO: 63318 - DNA, 558 bp, Homo Sapiens
gcccgtctacttcacccagggcttaggcctcaatctggagaatcggcagaatgagcaccacctggagggtggcttttccattggctctgtaggccctgatgggcagctgggtcgccagattagccacttcttctcggagaatgaggatttccgctgcattgctggcatgtgtgtggatgctcgtggtgatctcatcgtggctgacagtagtcgcaaggaaattctccattttcctaagggtgggggctatagtgtccttattcgagagggacttacctgtccggtgggcatagccctaactcctaaaggggcagctgttgttcttggactggttgggatcattgcatcaagttctccagctcccatttgagaagatattcccccccataggggatgaagaaattatcagtttcttctgctcccaagccaacttcccttcccttagttcttggttgttagtggcacatgcagaatagactcagcctatgtcctgattccagctgggtagttctagaactttagaagctccatcttttaatgtttttatttgttatgtcc

SEQ ID NO: 63319 - DNA, 543 bp, Homo Sapiens
gtcgggacggtatattttttattattaaaaaatattcttgtagccacatgaggaggagaggagcagcagcaagcggagaggcagggggtcccagaaagacacaagagcctctgcaaacctccggcccaagacccagcctcatcactccaccccaaccaagggtgggtggaaagttgtaaacctacacccattgaaaaagcagccgccctccttcccaggagctgctgaagagagagcctgccagagccttgccagcagggacagcctcttagataccagcagcgtctcagaacccaacgtgtcctttgtctcccactgtgcggacagcaacagtggtgacatagctgtgatcgaggaggtccggatggaaaacccaaaggagagtcgcagttccctgaagactgggaggcacagctcaggccaagacattaccacacgaaacttaccgactgctgaaacgcaggaatctgatcatagaagctgtcaccaatcttcgcttaatcgagagtttattcacgattcagaagatgatcactgctcatg

SEQ ID NO: 63320 - DNA, 698 bp, Homo Sapiens
ggctgctccgcgccgggattatgggatctcgcagctcgcaggcgccgcgtagccgtcgccaccgccgccagcccgtgcgccctcggcgcgtacccgccgcgctcccatccccgccgccggccagggcgcgctcggccgccccggacagtgtcccgctgcggctccgcggcgatggccaccaagatcgacaaagaggcttgccgggcggcgtacaacctggtgcgcgacgacggctcggccgtcatctgggtgacttttaaatatgacggctccaccatcgtccccggcgagcagggagcggagtaccagcacttcatccagcagtgcacagatgacgtccggttgtttgccttcgtgcgcttcaccaccggggatgccatgagcaagaggtccaagtttgccctcatcacgtggatcggtgagaacgtcagcgggctgcagcgcgccaaaaccgggacggacaagaccctggtgaaggaggtcgtacagaatttcgctaaggagtttgtgatcagtgatcggaaggagctggaggaagatttcatcaagagcgagctgaagaaggcggggggagccaattacgacgcccagacggagtaaccccagcccccgccacaccagcccttgccaaagtcatctgcctgctccccgggggcagaggaccgccggcctcagctactagcccaccagcccaccag

SEQ ID NO: 63321 - DNA, 520 bp, Homo Sapiens
cgcctgatggagaaggcatacgcaagatcaacggatgctatgaagcactatcagggggtgccaccactgagggcttcgaagacttcaccggagcattgctgagtggtatgagttgaagaagccccctcccaacctgttcaagatcatccagaaagctctgcaaaaaggctctctccttggctgctccatcgacatcaccagcgccggggactcggaggccattcacgtttcagaagctggtgaaggggcacgcgtactcggtcaccggagccgaggaggttgaaagtaacggaagcctacagaaactgatccgcatccgaaatccctggggagaagtggagtggacagggcggtggaatgacaactgcccaagctggaacactatagacccagaggagagggaaaggctgaccagacggcatgaagatggagaattctggatgtctttcagtgacttcctgaggcactattcccgcctggagatctgtaacctgccgaagacccagcttgagacacggga

SEQ ID NO: 63322 - DNA, 577 bp, Homo Sapiens
ctgtcatccgtccttggctcaggatttggagagcttgctccacctgttatggctgacatcaccagctcccagattttggaccagttgaaagctccgagtttgggccagtttaccaccaccccaagtacacagcagaatagtacaagtcaccctacaactactacttcttgggacctcaagcccccaacatcccagtcctcagtcctcagtcatcttgacttcaaatctcaacctgagccatccccagttcttagccagttgagccagcgacaacagcaccagagccaggcagtcactgttcctcctcctggtttggagtcctttccttcccaggcaaaacttcgaggatcaacacctggagacagtccctccactgtgaacaagcttttgcagcttcccagcacgaccattgaaaatatctctgtgtctgtccaccagccacagcccaaacacatcaaacttgctaagcggcggatacccccagcttctaagatcccagcttctgcagtggaaatgcctggttcagcagatgtcacaggattaaatgtgcagtttggggctctggaactcggtcaga

SEQ ID NO: 63323 - DNA, 312 bp, Homo Sapiens
tagtcagattagagagagaggcttccctggtcttcggcccctctggtgaacctggcaaacaaggtccctctggagctagtggtgaacgtggatcgcgctggtcccatgggcccccctggattggctggagcccctggtgaatctggacgtgagggggctcctggtgccgaaggttcccctgggacgagacggttctcctggcgccaagggtgaccgtggtgagaccggccccgctggacccccttgtgttcctggtgctcctggtgccccttgccccgttggccctgctggcaagagtggtgatcgtggtta

SEQ ID NO: 63324 - DNA, 1111 bp, Homo Sapiens
tctccacgaggtcgcgctgggctgtacgagtgctgggccggccagaggctgtcgggtagcagccggggttatgctgggcacggattgcatgctggccatcattctggtcaactgcgatgatgacttgtgggggtgaccacaggtctggaggtggaaggctgtgccttgccatccatggccatgtgacggagagaatcacactgagtgctgacaggatactttagctacgtggtcaatgtacgccacgcggttagcgaccacaagtggtcaagacgccgcaacctgggaacttaggagatgcagaggacccaggcacgggaacggaggggatctggggactgcggccccccaaagggagatccttctccagcctggagagttcactggaccggagtaactctctgtcctggtatggtggggaatcctacatccagagcatggagccaggggctaacgtgctttgcagtccgctctctgggctgggtagaggtacctgaagaggacctggcaccggggacagacgcagtatttgcagtcaataactgtatccagcagctggcccagacccgctagccggaagccagcctccaagatggtgcctggggtgagggccagaacatgctgatgatcctgaagaaggatgccatgagcctagtgaatcccctggaccacagtctgatccactgccagcctctggtgcacatccgtgtgtggggcgtggggagctccaagggccggtgaggatgcctacattcccccaagcaagacgctactttctccctcccggctgcaggctgtgatccccactgatgctgatccccagtacttgaacccctggacacagatcctctgatgtggacccaggactgcttcccctgcctggttcagccctggttggggagggtgggctctagctcagcagggacagtttggggagagtccgagaggctgggctgattcccttctgtgctcccacatgcttccggaacagtgacaggtgattgaaaaccaggtatccttgcccaagcctgatgtccctactctatacctgctatagtcccatagcctgactttccagcctcctgcagctcctgcctcaacctcgtaggta

SEQ ID NO: 63325 - DNA, 730 bp, Homo Sapiens
ttctgtccaccagagagacccacaaaaagatgctggctcgggacgagcggcgtttccgggtggccgaccaggatggggattcgatggccactcgagaggagctgacagcctttctgcaccccgaggagttccctcacatgctgggacatcgtgattgctgaaaccctgtgaggacctggacagaaacaaagatggctatgtccaggtggaggagtacatcgcggatctgtactcaggccgagcctggggaggaggagccggcgtgggtacagacggagaggcagcagttccgggacttccgggatctgaacaaggatgggcaccctggatgggagtgaggtgtgccactgggtgctgcccactaacccagtgacagccccctggtggaagccaaacacctgctgcacgagagcgaaacggacaagggatgggcggctagagccaaaagcggaaaatcctgggtaattgggaacatgtttgtgggcagttcaggcaaccaactatagcgaagaactgacccgggcatcacgattagctgtgagcaccgggcactaccacagcctcagaggcccgcacatgaccggaggaggggcgctgtggtctgccccttcctgtccaggccccgcaggaggcagatcagccccaggaatctcctgccctgggctctcgggacccctgggtcggttctgtcctgtcaaccccaacccaggaaggggtgtatagtccagag

SEQ ID NO: 63326 - DNA, 583 bp, Homo Sapiens
  misc_feature (33)..(33): n is a, c, g, or t
ggccccatggacctgattgtcagcaacctcccntacgtcttccaccaggacatggagcagctggcccctgagatccgcagctatgaagaccccgcggccctggatggtggggaggagggcatggacatcattacccacattctggccttggcaccccggctcctgaaagactctggtagtatcttcttagaagtggacccaaggcacccggagcttgtcagcagctggcttcagagccggcctgacctgtaccttaatcttgtggctgtgcgcagggacttctgtgggaggccccggttcctgcatatccggaggtctgggccatagcatggctgccctgtggatgccttgtcagtgccgccagcctgaccagaggggaggtggatggcactttccagagcccaggttcttatggcatttcccagggttctgtgatttccccatgctctgcatttctaggatatttctaggacacctggattggctccatcacatcagagtggctgagggcagttgctctgtgttggtgaaattgctgtgggggtatcgggggatatggccagtaaagtattgagagactaac

SEQ ID NO: 63327 - DNA, 1225 bp, Homo Sapiens
  misc_feature (548)..(548): n is a, c, g, or t
ggccatttgtcttttgactctgatgtggtttttgctgatttcctttgatgtattctagtttatctgacttttctttggcgacttatggactttctctcaccactaaaagccctcactgctctctcagtcttcttgatttaacctcctccaggcttccgccttctccaggccctgattctcagttggagttgctggtgcctcctccttcacccagcgtctgacgctggagtgctcacagtgtggctgggacccacttctctcctctgtagatacccacccctgtgttgatcacttgcaggcccgggttctgtgtgccatgtgtatgccctagagcccttgctcacgtttccccacagccttcatgaagtctgtgttcctcagatgccccacagacatcacaagcaaggcacatccaaaccccagaccactatccaggagcctgcaccctctttctgttggctccacctccagcctccgagacccacccacttccctgcatttgctgagaccatcattttccacctagacaatgcccccacgcttgcccntacagcccttccataaacgattttttccaacctaaatcagacctagaaagctttttcacatagcccagtcttcctccttgtgctgggttctgtctcattatcacctcatcagggaagtctgtacagatagaatccctacccctgcatttgtcgcctccgtctgcctctttggtcagtttcaggtccctgtagttcacactgtgtccccagggatgaagtgggtcccggcacggtgggcattctgtcatgaatgaatggtccccttgtgtatgcagggttcgcgctgcagctaggcagcatctccgcaggtccaggtagtgtaagccctcacctccacgtcccctgggacctcggcatggctggcctttctggccagatccaatcaccctcccgcgaaggtggctttgcgcatgcgcttctgctccccagcgatctgaggagtgaacaggaccccacggacgaggatccctgccggggtgtgggccctgctctgatcaccacccgctggcgctcccccaggggccggagccggggccgccccagcactgggggcggggtggttaggggcggccgttgcgatgtatgtggcaaggtgttcagccaacgcagcaacctgctgaggcaccagaagatccacacgggtgagcgaccattcgtgtgcagcgagtgcggccgct

SEQ ID NO: 63328 - DNA, 592 bp, Homo Sapiens
ctgccttggaaagggccaaaaggggagattgatgcgaccccgggctccagggacgaccgatttccaggcctaaatgaaaatttgagatggaagaaagagcagacacattggcggcaagctaatgagaagctagattataccaaggccgagttagatcaagaagccttgatcagtggccatctggctacagaagcacatttaatcatccctggatatgcaggaaaacattatccaggcgagcctcggctcttggcctgttaagacagccctgctgggaggtgttctgagggtgctggtgaattctctgaactgtgatcagagtaccacctatctggactcactgcgtttgcgacactccgtgctctcatcgccaagtttggagacttactcttcgaagaggaggtggaacagtgtttcgacctatgtcaccaagtcctgcaccacttcaagcaggagcatggatgtcacccggaggcaagcctgtgccaccctttacctcctcatgaggttcagttttggagccaccagtaatttttgctagagtaaagatgcaagtaaccatgtccctgcatcctttgtgctgccgggcctc

SEQ ID NO: 63329 - DNA, 599 bp, Homo Sapiens
cccatcagaatcgaggagacgtggcgcctgtggcagaagtttttagacgactattctcgctttgaggactggctcaagtcagctgagaggacggcagcctgccccaattcctcagaggtgttgtacacgagtgccaaagaggaactgaagaggtttgaggcctttcagcggcagattcatgagcggctcactcagctggagctcatcaacaagcagtaccggcggctggcccgggagaaccgcacagacacggccagcaggctgaagcagatggtccacgagggcaaccagcgctgggacaaccttcagaaggcgggtcacagccgtcctgcggagactcaggcatttcaccagccagagggaagaatttgagggcaccagggagagcattctggtgtggctcacagagatggacctgcagctgaccaacgtggagcacttctcagagagtgacgccgatgacaagatgcgccaactgaatggcttccaacaggaaattacattaaataccaacaagattgatcagctcattgtgttgggggagcagctgattcagaagagcgagcccctggatgctgtgctggatcagcggatcgagt

SEQ ID NO: 63330 - DNA, 437 bp, Homo Sapiens
agctcggtacccctgttggatgcagttctcattgattatcagagaaatgtcccagctgctagagaaccagaagtgcttagtactatggccataattgtcaacaagttagggggacatataacagctgaaatacctcaaatatttgatgctgtttttgaatgcacattgaatatgataaataaggactttgaagaatatcctgaacatagaacgaactttttcttactacttcaggctgtcaattctcattgtttcccagcattccttgctattccacctacacagtttaaacttgttttggattccatcatttgggctttcaaacatactatgaggaatgtcgcagatacgggcttacagatactttttacactcttaccaaattttcgcgaccatctgctggatcagcggatcgagtgggatcctctgaacgccaa

SEQ ID NO: 63331 - DNA, 496 bp, Homo Sapiens
ggtagttttcagtgttcaggttatagaatataactgaccataaaaattacctgcaggtattttctttttatgaacttgtttttaaattaccaagtaattactggtgtcattttgttttatgacagacacacgtatctaacaaacaaacaaacagtgaccttctccatgggtcaaggacttccttacaatttctcctgagttaacttttgtgaaaataatacctaaggttttctggcttattgaggaaatttcctaacaaacaaacaaacaaacaaacagaagagaagatcattaaccactgtatactttgtgtatataataggtcagtgtaaagaaatatgatttgaggtggtgcatgcaagtaactagggtttattctatataatgaatatttatagatctgtaacatttgtttcaaaatgctgtttcatttttataaagtaccagtgtttagctgctttttatacattaaattagcaatttgaaaaactcaaaa

SEQ ID NO: 63332 - DNA, 564 bp, Homo Sapiens
  misc_feature (522)..(522): n is a, c, g, or t
gcggccgccccacgacaaccgcaccatggtggagatcatcgccgaccacccggccgaactcgtccgcaccgacagccccaacttcctgtgctcggtgctgccctcgcactggcgctgcaacaagaccctgcccgtggccttcaaggtggtagccctcggagaggtaccagatgggactgtggttactgtcatggcgggtaacgatgaaaattattctgctgagctccggaatgcctctgctgttatgaaaaaccaagtagcaaggttcaacgatctgagatttgtgggccggagtggacgaggcaagagtttcaccttgaccataaccgtcttcacaaatcctccccaagtagctacctatcacagagcaattaaagttacagtagatggacctcgggaacccagaaggcacagacagaagcttgatgactctaaacctagtttgttctctgaccgcctcagtgatttagggcgcattcctcatcccagtatgagagtaggtgtcccgcctcagaaccaccntcgttgcgaatccttggcccggagggcaaattcccaatagtg

SEQ ID NO: 63333 - DNA, 588 bp, Homo Sapiens
ggttggagctgtgtcttgtatgctcagcgaggcccggagagacccgggagagagctaggccgagtccaccgcccgagtctgctgcccgagcccgcgttacgcacaaagccgccgatccccggcctggggtgagcagagcgaccaccgcccgggagcagcgcggcgagacgcacggtgcgccctatgcccccgcgcccccaccgcccccgccgcggcagccgaagcgcagcgagagaacgcgccaccgcggggcccgggtgcagctagcgaccctctcgccacctgcgcgcagcccgaggtgagcagtgagcggcgagcgggagggcagcgaggcgttcgcgggccccctcctgctgcccgggcccggcccgctcatggcggccatccgcaagaagctggtggtggtgggcgacggcgcgtgtggcaagacgtgcctgctgatcgtgttcagtaaggacgagttccccgaggtgtacgtgcccaccgtcttcgagaactatgtggccgacattgaggtggacggcaagcaggtggagctggcgctgtgggacacggcgggccaggaggactacgaccgcctgcggccgc

SEQ ID NO: 63334 - DNA, 554 bp, Homo Sapiens
ggccagctgcagcctcagcgccacaagtcttgcagaaacagtccattgtgaccttcagcctgtgggccccgagaggggcgaggtgacatataccactagccaggtctcgaagggctgcgtggctcaggcccccaatgccatccttgaagtccatgtcctcttcctggagttcccaacgggcccgtcacagctggagctgactctccaggcatccaagcaaaatggcacctggccccgagaggtgcttctggtcctcagtgtaaacagcagtgtcttcctgcatctccaggccctgggaatcccactgcacttggcctacaattccagcctggtcaccttccaagagcccccgggggtcaacaccacagagctgccatccttccccaagacccagatccttgagtgggcagctgagaggggccccatcacctctgctgctgagctgaatgacccccagagcatcctcctccgactgggccaagcccaggggtcactgtccttctgcatgctggaagccagccaggacatgggccgcacgctcgagtggcggccgc

SEQ ID NO: 63335 - DNA, 290 bp, Homo Sapiens
atgcgcgagcttccatcaactacacatttaaaacaccagaaaaggagcctccattatggcatgctgaatttaccaaagaagaattggttcagaagctccgttccaccacaaaaagtgcagatcacttaaacggcctgcttcgggaaatagaggcaaccaatgcagtccttatggagcaaattaagcttctcaaaagtgaaataagaagattggaaaggaatcaagagcgagagaagtctgcagctaacctggaatacttgatggaagcgtcgcgcatgggtaccgagctc

SEQ ID NO: 63336 - DNA, 789 bp, Homo Sapiens
  misc_feature (118)..(118): n is a, c, g, or t
tgtcagaacagttccaagatccagactttggtggtctgtctggtggaagggtcgttcgcattgctgttcacccagattatcaagggatgggctatggcagccgtgctctgcagctgcntgcagactgtactatgaaggcaggtttccttgtctggaggaaaaggtccttgagacaccacaggaaattcacaccgtaagcagcgaggctgtcagcttgttggaagaggtcatcactccccggaaggacctgcctcctttactcctcaaattgaatgagaggcctgcgtaccgcctggattacctgggtgtttcctatggcttgacccccaggctcctcaagttctggaaacgagctggatttgttcctgtttatctgagacagaccccgaatgacctgaccggagagcactcgtgcatctatgctgaagacgctcacatgattaggatgaggctgaccagtggaaggctggcttgcggccttctggatagatttccgacggcggttcctagccttgctctcctaccagttcagtacctttctctccttccctggctctgaacatcattcagaacaggaacatggggaagcccagcccagccttgccctgagcccgggaagaactgggaaccacctcttccctccccctaatgaccctgaaaccgggcctgggaaaattgttatttccccgggaaaaattgggtgggaaacattattccccctcctttccgtgggagacaatggaattcccccgggggccaaattcttcctcccgcaaatctaaaattttt

SEQ ID NO: 63337 - DNA, 427 bp, Homo Sapiens
tctgcccaaagacctcattctttaaataaaacttgttattttggcatatttctggtagggcccatcgcacatgtgtatcagtatagttattatttcatattaactttatgaattctcttgacttggcttataatagttttatgatttttactacataggtagcacatttatcatttgtgacagaataatgtgaagttaagtaattactgaactttaaatggaaatagtatgcaagaaactcaggcattgaacttgaagataagagtattattgctttaatccagtgtatttgtttatggaaagaaaaacacaaaggcagactgttgagtaaaaaatattaaatattgttaaatattctgtattttggaatttatccatttataggcttcaaaagtaaatttttaaataaaatatattagtcgactgg

SEQ ID NO: 63338 - DNA, 566 bp, Homo Sapiens
ctgctcaccctgtggctcttctccaacaacctctccaccatctacccgggcactttccgccacttgcaagccctggaggagctggacctcggtgacaaccggcacctgcgctcgctggagcccgacatcttccagggcctggagcgtctgcagttcgctgcatttgtatcgctgccagctcagcagcctgcccggtaacatcttccgaggcctggtcagcttgcagtacctctacctccaggagaacatcctgctccacctacaggatgacttgttcgcggacctggccaacctgagccacctcttcctccacgggaaccgcctgcggctgctcacagagcacgtgtttcgcggcctgggcagcctggaccggctgctgctgcacgggaaccggctgcagggcgtgcaccgcgcggccttccgcggcctcagccgcctcaccatcctctacctgttcaacaacagcctggcctcgctgcccggcgaggcgctcgccgacctgccctcgctcgagttcctgcggctcaacgctaacccctgggcgtgcgactgccgcgcgcggccgc

SEQ ID NO: 63339 - DNA, 474 bp, Homo Sapiens
atgcgcgacgcttccatcaaccgccgtcttgccatggaacaccgtgcctgcccctctcgagaccctgcctgcaagaatgcagtcttcacccaggtatatgaaggcctcaagccctctgacaaatatgaaaagcccctggactacaggtggcccatgcgctatgaccagtggtgggagtgtaaatttattgcagaaggcatcattgaccaagggggtggtttccgggacagcctggcagatatgtcagaagagctgtgccctagctcagcggatacccccgtgcccctgcccttctttgtacgcacagccaaccagggcaatggcactggtgaggctcgggacatgtatgtacccaacccctcctgccgagactttgccaagtatgaatggatcggacagctgatgggggctgcccttcggggtaaggagttcctggtcctggccctgcctggttttgatggaagcgtcgcgcat

SEQ ID NO: 63340 - DNA, 1158 bp, Homo Sapiens
  misc_feature (566)..(652): n is a, c, g, or t
  misc_feature (885)..(886): n is a, c, g, or t
  misc_feature (888)..(888): n is a, c, g, or t
tgcattgtgcttttaatgatctaaagacactgattagcttctcaactagttctctttctaaaagatcaattttatacaaataagttttctaaatgtaataaagtctgttttctttctccagggaattaagaacaacattgtgctgcccttattagttcctaattacagattaaaaatctgtatctttgaactctagatttacataaatcctggcttccctgcacattttgcccctgtaaattggaatacatgatgattgaaccatctgttatgagaatattacatttcctatttacacaattgtttgtgacagagtaaaaaccattttcatagtatatgttggatcactgttgtcttcatatttctaaaataaatgaattaaaaaatttaaattcttagatgcttatctctatcatagctcagaatgcaacttcaatacccccattcttttatatttccagatttcttttaattaagatataatgaacaaattaagttaaatgaagtctgtattttcatgcaaatatattagtattcattaatatacatttattctttgcaaatannnnnnnnnnnnnnnnnnnnnnnnnnnnnnnnnnnnnnnnnnnnnnnnnnnnnnnnnnnnnnnnnnnnnnnnnnnnnnnnnnnnnnngcactgtaaaataatatgtaaaggacttggaatgttaaaaataaccattcatcattttgctttatattacatctaatatttcctgaaacattttgtaatacccacatggaaagtggagaaagagaaaccttgtgctttttataaaacattgccaaggagaataatggttaaacaaatctgttcaaatacatatttaaatttttttacaaataaaagttttaaattaacatacnnanatcacacgaccaaccccccccattaaaccttgtccggcccgcctcgggccctcgaaaaaacctttctagaaccatttcgtttggccgcgccgggccccgttaaggtaaactggaacattgggccaatacctgcttcccctagggaaaatcccgggccatggacatagtggcctgggaattctcccccaattaaaaaaaccccccgggcggggtaacccgcaagcgcttttctgaaaccaaatctccagaatggggaagtttcctcgaaga

SEQ ID NO: 63341 - DNA, 670 bp, Homo Sapiens
aaggaatgagaaagacagtttgagagacaaaatggaccagggggctatcacaagtgtggaggctgcaacaaacaggtggtgaggatttgggggttgaaaggaaacggtgtatcaagtgaatgagaaacatatggctacttgagaacatgggaatgctagaagcaaggagcagcaagtctagcaaacatgcaagccctgcctcagcttctctcccaacactcagcttttcttccaacacatttcatgtgcaaggttctcgtgcccactcctcttgtacagtttggcagcctcatggagcttccctggtaggaaaacacatctgccagaaacaggtcattgttggtctctccccgcttcttcctctcctggaaaaattagaagcaaaggaaatggcctctgcagccatgggcagaaagcagcctttacaaaggttagatgtggctatttcaagtgaggcccctgggccttcctactggaacctgggcttggctcctggctgttgtctctctcccctaggtttccgctgggaaggcttgataacaaaagcaggcttttaccagacaagcaaagatcaaaaaaagatgcaacctttgtttgtttaatggaaattcctcagggttgctttcctgtgtatccaaagctaagccgcgagcgggggatcctctaggag

SEQ ID NO: 63342 - DNA, 895 bp, Homo Sapiens
ggctacactggtgctgcagaatgggcacgggagcccccacatcagttctgaattcagcaaggggcccccaatacacagattttaaatgaatggcgcctggctctcctatcatttattgcgcaacgctgtccagcgccgtatgccctgtaccctctcaccagttgttccgcgatctacagctctctctaacatacctcttccggctgatggcagttgtcgtccaccatggagacatgcactctggacactttgtcacttaccgacggtcctccaccttctgccaggaaccctctctcaactagcaatcagtggctgtgggtctccgatgacactgtccgcaaggccagcctgcaggaggtcctgtcctcctagcgcctacctgctgttctacgagcgcgtcctttccaggatgcagcaccagagccaggagtgcaagtctgaagaatgactgtgccctcctgcaaggctagagctgatggcactagtctgcactgtccaggaaaaaagtaaaactgtactgttgcgtgtgcaagcggccccactagagccttccagccttctggtgtgttctaagagcaggctccacctgggagccagccccagttcacaccaaagccaggctccctgaacagtcctgttcatgtgtgtaggtggttctgttgtgttaagaaagcattcattatcgtccggagtgtctttttactcatctgatacaggtaattaaaagaactcagagttcttgaagccaccgttttcatattgtaatgttaggtgttctcagaggggaggtacctttgtctaatcaacgtttccacttagatcttttatttttaataagcaggcccataaaaattgttgacaagaattaatgaaattattaaaggcaacaatttag

SEQ ID NO: 63343 - DNA, 690 bp, Homo Sapiens
tcttgccaatcagactacttgttggatctcagattgcagcagagatgcgggaagccatgtataatcagttggggctcactggctgtgctggagtggcttctaataaactgttggcaaaattagtttctggtgtctttaaaccaaatcaacaaacagtcttattacctgaaagttgtcaacatcttattcatagtttgaatcacataaaggaaatacctggtattggctataaaactgccaaatgtcttgaagcactgggtatcaaatagtgtgcgtgatctccaaaccttttcacccaaaattttagaaaaagaattaggaattccagttgctcagcgtatccaaaagctcagttttggagaggataactcccctgtgatactctcaggaccacctcagtcctttagtgaagaagattcatttaacaaatgttcatctgaagttgaagctaaaaataagattgaagaactacttgctagtcttttaaaccgagtatgccaagatggaaggcagcctcatacagtgagattaataatccgtcggtattcctctgagaagcactatggtcgtgagagtcgtcagtgccctattccttcacatgtaattcagaaattagggacaggaaattatgatgtgatgaccccaatggttgatatacttatgaaactttttcgaatatggtgaatgtga

SEQ ID NO: 63344 - DNA, 665 bp, Homo Sapiens
cctagtgtacttactccttggtgacttacctgttctttatacccaaatgaaaaaacacgttgaagctttgcccattatatgaaagagcattaaagatttatgaagatagcctgggtcggatgcatcctcgagttggagaaacactgaaaaatttagctgtgcttagctatgaaggaggagattttgaaaaagctgctgaattatacaaaagggcaatggaaataaaagaagcagaaacatcactcttgggtggaaaagctccttcacgccattcatcaagtggagacacgtttagcttaaaaacagctcattctcctaatgttttccttcagcaaggacaaaggtaatagcagcagttagaattctttgcaaatgtaccttaagacaaaataattaaacatttggaacatttgaatttgaaactttaaaaaaatgttgtacgaaattttactacgtgtgatttaactgctatttgtatgaagttgtattggattacattaagttggaattgtgattatgtctgttttagttgtttaaaagaattttcctattatatggtatccaaggatgtagacacattagaattataagaagacatgaggagcaaatcatgtagagcggattggtctttgttcgacgagagctggcagagtagttaagacagg

SEQ ID NO: 63345 - DNA, 544 bp, Homo Sapiens
attctttgctcatgttgcccacttcttgtggatttgtctgagtgttttttgacaatcacttccttaaagactcttctgaactagttggacctggttaatcatagagagtagcctttaatcatggatagtcttcttggattatttttatatttgaaaagaaaatgttttatttgcactactgagtaggaagagttaattgttttctttgttcttttttttgaagtcattacacaggacttcactccagagttaccattatgagtgtgttcagctctggtccacagaggatggataaaaatggtttgttatgtttttttgctctgcagtgctatgagccttatatctgttaatatgaaggacaaagtccaaaagcagcagtggatagcaggaagggtagagactaatatgtttgggaccaaaaccatctaagttagagatttccagatcacagaggggctggccattctctggagcagtcattgctcggcgcttcattgtaatcattttgcgccaatcccccaacaattaggaactggaccctggg

SEQ ID NO: 63346 - DNA, 967 bp, Homo Sapiens
caggtgcgagggcttctgggtttcgtgttcctttcccttgatggttctggggcccagcaacttcgcacgtgtcgatctggaagacctggatgggcccggctgagcgctaggcccagccgatttctgttgggaggccagatagccgcggtaggctgcgcaagcacactggggtgtagcccaacaccgtgaggcactggcccacttgcggaacctgactcaggctgctgggcaagcgtaagctatgtgttggccctggggccggcccacccctgccaagcttgccgacttctctgaggtggatgtctttgtgctattagcctgtcctctgggtgctctagccccccagctttctggtagcttcttccagcctatactggcaccatgtgagctggaagctgcctgcaaccctgcctggccacctccaggcctggctccccacctcacacattatgcggacttattgcctggctctcccttccacgtggctctcccaccacctgagtcagagctgtgggaaaccccagacgtgtcactcattactggagatctccgacccccacctgcctggaagtcatcaaatgatcatggaagcttggctctgaccccacggccccagctggagctggctgagagcagtcctgcagcctcattccttagttcccggagctggcaagggctggagccccgcctgggtcagacgccagtgacagaagctgtgagtggaagacgagggattgccatcgcctatgaggatgagggaagcggctgataccatgtggggctggagacatagatggacttatgaatggctgctaggacctttagtgcttcctgcaccaacctcccatccgcctgccaagatcccttgaaggaccctggaaggagggagagcaggcagcccttcacaggataggatccgtctctgtcctgtcctggcactttaaccactgctggagcgcaacactgg

SEQ ID NO: 63347 - DNA, 412 bp, Homo Sapiens
  misc_feature (296)..(296): n is a, c, g, or t
ttttgtccttctttgcctgtgaggaatatgcacagaatgcgttgaggaagcataaagacttgttgggtaaaagatacattgaactcttcaggagcacagcagctgaagttcagcaggtgctgaatcgattctcctcggcccctctcattccacttccaacccctcccattattccaatactacctcagcaatttgtgccccctacaaatgttagagactgtatacgccttcgaggtcttccctatgtcagccacaattgaggacatcctggatttcctgggggagttcgccacagnatattcgtactcatggggttcacatggttttgaatcaccagggccgcccatcaggagatgcctttatccagatgaagtctgcggacagagcatttatggctgcacagaagtgtcat

SEQ ID NO: 63348 - DNA, 366 bp, Homo Sapiens
agataccattccttctgcagagttggtcaaacgccatgctggggtgctaggacttggtgcatgtgttctttctagtccttacgatgttcccacctggatgccccagctcctcatgaatctcagtgcacatctaaatgatcctcagcctattgagatgactgtaaaaaaaaccttatccaatttccgaaggactcaccatgacaactggcaggaacataaacagcaattcactgatgaccaactgcttgttctcaccgatcttcttgtgtcaccatgctattatgcatagaaagatgactagtcctcacttcaggctcttttcttcaaaaattccacaccctcaggtgccatctgtggtggctctcc

SEQ ID NO: 63349 - DNA, 688 bp, Homo Sapiens
  misc_feature (469)..(492): n is a, c, g, or t
ttgtctaacaggtccgagtgttgcccgaagcatgctgccttcctttcagttcaggttcctatggaagatcagatccgtttgaggcctggctctgaattacatctgacccccaaagctcagcaggctctgaatgctcttgaatccatggcatcaagtaagcagtatgttgaataccaggatcaaatattgcaagccacccaatttataaggcatcctggccattgccttcaagatgggaaaagcttcttggctcttctcgttaactgtctgtatccagaagtgcattatttggaccacatacgatagttaacactgaggctcttgaaaaacccattgctgtttatgtttacatttaactttgctgttgcacaagtaactttgctcaattgcactgtagagctcagtttggccaatgtgtagttgactgagatgcaagttgggaggcgttagatattagataattttgggnnnnnnnnnnnnnnnnnnnnnnnntttcttagctcttaagaccttctggggactctttaagtttttatatttatccacaagagaaacttactaagttccacttgggtgcagagccattcacagttgccgaatgtcccagtcatctcacaagacctccagatggagttctttgtatgtttccacttctgtctctgttttatgtatatgttcctagaaatat

SEQ ID NO: 63350 - DNA, 974 bp, Homo Sapiens
  misc_feature (811)..(830): n is a, c, g, or t
  misc_feature (835)..(838): n is a, c, g, or t
ggggctgctctgctgcctgcccggggtaccaacatggcccagaagcgtcctgcctgcaccctgaagcctgagtgtgtccagcagctgctggtttgctcccaggaggccaagcagtcagcctactgcccctacagtcactttcctgtgggggctgccctgctcacccaggaggggagaatcttcaaagggtgcaacatagaaaatgcctgctacccgctgggcatctgtgctgaacggaccgctatccagaaggccgtctcagaagggtacaaggatttcagggcaattgctatcgccagtgacatgcaagatgattttatctctccatgtggggcctgcaggcaagtcatgagagagtttggcaccaactggcccgtgtacatgaccaagccggatggtacgtatattgtcatgacggtccaggagctgctgccctcctcctttgggcctgaggacctgcagaagacccagtgacagccagagaatgcccactgcctgtaacagccacctggagaacttcataaagatgtctcacagccctggggacacctgcccagtgggccccagccctacagggactgggcaaagatgatgtttccagattacactccagcctgagtcagcacccctcctagcaacctgccttgggacttagaacaccgccgcccccctgccccacctttcctttccttcctgtgggccctctttcaaagtccagcctagtctggactgcttccccatcagccttcccaaggttctatcctgttccgagcaacttttctaattataaacatcacagaacatcctggannnnnnnnnnnnnnnnnnnnaaaannnncctgtcggccgcctccgcccctgaaaaactttctaaaccatttcttttggcgccgcgggccccagaaggtaaagggaactgggccttacctggttccctaagaaaaaccctggccatgaacaagggcttgggaatt

SEQ ID NO: 63351 - DNA, 490 bp, Homo Sapiens
tgaaaccatttgtgaatttacagactccgaaaacaaaaagataatttagagtctcaaagtaagatttggggagatgtccattggagacagaagtggagagagggagaagttcatttgttgacatatttatgtatggtgcacctactgtgtgccaagccatgttagagatacagtgggagcaaaaccagatgtgttttctgccctctgactccagtggttgcagaattagcccaggaactaggaattggatggagtcacacaaaccaaggaaggggattgtttgaggggggcactcagtcacatgtggctgaggccaaaggagaatgacgatatattttaaaattctggatttggcaaaatttagcgctagtctttacttttcataaacctctctcatgttagaggcagcaaagaaaaaccagtttgccaagaggtcacgagattgggcagtgaggaatggggagtttagtttaaaagacaacactagata

SEQ ID NO: 63352 - DNA, 474 bp, Homo Sapiens
  misc_feature (126)..(126): n is a, c, g, or t
aatgaatagggaccaatgccacattgctttttatatttctttcttttttaatgttgccaaaaccaaaagtagctttgttttcctttgtattttgctactttgcagtatttgtgtgtgtggtttttntccttaatttgaaagggacagcactgtgtatgtttataaactaaatgaagataagatattattttgtataaacattcatctgagaacaatcaaagcagtagccacatggtgctggctcctttgcagcacaaacctggtcattttgatgactgtacaacaggaagacttgaaaaatcacgtggattcatattaccaccgctctcatttcatggagtcttctgatcaaaaaagctcacgtcgtatttcttcttttcctttctcttttctagaaattgggtgtttgtaccagaatggaattttgcttctcggttatcctgtgcttcagatgattataatctaacccaaact

SEQ ID NO: 63353 - DNA, 1252 bp, Homo Sapiens
  misc_feature (444)..(515): n is a, c, g, or t
ctgaacaatttgtgtttgtgactgatggagaatttcaggaatgaatgagaaagcctttgcgaaactatgcaacagtttacatcagtcatgtgaagtatttgtctaaaacagagcaaactgaagaccaaattattctcctgttgaggtccgtggatggcagatttaaagggaagaaccacaaaggcttgcaaagataggagaggctccatctctaatgcatgtagaagcttcttacgggtgcccatcaagagcatagcttggaagccaccatgctgtgcggaactgcgtcagggcaaatgtcacagcaggatttccccaacccagctccatcatcacagacacagagagctgcaggggaggcctgcccactgttttgtcgactctgccctcctgtggcagcatagatccttaggtgctcaataaaggtgtgctgtattgaactgnnnnnnnnnnnnnnnnnnnnnnnnnnnnnnnnnnnnnnnnnnnnnnnnnnnnnnnnnnnnnnnnnnnnnnnntgtctgtccgcccgctccctcccatttaatcagccttaacaacaccactcggctcggccgcgcgcgcccccccagtgcgctgaccgagcaatgaggagaacgcgttgttttcggtaagaacacccccttttactaaatccccacggtctttgttacccccaaccaatacaaacgaaacacggtccgcctgtgtgccacatacggaacacgtcgtctcatactaccacacccctctacccgtctacaccaccacgaagcgccctattttaccgtcgaaatattataacgcgagacgccgggacgaacactcccaggtccgcaccctctataatcaatatatgcagtggccagctcccgccgccgcccctttcttcctctactcactcacgaccctatgttgcctgcgcgctgccacacacaattatataaaccgcgctccctccgaccccctcgcctattggcacgacctcccatcatcccgccaggtgccgatctctaatgttataaacctgcgctgcactccgccctctaggtcactcacccccactactgtgtctttcctcggcgcgccggatgcacaaaattaaagactctcccgcgcgatgtagcgcacaaaaaagcgcccggcatgccatcatctatcactatcttctcccactagatacatgccacccccccgctctacttatatcatacgcgcgatggaatagcctcaactgtactacctctggggggcc

SEQ ID NO: 63354 - DNA, 466 bp, Homo Sapiens
tggcacacctcacagaagcaccctggccctggatgcctgcaacctcagaagagtgcagctcccagagggaggcagccatccatctgggatggtcctaagcatggaatcctaactcctgattccgtctcctatttcttgcttgtacgccagttcccaaatctggtagatgtccatgcccatgtgctcctgctgggactcaattcaggctatgtatgactatgaagtcaggctcatctgcttactggctgtgtgaactttttgtatcttggttttcttcatccatgaaatccaagtaatactacctaattgttactgtggagattaagttcaaatgcaatgtatagtaatattaagcaatttctagttattattctagccagtaatggacttcagaatcttttattacacaatataagaatatgtatgtaaagacattttggaatttcctggatgagaaggaagtctg

SEQ ID NO: 63355 - DNA, 807 bp, Homo Sapiens
  misc_feature (703)..(703): n is a, c, g, or t
gggagtcggaattttggggagccaaccgcgccgtctgtccctggcaagccagcggcggtttaaaggaggtggcgggaagcctgtgtgtgcttcaaatcgtcaccctcatggtcgctccggtttttcacgactgaaaacaacatagcaaaataagccaagatgtctgtggatccaatgacctacgaggcccagttctttggcttcacgccacaaacgtgcatgcttcggatctacattgcatttcaagactacctatttgaagtgatgcaggccgttgaacaggttattctgaagaagctggatggcatcccagactgtgacattagcccagtgcagattcgcaaatgcacagagaagtttctttgcttcatgaaaggacattttgataacctttttagcaaaatggagcaactgtttttgcagctgattttacgtattccctcaaacatcttgcttcctgaagataaatgtaaggagacaccttatagtgaggaagattttcagcatctccagaaagaaattgaacagttacaggagaagtaccagactggattatgtactaagcaggcccttcttgcagaattagaagagcaaaaattgttcaggccaaactcaaacagacgttgactttctttgatgagcttcataatgttggcagagatcatgggactagtgattttagggagagtttagtatccctggntcagaactcccgaaaactaccgaactttaaagaacatggggaaaaaggaatcgaaaccactgaaaatatcctaattggctcccgaagtccaaaaaggagggagc

SEQ ID NO: 63356 - DNA, 608 bp, Homo Sapiens
  misc_feature (54)..(54): n is a, c, g, or t
aaaccatctccccctcaggacagggagtctgatccatcccattcacccagtgancttctttttgcccaggccgggactttttgcatcagtcacgttaaccagatgactttgcctgttaccaaacctcatgcatccacgtttgcgtctggggaggaataaaaagacatcgttcccgcttctgcgttttgttattcctactgccgccataggaattatttcgttggctgaacgttaccagcaccccgagaacacattttgatagaatcagagtagaggacatggctgtcttctaaaaagccacgacatgaaaatgacaatccctttcgtctccttcctccgctgcttccacctaacgcagcctcctgcctccgcctttgtttcatagtgaggattttattttgcacggcgccctccctctaaatacctaccctagatgatttcatcctgcccctcacttcttaacatattcctgtgtctttgtaatggccaaatttctccttccactcgtccgcacggtacgtcttcatgggagtcattttattccttacagcttccttgtaaccacagccctaaatccatgataaagctactcttgtactcctaaaaaa

SEQ ID NO: 63357 - DNA, 414 bp, Homo Sapiens
tgtctagtcagatgcagcttgatctgtggcaaaaccaagtgtggtctttcagcttcagtgtgttagcatcccagcacctgggatggggtttgtgggcaagttgattttgccacactgtagggcccaggtggtcccattgccaccgtgaagccaaattctagcccaagtctggtagagcagtcgggcagctagttttcgggggaggatgatgtggtgggacagaggacctcagtggcctattacggagccctcttcccagactaaattcatagccgagagctcggggggatggtagagttaaaatttaaaataattttctaaattctgtatttggatattagtgtttaagtggtaatttggcaacagtttataaagtgatgttctgaataccataaattatgtgtaggactgtga

SEQ ID NO: 63358 - DNA, 503 bp, Homo Sapiens
gcgaccgccgtggcgagctgccggtgctggacgcccgcgggcagcggtaccgttcggcgcgctgttccgggagcgccgcgccgtggtggtgttcgtgcggcatttcctgtgttacatctgcaaggaatacgtagaggatctggccaaaatccccaggagtttcttacaagaagcaaatgtcacccttatagtgattggacagtcatcctaccatcatattgagcctttttgcaagctgactggatattctcatgaaatctatgtcgatcctgagagagaaatttataaaagattgggaatgaaaagaggtgaagaaattgcttcctcaggacagagcccccacataaaatcaaatctactctcaggaagccttcagagcctgtggcgggcagtgactggccctctctttgattttcaaggagacccagctcagcaaggtggaaccctcattttaggtccaggtaacaacatccattttatacaccgcgataggaataggttgg

SEQ ID NO: 63359 - DNA, 529 bp, Homo Sapiens
gccataattcggacccggggggataaaggccactgtgagaagggttccagcagagtgttgagccccaattagtcatcttgagaaggagaaggagcccactgccagacccaggcacccccctgcctccagactccacagccccgagcccaggcacggtcacccctgtgccacctccacagtgaggagccagccagacatttctccccctcaccccctgtggacatcacggttccaggaacagcccttcccccaccactgggaccctccccagcctggagagttcatcactacgtaaggaaagctccttccgcccctccaaagccctcaccatgcctaacagaggcatgcatttttatatcagattattcaaggacttctgtttaaaagatgtttataatgtctgggagagaggataggatgggaatgctgccctaaaggaagggctggtgaaaggtgtttatacaaggttctattaaccacttctaagggtacacctccctccaaactactgcattttctatggattaaa

SEQ ID NO: 63360 - DNA, 1076 bp, Homo Sapiens
  misc_feature (325)..(327): n is a, c, g, or t
  misc_feature (329)..(434): n is a, c, g, or t
  misc_feature (445)..(445): n is a, c, g, or t
  misc_feature (452)..(452): n is a, c, g, or t
  misc_feature (462)..(464): n is a, c, g, or t
  misc_feature (479)..(553): n is a, c, g, or t
  misc_feature (693)..(703): n is a, c, g, or t
  misc_feature (875)..(887): n is a, c, g, or t
ggactttacagcagcttcctttctttccatggcactgcctagttaacagaagtcttataaaaatttaaaaagacacatttcttacaaaaaagagttgaatgaggtaaaatggcattagatggctctatattttttaaagctatgtaattgttcagcgtcacttttctaagtacttatacatatctaaacatgtcttcatggtttatattttcacttatatatgctgggctggattaagctttgttgtgattgtgaccaacattcaggccacgtgagcactgtcttatcacatcgccaattagttgtaataaacgttcaacgtacnnnannnnnnnnnnnnnnnnnnnnnnnnnnnnnnnnnnnnnnnnnnnnnnnnnnnnnnnnnnnnnnnnnnnnnnnnnnnnnnnnnnnnnnnnnnnnnnnnnnnnnnnnnngggggccacgnggagganaaaggagaannnaggccagggagcaannnnnnnnnnnnnnnnnnnnnnnnnnnnnnnnnnnnnnnnnnnnnnnnnnnnnnnnnnnnnnnnnnnnnnnnnnnaaaaaacagtaatcccaaaaatcggggtcgggggcggccggcgcgcctgaaaggagggggacgcggcgggtttacccgccttctccccaaaaaacacacacggccccccaaacaagcggggggttcctctctccccgacnnnnnnnnnnnccgggcccgccggggccccacacggcttgtaaaacaaaaacaacccacagcgggggtgtttgttgagcctatttttttccgctctttacaccacgggggcacaccccccgcagtggctctacaaaaaacaataacccccgcccccgcccgccgtcttatctttacctaggcnnnnnnnnnnnnnaaaaccctccacaaaaaaccgccgccgccgccggaggggaggcgcccgcacccaaaacccgggggggccctcgcatttagccgcacactgcgagggagcaagaccccaccccctcttattctcttactctccgcgccgagataataaataatattctcccgcccctcagtgacaaaacaacgggcgccg

SEQ ID NO: 63361 - DNA, 677 bp, Homo Sapiens
aatgggcgcgattttcagtgcttttttctctcgtgggaattcttcggcgtacttccgacaaacacagattccgggatgctgagaaacagacagattttcatgaggaaactcaagaacgtgtcatgagagtggagtatcacttcctctctccctacgtatctccaaaagagtctcctttccgacatgtcttctggggctccggctctcacacgctgccagctttactggagaacttgaaactgcgtaaacaaaataacggtgcttttaatgaaacgctgttcagaaaccagttggctctagctacttggactattcagggagctgcaaatgccctctctggtgacgtttgggacattgacaatgagttttaaatgtgatacccatagcttccatgagaacagcagggtagtctggtttctagacttgtgctgatcgtgctaaattttcagtagggctacaaaacctgatgttaaaattccatcccatcatcttggtactactagatgtctttaggcagcagcttttaatacagggtagataacctgtacttcaagttaaagtgaataaccacttaaaaaatgtccatgatggaatattcccctatctctagaattttaagtgctttgtaatgggaactgcctctttcctgttgttgttaatgaaaatgtcagaaaccc

SEQ ID NO: 63362 - DNA, 1608 bp, Homo Sapiens
  misc_feature (635)..(666): n is a, c, g, or t
  misc_feature (851)..(907): n is a, c, g, or t
  misc_feature (1133)..(1133): n is a, c, g, or t
  misc_feature (1410)..(1423): n is a, c, g, or t
  misc_feature (1447)..(1447): n is a, c, g, or t
  misc_feature (1462)..(1462): n is a, c, g, or t
  misc_feature (1541)..(1541): n is a, c, g, or t
agaattccaactacctgactttcttaaagaaaaaccacagactgagcaagtggagtagcagaaccaggagcctcttccatacatgaggaaagattgctgccttttcagcagaagggaaattcctaggattggctgtcccctgccaagcttggtggagcgtctgcaccttggctgcgccgcctgtgcatttgccagtttcctcccactgagaggatggaggtgtccgcacagctttgggcctcgtgagggatctgcctcctgagcaaagagctcttgatcccgatttcatgcacagccctgcagtaaggagcccagaaggaacatgtgtttcctgttaaaactcctcttgttctcttttcttacattatgacgtttgttttcaaggagagggtttaaaaatgggatcctgtaagcagacttgggctatgtctccttttgaaatatgttgtctgtacatgttctaatgttttgtagaacacgtgtgcctgttaaagtgtattgatgtgaataagtattaaatatcctaattatttaattcattgtattgtttctgagaagttgggaaattaccattatacatttacaacctaatgacttttgtattttatttttcaaaataaaagctttcaatgtgnnnnnnnnnnnnnnnnnnnnnnnnnnnnnnnngtcatcaaagatcagaaagatccacaacggcaccatacccaacgacggcgaagcacctggaaggagaggggcagaggcagattcgaagcgaccgcgcccaactcaaccccgaggaaaagcaggtattcagagaggtggcgccgcgccctccctctccgacattagaataatttagcaaaaccaannnnnnnnnnnnnnnnnnnnnnnnnnnnnnnnnnnnnnnnnnnnnnnnnnnnnnnnncgaacatgctcgcgctgccagaaaagaagacgccgtggtctaagaccacgaagaggacgctgatattctttcccgcgcccgacacaagaagcaggccgcgcgcggtggagggagcacgaccgggccgctgctagcgtatagcaacactacactcgccgcatcgccgggtgctctctcggcaggcagagagagaagcacaaaagaaggagacgatcccgctgctgcnctcgagagatgctagtgtcctcacgagcggagagtgcgtggcggatgtttagccgcctcaagggtgtggggtctctccctactgcttagctgggcacactagtacggatatgaccagcgactaaggggcgttgggtactatgctctctaacatacataaaaacagttactcgtcgccccacagagcgagtgtaacaagtgcgccgcacctacgtgcaggggctggtagatggaataggactgagcacgcgcatgcagccgtgccgagcaccatgtannnnnnnnnnnnnntggaaccgatccgcacgagtagantcaatgttacagagncctctgccgtgggccgcaacgcacaggcgagcgcgcggaacagaccgacttccctctcgtcgccattgggcgcccgtcncccgttcctaaggacgtagcgcgggtgggggggagagataaccactcccagatgtagcatatagatc

SEQ ID NO: 63363 - DNA, 276 bp, Homo Sapiens
ttcactctggtccctgtgctgctggagttgtgggaatcaagatgcctcgttattgtctatttggagatacggtcaacacagcctctaggatggaatccactggcctccctttgagaattcacgtgagtggctccaccatagccatcctgaagagaactgagtgccagttcctttatgaagtgagaggagaaacatacttaaagggaagaggaaatgagactacctactggctgactgggatgaaggaccagaaattcacttgccaccatcgtcggt

SEQ ID NO: 63364 - DNA, 827 bp, Homo Sapiens
gagaacggttatcggaagtcacgggaaggactcagcaacaagcttctcaatcccaactacatttatgacgttcccccagaattcgtcattccattgagtgaggtcacgtgtgagacaggggagaccgttgttcctagatgtcgagtctgtggccgccccaaagcctcaattacctggaagggccctgaacacaacaccttgaacaacgatggtcactacagcatctcctacagtgacctgggagaggccacgctgaagattgtgggcgtgaccacggaagatgacggcatctacacgtgcatcgctgtcgatgacatgggttcagcctcatcgtcggccagcctgagggtcctaggtccagggatggatgggatcatggtgacctggagagacaactttgactccttctacagtgaagtggctgagcttggcaggggcagattttctgtcgttaagaaatgtgatcagaacaggaaccaagcgagcatgtggccacataacgtttgtgaataagaagcttgatgaagcgcgaccaggtcacccatgagcttggcatcctgcagagcctccagcaccccctgcttgtcggcctcctcgacacctttgagacccccaccagctacatcctggtcttagaaatggctgaccagggtcgcctcctggactgcgtggtgcgatggggaagcctcactgaagggaagatcagggcgcacctgggggaggttctggaagctgtccggtacctgcacaactgcaggatagcacacctggacctaaagcctgagaatatcctggtggatgagagtttagccttgccaaccatctac

SEQ ID NO: 63365 - DNA, 573 bp, Homo Sapiens
ccttcaacttatctttgataaacccaagcaaggatacaaaaagttggacgacattgagtagagtcatggtatacggtgctgaccctacagtatcagtggaaaagataaggaaaatgtcactactcacctatgttatgccaaacagttaggtgtgctggggttggatactgctcttttacttgagcattggttgattaaagtttaggtaccatccaggctggtctagagaagtctttggagttaaccatgctctttttgttaaagaagagagtaatgtgtttatcctggctcatagtccgtcaccgaaaatagaaaatgccatccataggtaaaatgctgacctatagaaaaaaaatgaactctacttttatagcctagtaaaaatgctctacctgagtagttaaaagcaattcatgaagcctgaagctaaagagcactctggtggttttggcataatagctgcatttccagacctgacctttggccccaaccacaagtgctccaagccccaccagctgaccaaagaaagcccaagttctccttctgtccttcccacaaccccgagctggtgtg

SEQ ID NO: 63366 - DNA, 431 bp, Homo Sapiens
caccagctcggggttggtacagaggatgctggcccagggagtacatccacagcatcttccaagtttgctccaaactggtgtgcttcctcctgggatggacttgagtcatttacagggaatatctggccccatcctgggtcagcccttttaccctttacctgctgctagtcaccctctcttaaaccctcgtcctggaacacctctgcatctggcaatggtgcaacagcagctacagcgctcagttctgcatcctccaggctctggttcccatgcagcagctgtcagcgttcagacaacccctcagaacgtgcccagccggtcaggcctgccccacatgcactcccagctggagcatcgccccagccagaggagcagctcccctgtgggccttgccaaatggtttggctcagatgtgctacacaaccccgagc

SEQ ID NO: 63367 - DNA, 669 bp, Homo Sapiens
ggtctcttatgacaaggagcattcagagcatggtgtcatctgactccacatcaccagattcttctgtaacagaagaatcacgttctgagacagccagtagtttatcccagaagatttgtaatgggggattatctcctggtaacccaggagattctaaggacatgaaggaaattgagcccaattatgaaagtccctctagtaataatcaggataaagattcatcacaggcttccaaaagctcaataaaagttccagagacccacaaagcagtccttgctctccgattagaagagaaagatggcaagattgctgtacaaactgagaaggaagaaagtaaagcctctacagatgttgctgggcaagcagtaaccataaaccttgtccccacagaagagcaagcaaaaccttaccgagttgtgaacctggaacagccattgtgcaagccatatactgtcgtggatgtgtcagcagccatggccagtgagcacctcgagggccctgttaacagccccaagacaaaaagctcatcctctactccaaactctccagttacatcatcttcattgacaccaggacaaataagtgcccatttccaaaatccagtgctattcgataccagaagtatggacttctagcaccagtccgacgaattaagtatcaggtccgacc

SEQ ID NO: 63368 - DNA, 999 bp, Homo Sapiens
cggtccggaattcccgggatagcaaccttggccatggaccagccggctggcctgcaggtggactacgtcttccggggtgtggagcatgccgtgcgggtgatggtttctgggcaggtgctggagctggaggtggaggaccggatgacggctgaccagtggcggggcgagttcgatgctggcttcattgaagatttgactcacaagacagggaacttcaaacagttcaacatcttctgtcatatgctggagtcagccctcactcagagtagtgagtcagtcaccctggacctgctgacctacacagacctggagtccctgcggaacccaagatggggggccgcccaggctccttggcccccaggtcggcccagctcaactccaagcgctacctgatcctcatctactccgtggagtttgacaggattcactacccgctgcccctcccgtaccagggcaagccagaccccgtggttctgcagggcatcatccggtcactgaaggaggaactgggccgcctgcaagggctggatggccagaacactcgggacacccgggagaatgagatctggcacctgcgggagcaggtgtcgcgcctggcgtccgagaagcgggagctggaggcgcagctgggccgatcgcgcgaggaggcgctggccgggcgcgcggcacgccaggaggccgaggcgctgcgcgggctggtgcgcgggctggagctggagctgcggcaggagcgcggcctcgggcacagggtggccggccgtcgcggccaggactgccgccgtctggccaaggagctcgaggaggcgaaggcatcggagcggagcctgcgcgcccggctgaaggcgctgaccagcgagctggcattgtacaagaaggggaggcggactccgccggtgcagccgcccccgacgcgggaggaccgggcctcatcgtcccgggagcgctccgcgtcgcgaggccgcggcgccgcgcgctcctcatcccgggagagcgggccgc

SEQ ID NO: 63369 - DNA, 497 bp, Homo Sapiens
actctgtgggtgagctcggtgactatctccacgtacatgaagggccaatggcgcgggggccagccgctgtgcgagtacagcaccttcattctgctcttcttcagcctgtccggcctcagcatcatctgcgccatgagtgtcgagcgctacctggccatcaaccatgcctatttctacagccactacgtggacaagcgattggcgggcctcacgctctttgcagtctatgcgtccaacgtgctcttttgcgcgctgcccaacatgggtctcggtagctcgcggctgcagtacccagacacctggtgcttcatcgactggaccaccaacgtgacggcgcacgccgcctactcctacatgtacgcgggcttcagctccttcctcattctcgccaccgtcctctgcaacgtgcttgtgtgcggcgcgctgctccgcatgcaccgccagttcatgcgccgcacctcgctgggcaccgagcagcccctcgcggccgcggccgc

SEQ ID NO: 63370 - DNA, 392 bp, Homo Sapiens
gcagcccgggcatcgttcggccgggacgtgtctggctcggcgccgcgtcaggttgcgccagtggagtcggaccccagcgcgcctctcccagctgcagagctgcagggcggagaggcggcccactctaagctggcggcgcggctcaggggcgcggctgggcgcgccgcgtgtggcgccggcgggcagcgcggtctcactccgccaccctccgctcctgccctttgtcgccaagcatctggagaagccgggtccttccctcccgggctcgcgctgtcccctgcgcgcgatccttccccgacggtgaacccaacgggaaaggcccagaactgcgcggggctgcggccatctgctgtcgagccgctccgcgtgtctctgccgccccctgcggccgc

SEQ ID NO: 63371 - DNA, 598 bp, Homo Sapiens
ggtggaccgaattgttggcgagcgggtgtgaacggggaaatgaagcaaccgccaagacctgaaattgatgaggatactcagaccaccttggaggatttcagccgaacagcatccggaggtgcatttgtggtatcacaagtcccaagccttcccttgcctgaccaatacccaccaagtcaaatcacagaccttgatgccacagttcatgaggataagattattcttacatggacagcaccaggagataattttgatgttggaaaagttcaacgttatatcataagaataagtgcaagtatgcttgatctaagagacagttttgatgatgctcttcaagtaaatactactgatctgtcaccaaaggaggccaactccaaggaaagctttgcatttaaaccagaaagtatctcagaagaaaatgcaacccacatatttattgccagtaaaagtatagatataagcaatttgacatcaaaagtatccaacattgcacaagtaactttgtttatccctcaagcaatcctgatgacattgatcctacacctactcctactcctactcctactcctgatataagtcatattctggagttatatgt

SEQ ID NO: 63372 - DNA, 418 bp, Homo Sapiens
catcgcttcagtggtgctgggtcaggcggacccaagagtcagcccgtacggaagccgcgctacgtcaggcgggagcggcccccggacagggccacggatcccgctgccttcccgggggaggcccgtatcagcaatgtctgacctggaggccgagaccacgccacgcacttggcggcagggacccggaggccgaccccttggcgggaaccagcacaaagtgttggcatcgcccggcgcccgggacagtcctgggcacagcctcggctctgagtccctccgcctcccagcgacggacgccaacgggtcccgggccgcctgaggctcctccccaccacagccatctcgtttatcggaccaggagcaggcatccatgagacctcagagcttcagatcgagcttggggtccgctgtctagacc

SEQ ID NO: 63373 - DNA, 574 bp, Homo Sapiens
  misc_feature (465)..(465): n is a, c, g, or t
  misc_feature (510)..(510): n is a, c, g, or t
  misc_feature (551)..(551): n is a, c, g, or t
gggggcggccgcggagtatcctggagctgctgacagtgcgggcctgcgcccagtcccggctgtcctcgccgcgacccctcctcagccctgggcgcgcgcacgctggggccccgcggggctggccgcctagcgagcctgccggtcgaccccagccagcgcagcgacggggcgctgcctggcccaggcgcacacggaagtgcgcttctctgaagtagctttggaaagtagagaagaaaatccagtttgcttcttggagaacactggacagctgaataaatgcagtatctaaatataaaagaggactgcaatgccatggctttctgtgctaaaatgaggagctccaagaagactgaggtgaacctggaggcccctgagccaggggtggaaggtgatcttctatctgtcggacagggagcccctccggctgggcagtggagagtacacagcagaggaactgtgcatcanggctgcacaggcatgccgtatctctcctctttgtcacaacctctntgccctgtatgacgagaacaccaagctctggtatgctccanatcgcaccatcaccgttgatgac

SEQ ID NO: 63374 - DNA, 739 bp, Homo Sapiens
gtaatgctgcagtagagttggagtacttagttctcttgttgtccagtatatctaataagtgtttttcatattatttccacgtaagggaaataaggtagtacttttctttttatatttctatgcttaaaattctctttcctagtcaaaaattgcccaaatctgtgtttgctttctgcttgctacatttgtctcccttacttttcttgagctaaagacaggctttttccaccggcatcatcactgctatcatcattaacagcgtaattatacaagcatatttaatgctgagtttaatttaatatgtaatacatatggtaattgtagggtaatacccacaacaactgtagtttcttacttggcccaaagaaatgttaatttaagggttagacttccattctggcaaaatcttgccttatcagaagacattggaaagagggattccctttggtgtttggtcttctacttagaaaaacctattgcagttagtttatcttgtagtattcatctttgtattctgaagataaggtttgaattaaattgatacacacagaggggaaccgattttttttatccaatgtgaattataaatgagataatccacagttattcattgtggagttgttgagactatgaaagactcattgtctttgtattcagctcttaaatagtgtaactatatccccacctctgcttgctttctttccctcccctccaatgataaagaaaatgataaatttaa

SEQ ID NO: 63375 - DNA, 818 bp, Homo Sapiens
ctcggggccgctgccgccgacgccgccgcgcattgtgcagcaggcgggcccccgcgcgggagggccctggacccgcgcggctcccggggatggtgagcaaggcgctgctgcgcctcgtgtctgccgtcaaccgcaggaggatgaagctgctgctgggcatcgccttgctggcctacgtcgcctctgtttggggcaacttcgttaatatgaggtctatccaggaaaatggtgaactaaaaattgaaagcaagattgaagagatggttgaaccactaagagagaaaatcagagatttagaaaaaagctttacccagaaatacccaccagtaaagtttttatcagaaaaggatcggaaaagaattttgataacaggaggcgcagggttcgtgggctcccatctaactgacaaactcatgatggacggccacgaggtgaccgtggtggacaatttcttcacgggcaggaagagaaacgtggagcactggatcggacatgagaacttcgagttgattaaccacgacgtggtggagcccctctacatcgaggttgaccagatataccatctggcatctccagcctcccctccaaacttacatgtataaatcctatcaagaccattaaagaccgatacgattgggacattaaacatgttggggcttggcaaaacgagtcggtgcccgttctgctccttggctccaccatcggaggtgtatggagatcctgaagtccaccctcaaagtgaggattactggggccacgtgaatccactaggacctcgggcctgctacgatgaagcatacgtgttgcagaaacatgtg

SEQ ID NO: 63376 - DNA, 933 bp, Homo Sapiens
gtgtaggggcattctggactagtgagaatggtcatgctgccgacacccagacggcacgaacttccgagtggtaattgccatcttccatgtatggatggtggccagtgcagttcaagggacaaatgtcagtgccctccaaatttcacaggaaaactttgtcagatcccagtccatggtgccagcgtgcctaaactttatcagcattcccagcagccaggcaaggcgttggggtcgcatgtcatccattcaacacataccttgcctctgatcgtgactagccagcaaggagtcaaagtgaaatttcctcctaacatattcaatatccatgtgaaacatcctcctgaagcttccgtccagatacatcaggtttcaagaattgatggcccaacaggccagaagacaaaagaagctcaaccaggccaatcccaagtctcgtaccaagggcttcctgtccagaagacccagaccatacattccacatactcccaccagcaggtcattcctcacgtctaccccgtggctgctaagacacagcttggccggtgcttccaggaaaccattgggtcacagtgtggcaaagcgctccctggcctttcaaagcaagaggactgctgtggaactgtgggtacctcctggggctttaacaaatgccagaaatgccccaagaaaccatcttatcatggatacaaccaaatgatggaatgcctaccgggttataagcgggttaacaacaccttttgccaagatattaatgaatgtcagctacaaggtgtatgccctaatggtgagtgtttgaataccatgggcagctatcgatgtacctgcaaaataggatttgggccggatcctaccttttcaagatgtgttcctgatccccctgtgatctcggaagagaagggccctgtaacgactgtcagtctggaaacgtgttga

SEQ ID NO: 63377 - DNA, 531 bp, Homo Sapiens
tcctggccagcctccccgctgggagcctccggtgcatcacctgtgccgtggtgggcaacgggggcatcctgaacaactcccacatgggccaggagatagacagtcacgactacgtgttccgattgagcggagctctcattaaaggctacgaacaggatgtggggactcggacatccttctacggctttaccgccttctccctgacccagtcactccttatattgggcaatcggggtttcaagaacgtgcctcttgggaaggacgtccgctacttgcacttcctggaaggcacccgggactatgagtggctggaagcactgcttatgaatcagacggtgatgtcaaaaaaccttttctggttcaggcacagaccccaggaagcttttcgggaagccctgcacatggacaggtacctgttgctgcacccagactttctccgatacatgaagaacaggtttctgtaggtctaagacactggatgtgcccgctggagatataccgccccgccacctggccctcctgctgtatctt

SEQ ID NO: 63378 - DNA, 490 bp, Homo Sapiens
tcatcaacctcagaacacgtcgtaattcatctgagcaatttcacaaaagctgccttctgtgccaacaaagtggcactgtcctccatcacctcacctagaaaatcctccaaagtcatccacgcctcacacacctgtacagcatggttatctttcaccaaagcctccttcacagcagttaggatctccctacaggcctcatcattcacagtcacctcaagttggaacacctcagcgagagcctcaaagaaacttttatccagcagcacagaaccttccagccaatactcagcaggcaacttctggaacattatttacacagacaccctcaggacaatcttcagcaacatacagtcagtttaaccaacaaagtctgaacagcacggcaccaccccctccacctcctccacctccttcttcgtcttactatcaaaaccagcagccctctgcaaactttcagaattataatcagctcaaaggtagtctttcttta

SEQ ID NO: 63379 - DNA, 451 bp, Homo Sapiens
caatgactcgtcaagcgcatcagcatggaagggatctccaaaagtatctgcagagtggcatccgccagacctttggcatcctcagagaactgaccaacagatatctgcacacagtcaattccttacagagacgacagcctctcctccctcagtggacgacctgcagatgctgacaaacattctctttgccagtgaaggaggataatgagaaggtgcccactttgctaacggactaccttttaaaagtgctctgccctacctaaccttgaccctttggagcagcctcgctgcaggaggtcactgagcaagagtcattccatcacagggactgcatgagaccatgtaacctccgacatgtatttaaacgtgtatagcttaacctggattaaacacgagcaagcgcgcggggtcctttgccgttggctgctactgctgtatggggggctcctct

SEQ ID NO: 63380 - DNA, 995 bp, Homo Sapiens
ccctggagagctgttgagtgggctgggcccagccggcccttttgatatggtgtactgggcaggagacatccccgcacatgatgtctggcaccagactcgtcaggaccaactgcgggccctgaccaccgtcacagcacttgtgaggaagttcctggggccagtgccagtgtaccctgctgtgggtaaccatgaaagcacacctgtcaatagcttccctccccccttcattgagggcaaccactcctcccgctggctctatgaagcgatggccaaggcttgggagccctggctgcctgccgaagccctgcgcaccctcagaattggggggttctatgctctttccccataccccggtctccgcctcatctctctcaatatgaattttgttcccgtgagaacttctggctcttgatcaactccacggatcccgcaggacagctccagtggctggtgggggagcttcaggctgctgaggatcgaggagacaaagtgcatataattggccacattcccccagggcactgtctgaagagctggagctggaattattaccgaattgtagccaggtatgagaacaccctggctgctcagttctttggccacactcatgtggatgaatttgaggtcttctatgatgaagagactctgagccggccgctggctgtagccttcctggcacccagtgcaactacctacatcggccttaatcctggtgagtgagtcagaagggagcctcccttatcctggagttggtgggataggggaaggaggttggagccagagcctgcaaagcatgggcaggatgtgtggcccctccctggagttacccttgctccttgcccctccagtcagccccacatccttgcaggtcaccgtgtgtaccaaatagatggaaactactccgggagctctcacgtggtcctggaccatgagacctacatcctgaatctgacccaggcaaacataccgggagccataccgcactggcagttctc

SEQ ID NO: 63381 - DNA, 280 bp, Homo Sapiens
cagctaagagaactttccagagagagggaggaggaggatgactacaggcaagaagagcagaggagcactgggcgtgaatccccggaccacctcgaccagtgacaggccagcagcagagggcggcggaggaagggttaggggttcattctcccgcttcctggcctcccttctcctttctaagccctgttctcctgtccctccatcccagacattgatggggacatttcttccccagtgtcagctgtgaggaacatggctggcctggtaagggggtccctgt

SEQ ID NO: 63382 - DNA, 997 bp, Homo Sapiens
gtacggtccgaatcttgggatgggaacacaaacttgctggcgggaagagcccggaaagaaacctgtggatctcccttcgagatcatccaaagagaagaaaggtgacctcacattcgtgccccttagcagcactctgcagaaatgcctcctcagctgcaaaacggcctgaacctctcggccaaagttgtccagggaagcctggacagcctgccccaggcagtgagggagtttctcgagaataacgctgagctgtgtcagcctgatcacatccacatctgtgacggctctgaggaggagaatgggcggcttctgggccagatggaggaagagggcatcctcaggcggctgaagaagtatgacaactgctggttggctctcactgaccccagggatgtggccaggatcgaaagcaagacggttatcgtcacccaagagcaaagagacacagtgcccatccccaaaacaggcctcagccagctcggtcgctggatgtcagaggaggattttgagaaagcgttcaatgccaggttcccagggtgcatgaaaggtcgcaccatgtacgtcatcccattcagcatggggccgctgggctcacctctgtcgaagatcggcatcgagctgacggattcgccctacgtggtggccagcatgcggatcatgacgcggatgggcacgcccgtcctggaagcactgggcgatggggagttgtcaaatgcctccattctgtggggtgccctctgcctttacaaaagcctttggtcaacaactggccctgcaacccggagctgacgctcatcgcccacctgcctgaccgcagagagatcatctcctttggcagtgggtacggcgggaactcgctgctcgggaagaagtgctttgctctcaggatggccagccggctggccaaggaggaaggtggtgggcaagaccatgctgatctggggataacaacctgaggttgagagaatgtccggggcgcctagagatcctcgagggc

SEQ ID NO: 63383 - DNA, 403 bp, Homo Sapiens
tacggtagtggtacattattcagtcgtgtgtgcattcttgtgaatctttttttaggcttagtaatgttacacaggctgatagatcatctctttgatgtgaaaagcatcttgggttatacattaaaatcgaggtggacattatttccccaatttcacaacaggattcacattgttaatttataaatctagacttggagaattaaggactgagaaatgaccatatcttaaactatctacgacaaagtgaacttaaaaggacatgcccactgaattcaggtcctttgagtaaaagaaatatctatctgctagcacattttgtattaagtgtctactgtttctgcctgttaatcgctgggaacacaaatagtgcgatttgtgcaattggagaactcttgcctttttt

SEQ ID NO: 63384 - DNA, 548 bp, Homo Sapiens
ctaactggccagatttgctttcacagtgtggctgtggattatacaatagccaggaagaactcaactggtctttcttaagaagcacacgtcgtccatttgtgccacaaagctgccttccacatgaagctgtggtctcagccagcaacctgaccttggactgtttgactgcaaagcttagtggcctacaggttgctgtagagacagccaatttgattttggatctttcatatgttattgaagataaaaactaagagaatagcatgttcgtattacaagagaaacaaataaactagtctgttggcaattgagaaaaattgtgagtgtatttgttttctcccaaagccctgttctacatatttggacaaacgactcataaaattatagatacacttatttaggaaaaaaggtgattcgtgaatggaaatgccatgaaacaataaaaatatgaagcataatttatttaaaaatattatagttatcttagggattctatactggctgctgtacattgttctaaatttttgttatgttgcatcctttgtgcagcc

SEQ ID NO: 63385 - DNA, 311 bp, Homo Sapiens
ctttcgcccactgggataaatgactcaggaaagaagagcctcggagggcgctctgcactccacccaggaggaaggatacgtgtgtcctgctgcagtcctcagggagaacttttttgggaaccaggagctgggtctggacaaaggagtaccctgcattacgtgggatatgtgtgatcaattggggacatgcgacacacaatgagggtgtcatgacaatgcatgacacgtacggttatatgtggcagtgtgaccccttgacatgtggcgttacatgaaagtcagtgtggcacgtgttctgtggcatgggtgct

SEQ ID NO: 63386 - DNA, 1550 bp, Homo Sapiens
  misc_feature (86)..(86): n is a, c, g, or t
  misc_feature (90)..(90): n is a, c, g, or t
  misc_feature (123)..(123): n is a, c, g, or t
gtttcgggcgcgggccccgcttttccgcaccctgctccggcctcgactacggcgagcctgagcgcggcggcggcccacgcgcagancagnggagagatgagcagcaccagcagtaagaggggntccgaccacggcaacccagaggctgaagcaggactaccttcgcattaagaaagacccggtgccttacatctgtgccgagcccctcccttcgaatattctcgagtggcactatgtcgtccgaggcccagagatgaccccttatgaaggtggctattatcatggaaaactaatttttcccagagaatttcctttcaaacctcccagtatctatatgatcactcccaacgggaggtttaagtgcaacaccaggctgtgtctttctatcacggatttccacccggacacgtggaacccggcctggtctgtctccaccatcctgactgggctcctgagcttcatggtggagaagggccccaccctgggcagtatagagacgtcggacttcacgaaaagacaactggcagtgcagagtttagcatttaatttgaaagataaagtcttttgtgaattatttcctgaagtcgtggaggagattaaacaaaaacagaaagcacaagacgaactcagtagcagaccccagactctccccttgccagaccgtggttccagaccggggaagacgcacctggtccagaaggggattcagcttgctcaacggggcaatgcgccgggggccgtcccaaacctcgcagggctccagcaggccaaccggcaccacggactcctgggtggcgccctggcgaacttgtttgtgatagttgggtttgcagcctttgcttacacggtcaagtacgtgctgaggagcatcgcgcaggagtgaggcccaggcgccgagacccaaggcgccactgagggcaccgcgcaccagagcgtgacctcggcaggctggacacactgcccagcacaggcagacccaccaggctcctaggtttagcttttaaaaacctgaaaggggaagcaaaaaccaaaatgtgtgactgggctttggaggagactggagcctcagccctgtcctggccacgggccgctggggctggtgtgggtgggccttgtgtgctggatttgtagcttatcttccgtgttgtctttggacctgttttagtaaacccgtttttcattttattagatgtggtcacttagaaatgcaaacttgctgccgaccgcgggctgctcctgcgttcttggagctcctggcgcgtttctcggagctcccggctcctcagcgggtgggaacctcggggcccaggggtggagctggcgtccgcgggtgctggtctggcctggccgtgtggtgatgaggcttagcggggccagtgacggccgtggctcaggatccataagtcggggtttggtctcagcatttacaaatgtgtttacagtcagaatgaaacacattccttctagaaagtgcttgggggtttttgctgccctggaagccaggagcctgctcactccaaccacaagtcgcccttgactgcggcggccgc

SEQ ID NO: 63387 - DNA, 720 bp, Homo Sapiens
  misc_feature (568)..(576): n is a, c, g, or t
tcctctgtctaaatgggaggttgccagagcgctggctgggactaggatgtgtaactaagatttcagtttgaaatcttagatttcagttcacggcgataaagaagtaggtgctgcacacaaatatgtaaagcaattgtaggaaatttgaaaggaaaaaaagaaaccgaagccagtattttaataattgctttttctgtgtattttgtattgggctgggggatagcatcaaaggttgaactttttgagctttctatgaaaaaccccaggaccttctttctttggccatttctatggaaatgcgatgtcagatggatggtaatggtgccctccagtggctgtgagacctcattgcgcattgtctactggagctttagtcttctgagacggaggaaaactgctgaatactctggattcatctatgtctacaatgttgcatttatgaaaaactacactgtgctaggcgcattctaggacatgaatatgaccacaccctctttcaccgggtgtttctgtagcaagttttcatattcttttcaaacaatggtttctctgcgttaattattgaggnnnnnnnnngatggggtaagaaaactacccatgcatgatgtagagagctgttgatttgtttctgtttttttaaaggaaaactatttgtaagatgttgcactaaaacattttatatacacttcagagaccctgtagttaattttggtggaaatt

SEQ ID NO: 63388 - DNA, 3028 bp, Homo Sapiens
  misc_feature (2506)..(2506): n is a, c, g, or t
  misc_feature (2511)..(2511): n is a, c, g, or t
  misc_feature (2609)..(2609): n is a, c, g, or t
  misc_feature (2703)..(2703): n is a, c, g, or t
  misc_feature (2751)..(2751): n is a, c, g, or t
  misc_feature (2858)..(2858): n is a, c, g, or t
  misc_feature (2974)..(2974): n is a, c, g, or t
  misc_feature (3002)..(3002): n is a, c, g, or t
cagaggcggcgagaggcgggctgaggcggcccagcggcggcaggtgaggcggaaccaggcctcctggccatgggaggggccgtggtggacgagggccccacaggcgtcaaggcccctgacggcggctggggctggtccagtgctcttcggctgtttcgtcatcactggcttctcctacgccttccccaaggccgtcagtgtcttcttcaaggagctcatacaggagtttgggatcggctacagcgacacagcctggatctcctccatcctgctggcacatgctctacgggacaggtccgctctgcagtgtgtgcgtgaaccgctttggctgccggcccgtcatgcttgtggggggtctctttgcgtcgctgggcatggtggctgcgtccttttgccggagcatcatccaggtctacctcaccactggggtcatcacggggttgggtttggcactcaacttccagccctcgctcatcatgctgaaccgctacttcagcaagcggcgccccatggccaacgggctggcggcagcaggtagccctgtcttcctgtgtgccctgagcccgctggggcagctgctgcaggaccgctacggctggcggggcggcttcctcatcctgggcggcctgctgctcaactgctgcgtgtgtgccgcactcatgaggcccctggtggtcacggcccagccgggctcggggccgccgcgaccctcccggcgcctgctagacctgagcgtcttccgggaccgcggctttgtgctttacgccgtggccgcctcggtcatggtgctggggctcttcgtcccgcccgtgttcgtggtgagctacgccaaggacctgggcgtgcccgacaccaaggccgccttcctgctcaccatcctgggcttcattgacatcttcgcgcggccggccgcgggcttcgtggcggggcttgggaaggtgcggccctactccgtctacctcttcagcttctccatgttcttcaacggcctcgcggacctggcgggctctacggcgggcgactacggcggcctcgtggtcttctgcatcttctttggcatctcctacggcatggtgggggccctgcagttcgaggtgctcatggccatcgtgggcacccacaagttctccagtgccattggcctggtgctgctgatggaggcggtggccgtgctcgtcgggcccccttcgggaggcaaactcctggatgcgacccacgtctacatgtacgtgttcatcctggcgggggccgaggtgctcacctcctccctgattttgctgctgggcaacttcttctgcattaggaagaagcccaaagagccacagcctgaggtggcggccgcggaggaggagaagctccacaagcctcctgcagactcgggggtggacttgcgggaggtggagcatttcctgaaggctgagcctgagaaaaacggggaggtggttcacaccccggaaacaagtgtctgagtggctgggcggggccggcaggcacagggaggaggtacagaagccggcaacgcttgctatttattttacaaactggactggctcaggcagggccacggctgggctccagctgccggcccagcggatcgtcgcccgatcagtgttttgagggggaaggtggcggggtgggaaccgtgtcattccagagtggatctgcggtgaagccaagccgcaaggttacaaggcatcctcaccaggggccccgcctgctgctcccaggtggcctgcggccactgctatgctcaaggacctggaaacccatgcttcgagacaacgtgactttaatgggagggtgggtgggccgcagacaggctggcagggcaggtgctgcgtggggccctctccagcccgtcctaccctgggctcacatggggcctgtgcccacccctcttgagtgtcttggggacagctctttccacccctggaagatggaaataaacctgcgtgtgggtggagtgttaggaccaaaacagcaacaccaacccagaaagcaacaggcccaaagaaaaacttctgaaaaaacacactcttgccgggccgcctcggccctcaaaaagctttcgaaaccattcgttcggcgcgcgggcccgcgccgaaagcgtccatggccatagcttgtttcctaggagaccccgcccccgactagcgtttggattcccccccataaacggacgcccaggggccacccgacgctgtttctaaaacaactccataactggagcccctgcacggcaatttcgccgcgcccccactcccggcggcggggcgcaaggccgcccccctcgatatatcaaccccggcacggcctcccgcgctatgtcccatttctgcccagcgaacgaacgggtgttgacacactccctgtccacacgcccctttatccgacgcctacctttcgggaacacgttcccctccccacacttatctgtggtccatgacggccggcaagccttctccacaatatcccaccctccggatcctgcccgtgtctccaccanccganaaacctgccttgggtgaatgtaccccacctctttggggggggtgcggtcagacgagcacttcgacgcaccctggacctcgtgcgcgctgaggagatanatccgcgggcggtcgcgtcccaccccaatatatatacgcccgtgcccccacactataccctgcggggacgcccctgtgccttggagagagaccncccatgagaacgcggttgggcgtgacaccgccttgcacgccgagagangcggatattcgcgccccatggtagccaaacaccgagcacaaccactccccctcttgtcgcggctcgtaccacatacccgtctcttacgcgcgccacaagcatgaggngctcacgcccatcttttttgtccacctccgtgatgaaaccccgcgcccactgactttattagcgccctacgcactacacataattgccgccagcctgatacccacaccgcgtcctnatagatcactcgtcgccctgtagcgcgnattccccccacccctcccgccatacg

SEQ ID NO: 63389 - DNA, 632 bp, Homo Sapiens
aacagtttttagtttttaatgaacttgtaaacaaaaaagctcccatttcaaaataaaaacaaaatcccagatcatatagatgtttacagtgattacatttatctaagcaacatacatacatgttcagttgtaagatgttaactaaatttctgtgacaaatatgctttgtttttaataccaagaacattatagagttaatgcagagtcctaaggataatctagtagtcactaagtttttcttaagtcttcactttagatgctgttatttctagcacaattaagcaggcagagtctttcatatgctcaaacactggaatctttggttgctaccatatcagctggcttgcagacaagaagccaaccattttaagaatgttttaagtgaacaacttgcaaaccccagggatggaaaaaccctaagaatgcacaattgtgagcatttaacaaccatcacaactgtggctgaagactgttcatgccgttcttctgaaatgagatctcaaagcagtatagttcaaaaccaaaggttttaaccaaaaattggcatatgcacgatttctccaccatttttgtgtgtcaaccatttagttaacttttccacttgaaaaaatgctatagaaaccggaccagtt

SEQ ID NO: 63390 - DNA, 415 bp, Homo Sapiens
atcatggggtcctggaatagtaatcctcttttactctgttgggatgagtctttttttgtttctgtgcagagatggttactaacttcaccttccgttcctcttgctgtcatctgcattcgtgcttcccacctgttgttggcatgtcctttaccttctctttccctgccacatcaacctacacactgactcatcattgacgtggaagatgtggaagatgtcaagtttgtgatcaactatgactatccaaacagctcagaggattatgtgcaccgtattggccgaacagcccgtagcaccaacaagggtaccggctataccttcttcaccccaggtaacctaaaacaggccagagagcttatcaaagtgctggaagaggccaatcaggctatcaatccataactgatgcagcttgtgg

SEQ ID NO: 63391 - DNA, 503 bp, Homo Sapiens
agctcggtaccctctgcgacacctcattgatttgctggctgtacacaagcccaatgtgcgactttcccattaggcgcctcaccttcttgcggatgtcattcttatttaccttcatcagcagcatgtaggagatgaggttgtgcagaagtgtggccagcatctttgggcttttggagattgcccagacccactactatagtaaagaaccagacaagcggaagagaagtccaacagaaagtgtaaataccccagttggcaaggatcctggcctagctgggcggggggacccaaaggctatggcacaactgagagttccacaactgggacctcgggcaccaagtgccacaggaaagggtcctacggaactggacaccagaagtttaaaggaagaaaattttatagcatctattgagactgatcagactctgtcatcgcgtgagccactgttatatcccagctcagtcagattctaagtgataatactctgagaaccgtgactgaca

SEQ ID NO: 63392 - DNA, 254 bp, Homo Sapiens
ggagatttttgatttaatggggaattttaaggtgtcatggaaatacagattctttgttttggccactgaatggactctctcttcagtgggattatcaaggaacttcagatcaggtaaatctccactttgggaccttctatctgcctcccaactcctcaagctcacctatagaagcgagctaccataagacgtctcctaagcattttgctggcctagtgactcagggcagagtggccagacacctctcatccgag

SEQ ID NO: 63393 - DNA, 444 bp, Homo Sapiens
cattagcctgcttaatatttagacatttataggtagaattctgagcactcaactcatgtttggcattttaaagtaaaaacaagtgtgacttcgaggaccaaagaaattgtcagctatacatttatctttatgaactcatttatattcctttttaatgactcgttgttctaacatttcctagaagtgttcttataaaggtctaatgtatccacaggctgttgtcttattagtaaatgcaaagtaatgactttgtctgttttactctagtctttagtacttcaaaattaccttttcatatccatgatcttgagtccatttgggggatttttaagaatttgatgtatttcaatacactgttcaaaattaaattgtttaattttatgtatgagtatgtatgttcctgaagttggtcctatttaaattattaaactattgtaactttga

SEQ ID NO: 63394 - DNA, 759 bp, Homo Sapiens
gcggcggagtgcactggctcagagcgaacgtttcaatctaacctggaggttgaagcttcaccacaggcttcaagtgcagaggtaaatgcttctcctcctttggaatctgtcccatgtgaaaatggagcctcaagaaagtgaagaaggcaatgtctctgggcatggtgtgctgggcagtgatgtcttcgaggagcctatgtcaggcatgagtgaagctgggattcctcagagccctgatgactcagatagcagctatggttcccactccactgacagcctcatggggtcctcccctgttttcaaccagcgctgcaagaagaggatgaggaaaatataaaaggaaaagagggagatgttttgtccagacctactagacccaacagaaaaggtttttgtattagaatctgtttccttaaaaattgatttgactcctgttcttaaacacaagtggtttttcctaattccagaggaactggacgtcaccaaacaaggttgcattttacttttgcatccagtttttatagttttccacaaccaagccacccttcacagataaaatatgatgctggcatggcaatcagaccaaagcactgtccccaattgttgtcttaactatgactagacatgttatacagccatttatcttgtacaactgagaagaatcatactttgacctaccttgtagagatgtgaggatttagatgtttgctaacttcaaaactgtgcttgaatagactaataatatatgctcatatcaga

SEQ ID NO: 63395 - DNA, 887 bp, Homo Sapiens
ggtctagaaggatccccatacgatgctcgacaacagacaacagctactgaggaaaaggcacataggaaatgacatcgtcaccatcgtcttccaggagcctggggcacttccttttactccaaaaagcatccggtctcactttcagcatgtctttgtcatagtcaaagtgcataatccatgtaccgaaaatgtgtgttatagtgttggagtttccagatcaaaagatgtgccaccatttggcccaccgattcccaaaggtgtaacttttccaaagtcagccgtgttccgggacttccttttagccaaagtaatcaatgcagaaaatgcagcccataaatcagaaaagtttcgagcaatggccactcgaacgaggcaggagtacttgaaagatctggcggagaactttgtcacaaccgccaccgtggatacctctgtgaagttcagcttcattacgctgggtgcgaagaaaaaggagaaggtaaagccaaggaaggatgcccacttgtttagcattggggccatcatgtggcacgtgatagcccgggacttcggccagtctgctgacattgaatgtcttctcgggatctccaatgagttcatcatgttgattgaaaaggattccaagaatgttgtattcaactgttcctgcagggatgtgattgggtggacatctggattagtgagtatcaaagtgttttacgaaagaggagaatgtgtcctcctgtcctcggtagacaactgtgctgaagacatcagggaaattgttcagcgattagtaatagtgacgagaggctgcgagactgtggaaatgaccctgaggaggaacgggctgggccagcttggcttccatgtgaattttgaaggaattgtaagcactcgtaggggac

SEQ ID NO: 63396 - DNA, 338 bp, Homo Sapiens
cagtatctctctggccattggggtctttctgttcccagccttcctcacagcctctgcctatgtgctgatgatcagaatgctgcgatcttctgccatggatgaaaactcagagcagagaaggaagagggccatcaaactcattgtcactgtcctggccatgtacctgatctgcttcactcctagtaaccttctgcttgtggtgcattattttctgagttaacgagccagggccagagccatgtctatgccctgtacgttgtagccctctgcctctctacccttaacagctgcatcgacccctttgtctattactttgtttcacatagttcagcgtctga

SEQ ID NO: 63397 - DNA, 977 bp, Homo Sapiens
ctctcccgccccggggaggttttgattttagtggcttcttcctttattttccgtcgtgtgcggatttcgctgcagagcgaacttgcggctcgtccgagtacatgtgaagcggtaatcgcccctgcagctggttatcctgacattatgcactccgaagcagaagaatccaaggaagtggccacagatgtctttaattccaaaaacctggccgttcaggcacaaaagaagatcttgggtaaaatggtgtccaaatccatcgccaccaccttaatagacgacacaagtagtgaggtgctggatgagctctacagagtgaccagggagtacacccaaaacaagaaggaggcagagaagatcatcaagaacctcatcaagacagtcatcaagctggccattctttataggaataatcagtttaatcaagatgagctagcattgatggagaaatttaagaagaaagttcatcagcttgctatgaccgtggtcagtttccatcaggtggattatacctttgaccggaatgtgttatccaggctgttaaatgaatgcaggagagatgctgcaccaaatcattcagcgccacctcactgccaagtcacatggacgggttaataatgtgtttgatcatttttcagattgtgaattttggctgccttgtataaatccttttgggaattttaaaccccacttacaaaaacttatgtgatggtttcaacaaaatgttggatgaagagaacatatgagcacatgagttaagattgtgactgatcatgatttatttgaagatggagcactgctgatttatgaagggaaacaagaagaatttgtctaaagattacacatatttcagaaagactttacccaattcagattgtcagacaataattgattgattgaaggcttgtttattgaagaaaagcatattgccaaaaattctgggtaaaaagctcctaacgggtaacagacatgggagaaat

SEQ ID NO: 63398 - DNA, 532 bp, Homo Sapiens
ggaaaacaactacggctgcggtgtggttggtggtgagatgacgaccttagtgctggataatggagcttacaacgccaaaatcggttacagccatgaaaatgtgtcggttattcctaattgtcagttccggtcaaaaacagcacgtcttaaaacttttactgccaaccagatagatgaaataaaagacccttctggactcttttacatcctcccttttcaaaagggctacttggtgaattgggatgttcagagacaagtttgggattacctttttggaaaagaaatgtatcaggttgattttttagatactaatattattatcactgaaccatactttaacttcacttcaattcaagaatcaatgaatgaaattctatttgaagaataccagtttcaagcagtattaagagtaaatgctggggctctcagtgcacataggtatttccgagataatccttccgaattatgctgtatcattgttgatagtggatattcctttacacatatagttcagcgtctgacgtcagacgct

SEQ ID NO: 63399 - DNA, 565 bp, Homo Sapiens
aatacgcactgactttcccatcttcatcaagaagaaattctggggaggtatgttgggaaagactataaggagcagaaggggctctggcaccacttcactgatgtggagcggcagatgaccgcacagcactatgtgacagaatttaacaagagactctatgaacaaaacattcccacccagatattctacatcccatccacaatactactgattttagaggacaagacaataaagggatgtatcagtgtggagccttacatactgggagaatttgtaaaattgtcaaataacacgaaagtggtgaaaacagaatacaaagacacagaatatggcttggcctatggccatttttcttatgagttttctaatcatagagatgttgtggtcgatttacaaggttgggtaaccggtaatggaaaaggactcatctacctcacagatccccagattcactccgttgatcagaaagttttcactaccaattttggaaagagaggaattttttacttctttaataaccagcatgtggaatgtaatgaaatctgccatcgtctttctttgactg

SEQ ID NO: 63400 - DNA, 872 bp, Homo Sapiens
acgagcatgaggtgcgcctgtctccgcacgtgttgggccacagcaaggcgcacgtgagccggatcgtgggcgagctggtgcgggctggccgcgcccgggggtcccccggtctcattcctgggggagcgctggccttggccttccgcggagacttcatccaggtgggcagcgcctacgagcaacataaaatccgccggcccgacagcttcgacgtgctggtgccactgcgcctcccgccgcttgtggcgctggagccacggagcctgggcgaggagccagcgctggccccggccttccgcggctgcttcttgtgcgccctcaaggcaccaccctcaccatcgggggcctcggggggccactggcttcgggactgcaaaccctttgctgatgccttctgcgtggatgtgcgcgggcggcgtcacctctctgctactctggtgctgcgctggttccagtcgcatctgcagcgctccttggccactgtgcgttacagcctggaggggcgctgtcgggtcaccttgaccccaggtggcctggaacagccccccaccttacacatcttgccctgccgcactgactacggctgctgccgcctttctatggctgtgcgtctcatccccgctgtccatctgggagatggggtcttccttgtggcgccaccaccgccacccttgcccagcgcgcccctgttggagctccctgagggcctgcgtgcggaggcactgtggggtgtgaacacagcacgccaggagcagaagctgctgagttggctgcaggaacgggcagctccaggtgcctgctacctcaagtgcctgcagttgcttaaggctctgcgcgatctgggggcccgtgggctggactcagcggccgct

SEQ ID NO: 63401 - DNA, 646 bp, Homo Sapiens
gataataactccagctaaaagtgtttggtgttcttatctccaccctctttcctactttgcttaccctcatcctcagacagatgcctcttgcttttaaaagttggatttaacgacgtgttgtagggttcttggtctgtgtgaaggcagagaccagagagaaggaagtgagcccactgctctcctgggagcaatgtgggtgagtccaccagaggccctgctgtgtgtggccaataaattttagtcttccccagccctcgaggcagtgtgtgtggatgtatgcgtgtggatatttatatatgtaccctgcactcatgaatgtatgaactggaggaagttactacagtggaagggttcttaataacaaggtctacctagcatgaagtatttaacattctcccatcccttaaaaaatatacatttttataaaatgaaaaccataataaatgttttgaatattaaaaaaaataataacctacagaggaaaattaatggagacagctatttgccttgtactttttccacagttgttgctgctagttgtacacatctctagttcagctcttgcccacgggacactcatcaattacggttttatttttatttctttcctctacccccagccatatcagggagatcctctagacca

SEQ ID NO: 63402 - DNA, 574 bp, Homo Sapiens
tatatgctcgtacccgtcagacgctgaactatgtgttccagtaactctggttccagttcagatgcctgacactccgagtgacctagtgcgtcatactaccacactcccaccatcttctcatgagattctgtcaccacagccacagtcaactgattatccacgagcagcggatttagcttttctggaaaaatatactcttactcctcaacctgcaaatatagttcacccagttcgacctgaacagatgctagatcctagagaacaatcttatcttggaacattactgggccttgatagcactactggtgttcaaaatatttctacgaatgagcatcattcatgagtaaatctaaacattccacagatttttggatggttatatgctaatggtagagatgatagcttttaaatttgtggggctgctattttcttgttttctctagtttctcaagtcctcagaacagtttcaaatcaagaaaactatgtgtctctgtttaccgaacatgaatatttggacaaaatttctggcataatatttgaagtgcacatagttcagcgtctgacgggtaccgag

SEQ ID NO: 63403 - DNA, 639 bp, Homo Sapiens
gtgacccctcagagtagctctgagctcagaccaaccaccacggctggcctggcctctggtgtggaagccaagaaaggtattgaacttatccctcaagtaaggatagaagacttaaagcagatgaaggcttacttgaagcatttaaagaaacagcagaaggagctaaattctttaaagaagaaacatgcaaaggaacacagtaccatgcagaagttacactgcacgcaagttgacaaaattgtggcacagtatgacaaagagaagtcgactcatgagaaaatcctagagaaggcaatgaagaagaaggggggaagtaattgtctcgaaatgtaaaaagaaacagaaatcaaaattcagacgctgacatcagatcacaaatctaaggtcaaagagattgtagcacagcacacaaaggaatggtcagaaatgatcaatacccacagtgctgaggagcaagaaatccgagacctgcacctcagccagcagtgtgagctgctgaaaaagctactctatcaatgcccacgagcagcaaacccagcagctgaaactgtcccatgacagggaaagcaaggaaatgcgagcacaccaggctaagatttctatggaaaatagcaaagccatcagccagaatattcaggg

SEQ ID NO: 63404 - DNA, 1186 bp, Homo Sapiens
  misc_feature (1166)..(1166): n is a, c, g, or t
tcaacctctcccaggtgcattaagaaataagaattcccagggttactcacccatgcgtaagctacccaagtttaatttggtagctgaaatatctttttgcctcagacagctcttgaattgctcatacagaacaattctgctggtgctggagtctgaagaatattttcatttgcattttagtggttagggagtggatataagattaatggaatgtatatttttatataagacgtatacggcaccttcttgaaaaggaagcatttgaacttgttcctccctatagttctattgccttatatgcaaaattgtaccctgttgctcagagaaattattcataagagaaaagaattccaattaattaaatatcacaatagcatcccagagagacagtaggaaatttctccttagtgagagctgagtccttgagaagttaagagactgtttcctgcttcccaccccaccccgttttttgtccctccgtttgatcacctccctgttgagtatggaatgtcccagtttaatataaaacatacagtttattccacacagcagttggactttgtaaaagtttagcaaaataactgattgttttggataactcaacatgtttttcttaaatgctgttttagtattttctacctcttaataagcaccatattttagatcttgtataaaaagttgccatctgccttatagacaaatgtagagaattgatgttcttgctttgtgttgtgttctggtaaagctttaagtgagtgtcttacccctttcctatactttcttgttatccatatcattcttttgtgagttttgcagcagtcttgaataatacagattataactactgaaaggggaaccttcgtctttttaaatgtgttatttcacattacaataatatgtgtagtagttgaattgtgttatcaaagcatgtccaacttctgtccagatgacattaaaaccaaagcctaattgttaagcctcttattctaaagtccatagcaatgctatggaatatcaagtataatgatgtagtaaaaagatttctccagaaaacactttgagatactttaaagaattccagagcatatcgaatgttatgaaatgaagaagtaaaattaattaccgggaaaaagaatgccttggatttttcccttggccccacccanataaaccacggttgggacac

SEQ ID NO: 63405 - DNA, 1084 bp, Homo Sapiens
  misc_feature (45)..(45): n is a, c, g, or t
ggcggcagctgcatgctgcggtcgactctaagatccccctcaagnctttatacttccagatcattttattggtgacttcactttgggctcaaggactgtgtgaaccaacaaggggccagttttccattgtgtggtgaactgtcaagtgcaattcgcaataagttatcatgaaaagtttttagattacacgatcgcatatgctgcatttcacgttttattggacattttaccccactgagtggtaaaaaggacagaggctacagatggagttgctttgtttatgaaagtattttggtttgttttctttcatttaattgcctcatatttaaaaaccatgggtccactgttaaaaccacatgtgtatgtgcagctttacattttattttacgtgaagcatgtgattaggaaaactcattttcttttcaagcctcaggacctacctgaagagaagttttcttgtagctcaagttgtgcatgaattactgaatattttactgtgcttttcttcatgaagggtacatgctttgtactcttcactgaaagctgaaaacatttcttgttaccctcttttgtgcctttttattttgccaaccgtgtttatagaacggacattactaatgacattttgcagattaaaaacattcatttgaacacagtagttccctagaaaaacaactctacaaaaattttgcagccttattgattataattttgatgaaattaacacaaaatcagtcaagaaggaaacatgtatattagtgaagtgtttttggagactgtttgaatgtgaccaaatgtggttctagttgacttcttttcactttggcttatatcaattcttgagagttaatgtgatcatgatattgcaaacaactataaatggtctctaggccttactttgtgattatacgttatctccggctagaaaaaaataatggtagtaaagaaactgacaaacctgaaaataagaaaacaaaaatccaatgccctataatacccttaatgcccagtttgggtatagaagtcccaacttttaaaaaccatgaatttgcctcgaacaaaagtttcttatttccaagtaggg

SEQ ID NO: 63406 - DNA, 1163 bp, Homo Sapiens
  misc_feature (347)..(407): n is a, c, g, or t
  misc_feature (449)..(467): n is a, c, g, or t
  misc_feature (630)..(666): n is a, c, g, or t
gcatgtaactctaagttttactcctaacatacatatgtttggggaagtattctattctatacttgccaatgtggagaacaaaatagttttttaagaatgaagaagtatatatatccattctgtattttacgtgcagcagaattatcttccgtaggatttttttgtgtattcacaaggtgatatttgtattgtaaaacaataatggtgaaggaaataaaaaggcttttaaaattttgtttgttttaaatctttgtaaagttattattccagagagtatactggtatcttacagcttacctagatcataaattaatcaaaatgcactttttaataaaaactgatacttnnnnnnnnnnnnnnnnnnnnnnnnnnnnnnnnnnnnnnnnnnnnnnnnnnnnnnnnnnnnncacacctaacacacataaaaccacacaatccttccaattttnnnnnnnnnnnnnnnnnnnccttgtggggcccccccgccccccccaaaaaattttcctaaaaccttccttttggggggcggggcgccccacagtgtattggaaccttgggctcaatactggtttcccaaagaaaaaaccctgggcacataaaccaaggggttggggatattttaacaaattnnnnnnnnnnnnnnnnnnnnnnnnnnnnnnnnnnnnntaaacacattttcccaaatggggagttcttgcggaggccattcaccgggggtctctccacacacaagggcgcggcccccccagtggggactcctctatacttcccaaattatagccccccccgccgtcgtgcccccctctttttttaaaacatcgtgttctattacacccccctattaagactttttcttccgcccgcaattgggcgcatatccctctcacacaaaacgcggggatttgtataacaaccctcgaaacctcctccccaatggtgcaacatcacacacacctttctggctcgctcctgttgcgcaaaatataactattttctcccacccccgtgggaacgacacaaccgcgggggcggcacacaaaaaatattttgctcccccatcacttctgccgccccaccgctacttataatcacacaaaaaaccgggcgcggaataaacctaccccctccgcgtggcacatctggttggtttctaatacaacaaa

SEQ ID NO: 63407 - DNA, 1243 bp, Homo Sapiens
  misc_feature (1072)..(1080): n is a, c, g, or t
cagccttcagacaaggagatgttcagccgttcagttactagcctggcaacagatgctcctgccagcagtgagcagaatggggcactcaccaatggggacattctttcagaggacagtactctgacctgcatgcagcattacgaggaagtccagacatcggcttcggatctgctggattcccaggacagcacagggaaaccaaaatgtcatcagagtcgggagctgcccagaatccctcccgagagcgcagtggataccatgctcacggcgagaagtgtggacggggaccaggggctggggatggaagggccctatgaagtgctcaaggacagctcctcccaaaaaaacatggcggaggactgcctgcatgaaactgtgaaagagatcaaggaggtggctgcagctgcacccctggagaaccgcctcagtggcaaggcaaaatctacttctgcctcgaaagagctcccagggccccaacactgaacgcaaagctgaagctcgcttgaccatgccctcggtggcacacaacataaaaaaatgttcgccaaaagcgtcaaatggagaccacttatccctttggaaaattccttgctgcatcccaggaaagaaggaaggcccccttaccaaccttgtccccccgcgtttaacccctttcttgggaaccaagacatggtaaaaatccccttcaagggaacacaccgggaatgcggcgcggccaataatggcccgccaaaacccacacattttgtccctaccaccaacccaccggaacctctaggttggtgtaaaacccctaccgcgccgacataacgtaaatctcacacccccctccccttttggcttccgcctcacccacagttttcccccgccgcgccacccatatataatacctccccggattttgttttcggcgggcgaacaggaaaatgcagaatcctctccccgccccttacatgggagccctccatttttccgcgacaaaattaaaaaaccgccctgcgggtaacgccccccagacgcatcatataataattcaggcgggcgcacgcttccgaactacctcccagggggnnnnnnnnngaaatgacacccaacacctctacccaccccctccccactatttcatatggtgggtactaaacacaccacgaaaaggggccccttccccgcggactcggcgataggaaaagagggaaatccaaccaccgtcgccacacttcgtgttctcacacctcctccctcg

SEQ ID NO: 63408 - DNA, 391 bp, Homo Sapiens
gatgatggatgccattccttttgcccagttaaatgttcaccaatcattttaactaaatactcagacttagaagtcagatgcttcatgtcacagcatttagtttgttcaacagttgtttcttcagcttcctttgtccagtggaaaaacatgatttactggtctgacaagccaaaaatgttatatctgatattaaatacttaatgctgatttgaagagatagctgaaaccaaggctgaagactgttttactttcagtattttcttttcctcctagtgctatcattagtcacataatgaccttgattttattttaggagcttataaggcatgagacaatttccatataaatatattaattattgccacatactctaatatagattttggtggat

SEQ ID NO: 63409 - DNA, 621 bp, Homo Sapiens
cagagatctgcatggcgattcactacggatatgtgcagcaatggcccactgtcacattagtgacacagcacatggcgcacagtgtgggatagacacctatgagattgcaccgctggagccagactgcccgccaagatgcctgtgaggcttcctttgacgcggtctccaccatccgaggcgagctctttttcttcaaagcgggctttgtgtggcgcctccgtgggggccagctgcagcccggctacccagcattggcctctcgccactggcagggactgcccagccctgtggacgctgccttcgaggatgcccagggccacatttggttcttccaaggtgctcagtactgggtgtacgacggtgaaaagccagtcctgggccccgcacccctcaccgagctgggcctggtgaggttcccggtccatgctgccttggtctggggtcccgagaagaacaagatctacttcttccgaggcagggactactggcgtttccaccccagcacccggcgtgtagacagtcccgtgctcccgcagggccactgactggagaggggtgccctctgagatcgacgctgccttccaggatgctgatgctatgcctacttcctgcgcggccgct

SEQ ID NO: 63410 - DNA, 976 bp, Homo Sapiens
tatttattgtttgacctttttacctatgtttccacctaaaaatacgactataaacctataccacgtagaactcagattggctgaaaaacactttccacctggtagatggcccatatgcctcaattatgtggtccatttaggagcaggagtcagaagagagacctcttattggctgctggtgggtaactgcatggacagaggaaaagggaaggcaggactttgctgcagagctgtgggatgaatgtagttcttccctgggcagcctgggagtgggaaggtcagaatgactcatgttgccttcaggatcaagccatccaggatttagggacaacccaagaggtctttagtcctctggcataatttagacatgttttggaagagcatgagttccatatctgagatgagatttaagactttcagtgcagatagtacaagccatttcttcagggttcctctgggggcagctccttcatgaggtcccacctccggggaggggcacagggctccagatagtaagcacttaaggcaaacagtggatggcaccaacttttaaaggtgactctattaatggcttcacctctaaattatatttttacagatatgcacctatgcaacttaacgtggctcttctaagcaggtgaggacttcctcctcaatgctctctataaaaattatttgtgttctatatagtgagttttaccagtaaatgtggcttaatattttaattcttagaatgtgtcttctctacgtgatgtgactaaattctgttttgtttgtggaatgactagcacaggccgactccctctctccctcacttaacaaaagaccaatgagctgttaatcgagctgttatctccatggtattacttgctaaatgcactgatttcataagtatgtggaatccttttccttttgaatctgtatatcatatataagactgaatctacttaataaacactgaacaacaaaccgaaaa

SEQ ID NO: 63411 - DNA, 552 bp, Homo Sapiens
  misc_feature (14)..(14): n is a, c, g, or t
  misc_feature (30)..(31): n is a, c, g, or t
  misc_feature (48)..(49): n is a, c, g, or t
ccaaagtcttctcncttgcatggtgagaannaacaagaataaacctannctcccaagcaccaacgctcctccgcttaagagatcctcctccaccgccacctgaaagacctccaccaatcccaccagacaatagactgagtagacacatccatcatgtggaaagcgtgccttccagagacccgccaatgcctcttgaagcatggtgccctcgggatgtgtttgggactaatcagcttgtgggatgtcgactcctaggggagggctctccaaaacctggaatcacagcgagttcaaatgtcaatggaaggcacagtagagtgggctctgacccagtgcttatgcggaaacacagacgccatgatttgcctttagaaggagctaaggtcttttccaatggtcaccttggaagtgaagaatatgatgttcctccccggctttctcctcctcctccagttaccaccctcctccctagcataaagtgtactggtccgttagcaaattctctttcagagaaaacaagagacccagtagaggtaggtatgatgaaggacg

SEQ ID NO: 63412 - DNA, 871 bp, Homo Sapiens
ggtggagcctaaagagaaaccgaggtgcaaattcatttcatggtgactgacccttgagcttaaacagaagcagcaaatgaaagaaccggacaaataaggaagggcacaagcctacccgactctatttacagtctgtaactttccactcttcctgtagtcccgaggcccctgggtccttctagcttttctctttcccatccttggggccttgtgtgatgatgggcgtggggctgccgatgggaaagacgggggttgttaggcttttctgcctgctcctgcttaaacacaagaaggaatcctggatcttgccctctccttagctcttagtctctttggtaggagttttgttccagaggagctctcccccttggatttgaacttgctctttttgttgttgttgttctttctcttctttttcttacctcccactaaaggggttccaaattatcctggtctttttctaccttgctgcgcttctatcccgtcctcacctcccctctgattgttcctttccccataactgggggcccgatttgttcccccagcccgcccaattttggatcccttcccccccttttggcccaaatttctacggcggaagtaaaccctatttatgccacccactatatggtttaatccataattaaaccttccttgccgggttcctaaaccgccctataatgcccctgcaggaaaaaaccccaagggccattttcccttcccgaccaaacaacccctttgacttgcttgaaaaaggccaagcttcccttggaaaaaacgggccctgcctccttccaagaaaacgccctttcatttttgccaactgggttatcacggcaatccccacccgggggataagtcccaacccccc

SEQ ID NO: 63413 - DNA, 1500 bp, Homo Sapiens
gatgacgtcacgctcggcgtctcggccatcttagctgtagatagaggcggcaacctcggaagtgcggagcgggtgggcctatatagatgttgaggtgcggaggccgtgggcttttgttgggcctggctgtagccgcagcagcggtaatggcagcacggcttatgggctggtggggtccccgcgctggctttcgccttttcataccggaggagctgtctcgctaccgcggcggcccaggggacccgggcctgtacttggcgttgctcggccgtgtctacgatgtgtcctccggccggaggcactacgagcctgggtcccactatagcggcttcgcaggccgagacgcatccagagctttcgtgaccggggactgttctgaagcaggcctcgtggatgacgtatccgacctgtcagccgctgagatgctgacacttcacaattggctttcattctatgagaagaattatgtgtgtgcttgggagggtgacagggcggttcctacggagaggatgggctgcccaccccggcactgacccaggtagaagctgcgatcaccagaggcttggaggccaacaaactacagctgcaagagaagcagacattcccgccgtgcaaacgcggagtggagctcagccaggggcagccggctctggtgctccctagaagagtggtaggtgtgagcagagactggacttggcgtccccaggaagctgtataagccaggtgctaaggagccccgctgcgtgtgtgtgagaaccaccggcccccctagtggccagatgccggacaaccctccacacagaaatcgtggggacctggaccacccaaacttggcagagtacacaggctgcccaccgctagccatcacatgctcctttccactctaagccgtagcctcttctgttaataacacacagagagctctgccaagcacctgagtaggcccttgacacttgtgtgccctgggatgcctcctggcgcgaatcaggaggttctggaaggactctggctatattctgcaaatgtggctcatgccccttaccgtggctcggcgttgtggtgcctgagggacagccggccacctgcccagtactggtcagcttttcaacactattccctttgacctactggccatcttcctcacagccctcagatatcaacgggcacaaataagaccaactcaatttccacttgaatttacaaccaaaagcctgctgagttgattacagctgggccaatacagtacgaggcaataacaaattagtgtgggttgattctggaattggaaaagcttttgcttgtatggatacagcaaatccagatgtctctgaacaaagcaacaatttaaagcaacgacattttctgtcctttaagcacttaaaatcaggtgtggtgtgttttcaaaggcagaagtctgcattttgagcaaaaggtggcttcccagctctaacaaggtaactggttagcatgacattaaagcttgggcaaggcttcaaactt

SEQ ID NO: 63414 - DNA, 500 bp, Homo Sapiens
gcgacagcatgaaggctccgggtcggctcgtgctcatcatcctgtgctccgtggtcttctctgccgtctacatcctcctgtgctgctgggccggcctgcccctctgcctggccacctgcctggaccaccacttccccacaggctccaggcccactgtgccgggacccctgcacttcagtggatatagcagtgtgccagatgggaagccgctggtccgcgagccctgccgcagctgtgccgtggtgtccagctccggccaaatgctgggctcaggcctgggtgctgagatcgacagtgccgagtgcgtgttccgcatgaaccaggcgcccaccgtgggctttgaggcggatgtgggccagcgcagcaccctgcgtgtcgtctcacacacaagcgtgccgctgctgctgcgcaactattcacactacttccagaaggcccgagacacgctctacatggtgtggggccagggcaggcacatggaccgggtgctcggcggccgc

SEQ ID NO: 63415 - DNA, 1451 bp, Homo Sapiens
  misc_feature (52)..(65): n is a, c, g, or t
  misc_feature (159)..(274): n is a, c, g, or t
  misc_feature (966)..(1089): n is a, c, g, or t
  misc_feature (1096)..(1109): n is a, c, g, or t
  misc_feature (1135)..(1144): n is a, c, g, or t
  misc_feature (1148)..(1229): n is a, c, g, or t
  misc_feature (1244)..(1304): n is a, c, g, or t
  misc_feature (1330)..(1339): n is a, c, g, or t
ggggggctgatgtgggctagtaagactccagttcttagaggcgctgtagtannnnnnnnnnnnnngtctcatcctttggatacttcttttaagtgggagtctcaggcaactcaagtttagacccttactctttttgtttgttttttgaaacaggatctnnnnnnnnnnnnnnnnnnnnnnnnnnnnnnnnnnnnnnnnnnnnnnnnnnnnnnnnnnnnnnnnnnnnnnnnnnnnnnnnnnnnnnnnnnnnnnnnnnnnnnnnnnnnnnnnnnnntgagccacagctcccagcctaggcccttaatcttgctgttattttccatggactaaaggtctggtcatctgagctcacgctggctcacacagctctaggggcctgctcctctaactcacagtgggttttgtgaggctctgtggcccagagcagacctgcatatctgagcaaaaatagcaaaagcctctctcagcccactggcctgaatctacactggaagccaacttgctggcacccccgctccccaacccttcttgcctgggtaggagaggctaaagatcaccctaaatttactcatctctctagtgctgcctcacattgggcctcagcagctccccagcaccaattcacaggtcacccctctcttcttgcactgtccccaaacttgctgtcaattccgagatctaatctccccctacgctctgccaggaattctttcagacctcactagcacaagcccggttgctccttgtcaggagaatttgtagatcattctcacttcaaattcctggggctgatacttctctcatcttgcaccccaacctctgtaaatagatttaccgcatttacggctgcattctgtaagtgggcatggtctcctaatggaggagtgttcattgtataataagttattcacctgagtatgcaataaagatgtggtggccactctttcatggtggtggcagcagttnnnnnnnnnnnnnnnnnnnnnnnnnnnnnnnnnnnnnnnnnnnnnnnnnnnnnnnnnnnnnnnnnnnnnnnnnnnnnnnnnnnnnnnnnnnnnnnnnnnnnnnnnnnnnnnnnnnnnnnnnnnnttggggnnnnnnnnnnnnnnaaaaaattttttaaaacctttttttnnnnnnnnnncccnnnnnnnnnnnnnnnnnnnnnnnnnnnnnnnnnnnnnnnnnnnnnnnnnnnnnnnnnnnnnnnnnnnnnnnnnnnnnnnnnncccccgggggaaccnnnnnnnnnnnnnnnnnnnnnnnnnnnnnnnnnnnnnnnnnnnnnnnnnnnnnnnnnnnnncccaggggggcctaatttaaatttannnnnnnnnnggcccttattgggagaagggtggaattttttaaaactttccgccgactgggaaccctccccaacggggtgggagaacctgaatcccccggggaatccccaccttggccccct

SEQ ID NO: 63416 - DNA, 829 bp, Homo Sapiens
ggatgaatgtgtgattgctttgcatgactgcaatggagatgtcaacagagctatcaatgttcttctggaaggaaacccagacacgcattcctgggagatggtcgggaagaagaagggagtctcaggccagaaggatggtggccagacggaatccaatgaggaaggcaaagaaaatcgagaccgggacagagactatagtcggcgacgtggtgggccaccaagacgggggagaggtgccagccgtggacgagagtttcgaggtcaggaaaatggattggatggcaccaagagtggagggccttctggaagaggaacagaaagaggcagaaggggccgtggccgaggcagaggtggctctggtaggcgaggaggaaggttttctgctcaaggaatgggaacctttaacccagctgattatgcagagccagcctatactgatgataactatggcaatagcagcggctatacgtgggacaacactggccactttgaaccagatgatgggacgagtgagtgaccatttatcattcatttcttgtctctgggaatctaaggaaatagtttttttctgattatacttacattaaaacgtggaagaatagtgtttggttatggagatagggtgagaaagggctggcagttgtattactgtgtgtactgtttatgtaacgtgcatatgggcacattacacatgttatttcgcttaatgctgcttgatattgtatgaaataatcattatttatcatcacttttcagatgacaaaactaaggccgtaagagaggttataaatttgctagtatttgaactcagcattgtttgatcctgtag

SEQ ID NO: 63417 - DNA, 592 bp, Homo Sapiens
cacagcattcctacagttgttacagtgtgttttttaaatgaaagtaaacatggttacatttgaatctcttaaataagcagtcacttggctggacaggaagaaggtagatcctgtgtgtcctgttttctggtcatgtgtattgtacaagctagagagctgaatttctgagatacacattttcaaatcacatgcaagtgaagatgatggtctgtagaaattttcagtatatataatgtttaatgacatactaatttatcatctggctatttgggaaggaaggacacacatggattttgcacatttccaccatggtggctggtgtggcttgtggctatggggtgatcaccagtatcaccactttggaaggggacagtgaaattggggctagagaaggaactttgtacagttttccctgagattcagattgactgaaaagtcacatgaagagttgattgtcttttaatggtatgttttaaacagctgacattttaaattttgatgaaatccagtttattcgtttgttcttttatgctttgggtgttgcatccgagaaatcttttcccatcccagaatatacagggagatcctgcag

SEQ ID NO: 63418 - DNA, 382 bp, Homo Sapiens
tgctgatgaacatcgtacatatctacttcattagagcagaggctatttttctgcattcttgtccctattacagggatgcttaattttttgtttaacttagagttttaaattgccaaacatgggaacagccttgaataggataaattttcagagggctgcctaaaatattttatttctagcatcctgattctggacttttcattataattctgagcaggaaatttataagaaattgaaagagcagaagaattacagccctgtcacatgtgcccagcactccgccccatgccttgctaaatgtagataaagaacttgttgaatgctaaggctgaaatcccaacctgagatttgtagtccaggatacaccagaatatcagggtcg

SEQ ID NO: 63419 - DNA, 790 bp, Homo Sapiens
gatttccgggatatcgtcgacccacgcgtccgggacaccgacacgctgacacaggtcaaggcacaagatcctggaggccttctgcaagaatgtgcctactcccagtggccgcgtgcagagagacggtcgacacttgagctggttcgcctccagcacacagagctacatccttcgggacctggacgacacctcagtggtggaagacggccgccagaagcttaacacgctggcccattacaagatccctgcaagcgtgcgctcacctgcgccactgacgtctcatagacaagaaggacaacacactgggccgagtgaaagacttggacacagagaagtatttccatttggtgctgcctacggacgagctggcggagcccaagaagtctcaccggcagagccatcgcaagaaggtgctcccggaaatctacctgacccgcctgctctccaccaagggcacgttgcagaagtttctggatgacctgttcaaggccattctgtagtatccgtgaagacaagcccccactggctgtcaagtactttttcgacttcctggaggagcaggctgagaagaggggaatctccgaccccgacaccctacacatctggaagaccaacagccttcctctccggttctgggtgacatcctgcagaacccccagtttgtctttgacatcgacaagacagaccacatcgacgcctgcctttcagtcatcgcgcaggccttcatctacgcctgctccatctcctgacctgcagaatgcgcaaggattcgccaacctactcctccgct

SEQ ID NO: 63420 - DNA, 1182 bp, Homo Sapiens
  misc_feature (225)..(225): n is a, c, g, or t
gcgactgcagtacctcaatgcactcctggctacccgagcccagaacctgccacagtcccctgagaacaccgacctgcaggttattccaggcagccagaccaggctccttggtgagaagaccaccacagcggcagggtccagccacagcaggcccggcgtcccggtggaaggcagccctgggcggaacccaggcgtttaacggctcactaggcagccccagatctngggaacagatgagcacgtggggagctggagtgagctgagcagaagttttgtgcccgcctgcccccatcccctccaggccacgttttagatggcccttgtagttgcgggtcctgggtgtcctcagaactagacatcaatgcctggatccttcagccggccctgccctcctttaggagacaggagtcaccagggcacagccttccagggccgcctcaggaaggaatgaaaggaatgccatcatctctagttcccagggcccagccttccccttctcccccggggcagggacagtgcggcatattcagattcagacctctttgggctgagccaccttgtgagtgcagttactgcctttgtgtggccgtgacctctatttgtttgcttttaatttgccaacctatcgctgctggcagcactttttgagcaagccgagagcacccattttggctgggggttcagatcgatggccttgtccatgttgtcctttctggcttccctgatggtgtcatgtttcagcgcatgcgccccagcctttcccatgtgccaaaccagaagctccactgcccgtaggctgtccctgtagccctgctccctccctggaggctgctcttctgattctgagagctggcctagtggtgctgagggcccctttctgcttctctgcccacctgctgagttgccactcgcagtgttgtcagttcccgtgttctgagaagaggtcatgcctgggaggaagggatcgtcatgctgcatcgaatcctctctccgccgtgtggcccccaggagagtagctgcctgttgcacctgctccacacctccccacagcctccctgcaggtgctgtgtggccgtgatgtgcagagagcagtgagggagggttcatgaaccaggtggatcctctttaaaaaaacaaagtttttggtatatctccgttacaatcacaagaactggcctttgg

SEQ ID NO: 63421 - DNA, 429 bp, Homo Sapiens
accaggagacttacatcgatgaccttggacacctccatgttatggacacggtctttcttattcagtacctgttcctgacttttccacggattgtcttcatgctgggctttgtcgtggttctgagcttcctcctgggtggctacctgttgtttgtcctgtatctggcggccaccaaccagactactaacgagtggtacagaggtgactgggcctggtgccagcgttgtccccttgtggcctggcctccgtcagcagagccccaagtccaccggaacattcactcccatgggcttcggagcaaccttcaagagatctttctacctgcctttccatgtcatgagaggaagaaacaagaatgacaagtgtatgactgcctttgagctgtagttcccgtttatttacacatgtggatcctcgttttccaaaaaa

SEQ ID NO: 63422 - DNA, 797 bp, Homo Sapiens
ctcgtttttcttctttccctcccggccgggggtctgatgaccacgcagtcaactgatcctcagtcgctttaagatcccgcacatttcagcacgattaagagaacagagaacttcggaagagcccaccaggaaacttgaagatgctgcagagagagaagctctgaagagccagatgagctgaacggttggtgccagcaaagacggagtcgttccagaatgccaccccaaccacacagtcaccgtgaccaccatcagtgacctggacctctcggggcccggctgctcggcctgaccccacctgagggagggtctggagacaggtctgaggaggaggcgtcatccacggagaaaccaaccaaagccttgcccaggaagtccagagaccccctgctctctcagcggatctcctccctcacagcatcactacatgcacacagccgcaaaaaggtcaagaggaaacatccccgacgggcccaggactccaaaaagcccccaagggcccctcgtaccagcaaggcccagcgccgccgtctcacaggcaaagcacggcacagcggggagtgagaccgagaacgaagcggtgccccagtctaggctgcggggacctgtccttgctcagcttggctgtccctgtagcccagcctgcacctaggtgtgcctaccgcatgttgccgctgctgtttctgctgggacgtctgactccagttccttctcccctctccagtgacaaggtcatttacaacttacatttacaatttatagtgtttaccagtattaaattctcagccactcctttc

SEQ ID NO: 63423 - DNA, 766 bp, Homo Sapiens
atcgcgaaattcggcacgaggccaggggctggtgctggtcaccgatgccatccctgccttggggctgggcaacggcgggcacacgctgggacagcaggaagtggaagtggacggtttgacggcttacgtggcaggcaccaagacgctgagtggcagcatagccccaatggacgtctgtgtccggcacttcctgcaggccacaggctgtagcatggagtcggccctggaggctgcatccctgcaccccgcccagttgctggggctggagaagagtaaggggaccctggactttggtgtgacgcagacttcgtggtgctcgacgactcccttcacgtccaggccacctacatctcgggtgagctggtgtggcaggcggacgcagctaggcagtgacaaggacctcggctgagaggacacctggccgcagcgggatgccatcagggccgggtggttggggagctggtctccagggagtgagtcgggagccctgctggattgatgcccaggtcctgtgcggccgccctggtaggcggtggctgggataaacgtgcacccagcaggactcgccttggctccgggttttgcttgtgctcacatgtggcaccatccttggttgccctcctggagaaggcattcacggcctggggtgggatggctgggctgtagtttagcctgggccttgggccccagtgggggacagggcctgtctgcatgaagtggaccggagacctgcagaccccaggaaagtgtcactaatgggagcgga

SEQ ID NO: 63424 - DNA, 524 bp, Homo Sapiens
tagaggatcacccttgatatttctggaaaggaacatgaaaaacaaaaacaagatgttggatttaatgctagaagctgtaaacaatattaaggatgccatgccaaaaatgcaaataggagcacctgtcaggcaaaacattgatgctggtgagagaccttgtttgcaaggatattatacagcagcagaattgaagcctgtccttgaccgtccacctcaggattcaaatgcacctggtgcttctggtaaagcattcaagacaaccaatttaagtgttgaagagcaaaaggaaaaggaacgtggggaagctaaacactgctttaatgctttcgcaagtgacaggatttctttgcaccgagatcttggaccagacactcgacctcctgaatgtattgaacaaaaatttaagcgctgccctcccctgcccaccaccagtgtcataatagtttttcataatgaagcgtggtccagttgcttaggaactgtccacagtgtgctctattcttcaactgcaatactgctgaagg

SEQ ID NO: 63425 - DNA, 845 bp, Homo Sapiens
  misc_feature (713)..(766): n is a, c, g, or t
  misc_feature (768)..(768): n is a, c, g, or t
ctcaagttaaaagtggagcagcacgtggagctgtaccagaaatacagcaacaattcctggcgatacctcagcaaccggctgctggcacccagcgactcgccagagtggttatcttttgatgtcaccggagttgtgcggcagtggttgagccgtggaggggaaattgagggctttcgccttagcgcccactgctcctgtgacagcagggataacacactgcaagtggacatcaacgggttcactaccggccgccgaggtgacctggccaccattcatggcatgaaccggcctttcctgcttctcatggccaccccgctggagagggcccagcatctgcaaagctcccggcaccgccgagccctggacaccaactattgcttcagctccacggagaagaactgctgcgtgcggcagctgtacattgacttccgcaaggacctcggctggaagtggatccacgagcccaagggctaccatgccaacttctgcctcgggccctgcccctacatttggagcctggacacgcagtacagcaaggtgcctggccctgtacaaccagcataaaccggggcgacttcggcggcgccgatgactgcgttgccgacaggcgactggagccagctgcccatcgtgtactacgtgggccagcaagcaccaaggtggagcagctgtccaacatgatcgtgcgctacctgcaagatgcagctgaggtnnnnnnnnnnnnnnnnnnnnnnnnnnnnnnnnnnnnnnnnnnnnnnnnnnnnnngntgccttgcccatgggggctgtatttaaggacacccgtgccccaagcccacctggggccccattaaagatggagagag

SEQ ID NO: 63426 - DNA, 960 bp, Homo Sapiens
ttgcttggggcattaatgcttgtgagtggggtcagctaaggttgctacttgccaatttgtgatttgtctaatcagcctgtgtgattggggctcattttgattctctgaattatcggtttgacggttacacttggctgctgggcccatccctggcccccggtgtggaaaaggctaaataaggtgacagtgcatcgatgctcccccgcgtggcctttggggcaggctggcatcccggtgcgcctctgcttcttaagctttcctgctgctcgctttgtttttaaaagtaacttgggttgcattcttccctctggactagagtagaaatgcaggggaaactgctgtggatttgagaggcaaagttggctcagctgtgtgcccagttcctcctgtgggcactttagcaggctccgagctttcctggcataggtcaatcaggtcccaggatgaataatccaggcttcagcacactcctctttcccagccacgcaaggctgtgaatttgaattctttgttggtatgtatgtgcagggagtactgttaggcacattcttaacccatgtggttggccagaaatcagaagtggggctgtgtctctgactggctagaggccaggccttgtgggtttctatctgctaagcacccagcaggtttggggcctgggactcagctctctctgcggtagaggcaggccctcctccacttcttggtactatacgaagatctcgacaccttgcagttttacttcatttcctgcccctttcagggcctgtgaggatgcccatgagctaccgctgtacagttctcggccccggctttcttccaagagttgaccaggaaccctaaagcatccagagtagactgcgctgccactgcgcgcatgctggtgcccgtcttcctcctaaggggccaggccacatccaattgggcctctgtacggggcgggcgcggtagtcccgaaag

SEQ ID NO: 63427 - DNA, 841 bp, Homo Sapiens
ctgttgtcataccacagcgtagtggtcttttccctccagagccagtgatgagtgtgggagcacttcagctctgtaaggggccagcgttctgacctttaaccacatgaactaacctgcgtcagcagttgcagaaagtagcctgttaggacagcagctgctaagcgttgcctggtattttagtggggagaaggctgggactcttcatggcatcaacacttgcatgctctgaatctttgatcagagatgaggtgccatttttggcatttccaccccgtctcgtggtagcctttaaaagtggtagaagatgctgccctaattccccgaggatgattgtcattccatgcagcataatgtgccgtgaggagttttctcattccagttctttggacttcgtaacattggaattgtttttccataatttccggcattccataaatatttgtcaaggacaaagacaaggactgtggatgtttattcttttcatatgaatgactttgtacacatggcttcctgctttcattatgaaggaggggaaactagttcccttgtatggtaactccaaagttaaaaaattgtgcatgtctgaggggttgaatatattttgtaaaactctaaatacatttgtatttctgtgctgttctaaagtttacctttttacttatatgaaagataactatatatttaaatcatgtaagtggaacacagtgtagggggtttttccaatcttatttttcatcaggttctcacacccacgtagtatgctgctcaaattttttcgtgtgtgcaaatgtgacactttgaacactttcagttagtattgagcctgcatatcttgggacgg

SEQ ID NO: 63428 - DNA, 625 bp, Homo Sapiens
aataagcgagacctaattgtttacacatctggcctaatgttccagatccttcaaagagtcatattgcccagtggtcacctcacactcctccaaggcacaattttaattcggaagatcaaatgtattcagatggcaatttcactgatgtaagtgttgtggaaatagaagcaaatgacaataagccttttccagaagatctgaaatcattggacctgttcaaaaaggaaaaaattaatactgaaggacacagcagtggtattggggggtcttcatgcatgtcatcttctaggccaagcatttctagcagtgatgtaaatgaatcttcacaatacacttcgagcactgtccagtattctaccgtggtacacagtggctacagacaccaagttccgtcagtccaagtcttctcaagatccgagtctacccagcccttgttagattcagaggagtggccagaagatctacaattagtagatcatgtagatggcggtgatggtatttttcccaggcaacagtacttcaaacagtactgcagtcagcatgaatccagtccagatatttcacattttgaaaggtcaaagcaagtttcatcagtcaatgaggaagatttcgttaactaaacaga

SEQ ID NO: 63429 - DNA, 1132 bp, Homo Sapiens
cactgtttagggggaaaatgtttcacttgtctaaggaaatccagttggaatttcaccgggaactggatgccgccgaaacagccagttagaattccggtaataataacagataatgcggcaattaaaccaggcactcctctttatgctggctcaactttcgtccaggaccagtatgtggatgtcacagaccgaatactatttggtaaaggtttttcaaggtgtcatgaaaagatgggggatttacaaggcccagcctgcctacgccatggtcaaacgaaaacccacaggagacctggagctgttgcaactggtgatattggcagagtctggcctggaactaaaatgcctggaaaaatgggaaacatatacaggacagaatatggactgaaagtgtggagaataaacacaaagcacaacataatctatgtaaatggctctgtacctggacataaaaattgcttagtaaaggtcaaagattctaaactgcctgcatataaggatctcggtaaaaatctaccattccctacatattttcctgatggagatgaagaggaactgccagaagatttgtatgatgaaaacgtgtgtcagcccggtgcgccttctattacatttgcctaacatctttggacgtggcagaaccttacatattctgtgagcttcgatgagccagagtgatatcataaccaccagaaatcatactctcctttcttagtcacaacaaaatcacacatgtcatctttgtcaagggcataaatatatcattcatacccccattaaattttgttagaaaaattaccacattaaatatatgagttaagtagattggatttgctgaaattggtgttgggcatattagcaaaatattcttaatttgtggactcgattcttttttactacatatttcccaagttatcttaagatgtctgtaaatttaacttttattaaagttttgtcaatctttgtgaaatagtggttgtggaacagtagaaaaccatatggggactatagtgcaacctatttgggtaaagaaaccatttgctaaaatggagaaagtaaatagatttttatttaaattacagaaacatgttaaaggccggacaaaggaaagacaataaaatcataaattatc

SEQ ID NO: 63430 - DNA, 765 bp, Homo Sapiens
  misc_feature (149)..(172): n is a, c, g, or t
  misc_feature (643)..(643): n is a, c, g, or t
ggtacttgacttcttaggatgggtagctgaaaagaccaccattttaagcatttgagaattcttaaatatgaaatttattcagaattgaagatggtgacctattcagagcctttttgtccttgtcaacagactgggacagtgtctgattnnnnnnnnnnnnnnnnnnnnnnnngccttgccacacacagctaatattctaatggtaaatttctctgtatcaggtggggaaatgtgctgaaggacagtatgtatcccttgcttcatttttaggtcgtaggtttggaatgtcttgtcccagttcttcaaacactcttaaatttttcttaagtaatgtaaaaatggaactgccaattttatttctcttgcaaaaatagtaaatacttgatgttacattattcccaggtttaatgaaagaacccaacttagtttttcagtgaatttgacacctattttttagtgatgaaatttttctttgagaactggcaaggatgcagtcagctgtttgcagtttttagcctgattttggggtctatagagattgctttattggatacttcaagtcattcttgcttgcacttcccctattgacacatgaaagctgtgttggtgttttattgtacatacttcagatgcacataggaantagaagtggtgttataaatctaggctttctttatgatgtttctgataatacgagaattgaaaactttaccttctcttgtacatagtcagactatttgtattaaatttacatttcattctaaa

SEQ ID NO: 63431 - DNA, 839 bp, Homo Sapiens
  misc_feature (56)..(69): n is a, c, g, or t
cccaccttgcgccctttaattccctttggattacagagcgagatcctgcctccgtnnnnnnnnnnnnnngaaagccacacttattcttttcagtaacctgctagtgcacaggctgtactttaggtacttaaaatatgcactagaataaatttgcaaggccctaaaatatcactgttatttttggagtaattcagtataggttcgtttaaaagagatttttataacttcagacatgcatcagtaggaaataacttgagaaattcatatggttatgttacaaattcatattctgttactacagtaaacgttaagagttttaaacagttaagattgtacaatttttcttcttttctatattacaagggccccagtgttaatgtcttagattttcagtatttgaacttatttttttaaattctgtcattgagataagaataattcaggtagcatctgaaattttaatgaatgtataattggcatatcatggaatattacccagaaagtatcagttcttaaaagttatgcctagaaattatgtaaagctaaactactggttagtcagtattcagtgttatattgtattaatttgttaacttctaaacttgaatttctataacattttaaagctaattgtagtttttgtgtaactttgtggccaactgattttgtaagtggtgctaggcattcataatttggtaaaagaaaaaatacacaactagtttatataaataaagactaatatgttgtcaacatgtattcatttcaggatattagtttagatgcccgtagggatagagctcttaaagttgacagcaagggtcggttgacagagttcattt

SEQ ID NO: 63432 - DNA, 1092 bp, Homo Sapiens
  misc_feature (89)..(89): n is a, c, g, or t
  misc_feature (114)..(114): n is a, c, g, or t
  misc_feature (253)..(253): n is a, c, g, or t
  misc_feature (263)..(276): n is a, c, g, or t
  misc_feature (1050)..(1050): n is a, c, g, or t
gaggggcatggcaagcacagggggccggcagctgcggtgagagtttactgtccccagagaaagtgcagctctggaaggcagccttgggnctggccctgcaaagcatgcagcccnttctgcctctagaccatttggcatcggctcctgtttccattgcctgccttagaaactggctggaagaagacaatgtgacctgacttaggcattttgtaattggaaagtcaagactgcagtatgtgcacatgcgcacgcnatgcaaccgnnnnnnnnnnnnnngtagtggagctttcctaacactagcagagattaatcactacattagacaacactcatctacagagaatatacactgttcttccctggataactgagaaacaagagaccattctctgtctaactgtgataaaaacaagctcaggactttattctatagagcaaacttgccgtggagggccatgctctccttggacccagttaactgcaaacgtgcattggagccctatttgctgccgctgccattctagtgacctttccacagagctgcgccttcctcacgtgtgtgaaaggttttccccttcagccctcaggtagatggaagctgcatctgcccacgatggcagtgcagtcatcatcttcaggatgtttcttcaggacttcctcagctgacaaggaattttggtccctgcctaggaccgggtcatctgcagaggacagagagatggtaagcagctgtatgaatgctgattttaaaaccaggtcatgggagaagagcctggagattctttcctgaacactgactgcacttaccagtctgattttatcgtcaaacaccaagccaggctagcatgctcatggcaatctgtttggggctgttttgttgtggcactagccaaacataaaggggcttaagtcagcctgcatacagaggatcggggagagaaggggcctgtgttctcagcctcctgagtacttaccagagtttaatttttttaaaaaaaatctgcactaaaatccccaaactgacaggtaaatgtagccctcagagctcanccaaggcagaatctaaatcacactattttcgagatcatgtat

SEQ ID NO: 63433 - DNA, 613 bp, Homo Sapiens
tcgatctgaagtgtgtcttacccattgccatgtttctcttgctaatgtctttcgtgtgtgcctttgcctcattgtctctttttgttcacaagagtggtctgtgtcttgtcttagacatatctctcatttttcattttgttgctatttctctttgctctcctagatgtggctcttctttcacgctttatttcatgtctcctttttgggtcacatgctgtgtgctttttgtccggtttcttgttctgtctaccgtctcctttctctgcctacctctcttttctctttgtgaactgtgattatttgttaccccttccccttctcgttcgttttaaatttcaccttttttgctgagtctggcctcctttctgctgtttctacttgtttatcgtcacagtttctcatgttctgcatttcctttctgcctctcttgggctattctctctctcctcccctgcgtgcctcagcatctcttgctgtttgtgattttctatttcagtattaatctctgttggcttgtatttgttctctgcttcttccctttctactcacctttgagtatttcagcctcttcatgaatctatctccctctctttgatgtcactgaatctctccc

SEQ ID NO: 63434 - DNA, 864 bp, Homo Sapiens
gcacgaggaaatacccacccctgcccgtggacaagctggaagaggaaattaaccggagaatggcagacgaccataagctcttcagggaggaattcaacgctctccctgcatgtcctatccaggccacctgtgaggctgcttccaaggaggaaaacaaggaaaaaaatcgatatgtaaacatcttgccttatgaccactctagagtccacctgacaccggttgaaggggttccagattctgattacatctatgcttcattcatcaacggctactaagaaaagaacaaattcattgctgcacaaggaccaaaagaagaaacggtgaatgatttctggcggatgatcttggaacaaaacacagccaccatcgtcatggttaccagacctgaaggagagaaaggagtgcaagtgctgcccagtactggccatgaccaaggcagctggagctatgggaatattcgggtgtctgtagaggatgtgactgtcctggtggactacacagtacggaagttctgcatccagcagtgtgggcgacatgaccaacagaaagccacagcgcctcatcactcagttccactttaccagctggccagactttggggtgccttttaccccgatcggcatgctcaagttcctcaagaaggtgaaggcctgtaaccctcagtatgcaggggccatcgtggtccactgcagtgcaggtgtagggcgtacaggtacctttgacgtcattgatgccatgctggacatgatgcatacagaacggaaggtggacgtgtatggctttgtgagccggatccgggcacagcgctgccagatggtgcaaaccgatatgcagtatgtcttcatataccaagcccttctggag

SEQ ID NO: 63435 - DNA, 529 bp, Homo Sapiens
tcccctgtgcattcctacgagcttcttaaggagaatgaaactattgcccggctgcaagccttggtcaagagaactggggtgagcctggaaaagttggaagtgcgtgaagaccccagcagcaataaggatctcaaagttcagtgtgatgaagaagaactcaggatttaccagctaaacattcagatccgggaagtttttgccaatcgtttcactcagatgtttgcagattatgaggtgtttgtcatccaacccagccaggataaggaatcctggtttacctacagggagcaaatgccaaactttgataaagcatcttttctgtcagatcagcctgagccctacctgcccttcctctcaagattcctggagacccagatgtttgcatctttcattgacaactaaataatgtgtcatgatgatgatgataaagatcctgtactccgggtatttgattcccgagttgacaagatcaggctgtagaatgttcggacacctactctccgtacatccatgtaccagaaagatccag

SEQ ID NO: 63436 - DNA, 1440 bp, Homo Sapiens
  misc_feature (587)..(598): n is a, c, g, or t
  misc_feature (779)..(779): n is a, c, g, or t
  misc_feature (807)..(807): n is a, c, g, or t
  misc_feature (1290)..(1298): n is a, c, g, or t
ttttgctcaaatatgctcatatgatcaatggatttactgcgttggcacttaccaagttggatattttggacatgtttacggaaatcaaagttggagttgcttacaagttagatggtgaaatcatacctcatatcccagcaaaccaagaagtcttaaataaagttgaagttcaatataagactctcccaggatggaacacagacatatcaaatgcaagggcgtttaaagaactacctgttaatgcacaaaactatgttcgatttattgaagatgagcttcaaattccagttaagtggattggtgttggtaaatccagagaatctatgattcaactcttttaatgattgccagtaatgcaagaaacactccttgagagggaggggaaaagactttcttaaatatttcatttatgacctgcaaattcaagaataaagacactgaagtaagtttgaagccctacagttgtttccagtcttttcagatggatgcctactgtggagattaactttggcatattccagtgtcagctttctttagctggaattgccaaatcatttgttgctcctgctgctctcatggtgccacgnnnnnnnnnnnncaatgtttagtaatagtataatccatgttgtttgatatcaaaagtagaattacttttaatgtagtttttcttcattattgtcattgcgtgttcttaagttttacccctattagatggtaagaacaattaatgcagttttgcacaaatatttttacattctggatcattcagttctgtcatntgtaatctttgttgttagaaacagatgnatgaaaacatagggggttctgtaaacttttgtaaatgctatgaattctgtttaaattttgggctgtctattttctgctgaaaccatgcaaaattgagctttggtggggctgggagggggttatgtattcatgggacctttaatttgtacagaacacagaacttatttctgtcagttatttaatacattgaaaatttagtgaaatgttcaaagagaatagatgtttcccaaaacaacaatctttatgttaaaaatagtcattaaaagatctgttgtaatatatggtggatatttttctttaatttcaaacattacctctgaaatgtgtatcttttcttttttatcttaccattaattttaaatctagtggattggttttcaacatcgtgcctgccgatatgcctacagaatcatctgtaagtgtcaaaatgaacccacgttgttagccataattttgattatgcctttatttctcctttcttgnnnnnnnnnggtgttattttgacaattaggcataacattgttttgtagattatcttttaatgaactattttaaatgttaaattaggtgccacttaattttattttattacaccatgaatagctgattaaaagaaccaaatatttctagtaa

SEQ ID NO: 63437 - DNA, 625 bp, Homo Sapiens
ctattctagagggtccccctggatatttctggagtgggatagggcccagactccatgggggaagttaaagggtatttccaagttaaggctaagactggcttttctaactaagagaatgtgctcatgcattgcttgtgtagtagaaactagtttttagaaaagaaagcaaacttaagaaacactgactcctgtggagatgacttggcaccactctcctttcacagagcagagtctgaatggtcttcagagataggcctgtgggccagattgccatcccctatggaccagaagccaaggatctctctagtgatggtcagagggcccaaatggcagggatacccagtgatgtcaggaggaatagtacagacagaaggtgctaagcagacaattcaactgccatgttttgccaccccctgtgagcagggattaggtgttcaggccagtatcttgggcatgggggagcctttggccagaagaggtataaagctcagaagtttttcagtctgataactattgatataatttccatagtgtgagggagcggtatgctctacccttgtgtatttaaggcaggacagagaaattgagggtgcccctggggctagatcgatatatgaacagaatg

SEQ ID NO: 63438 - DNA, 730 bp, Homo Sapiens
gacgggatagtgtctgcacccaaacaagaaagtccataaggaatgatcttccctcagcttcctatcgatttagttacctcttgaaagcacaaaaattaaaacattgccatatgttgaatttttaaaaagcacttggagtgagcgtacatttcctgataaatgccttttagagataggttcttgatattcagacatctgcagaaatgttctggttcccaaagtcatttcacttcgaaatatgacacagttccttcaaacagcactttttccacataaatctagttgcctctccctgtggacattcagaactgatagaacaaacactactcttttgaatttgatggttcgtgtcctgtaaagtgtttgaggacctatgcagagcctgtaacacttgggtagtacctgctaggacaatttcttggcaattgtcttactactagggatcagtaagatttagattctgagcccataatggcaacagccccctcacctatgggaagctgacttccctcagtcgggcacttctcatggggtttgtacatggttcctgccattctgttacccactctcccaggtgagccctggattggctcccagaaggcctttgtaaaatcagtagccatcctgcaggcaggtgggagcaacaggggcttcagtagcttcattttcctgtcttgcagacagagacccttggctaccactgtgctgctaatagataagactctgtaac

SEQ ID NO: 63439 - DNA, 533 bp, Homo Sapiens
aagatatgttatccatataatattttatgtgcagtagagaacatgttctatagaagagacagaagatgaaactagatgggcacccagatcataaagcaccgtatgtacttaggagttggaattatcttaaaaactatcatagatttcaagcaggggagtaacatttttaaaagaccactttatcattaggatggagggataatcattagtaagctattgccataatctaggctgaagataacatcatgaactaagatggtagtgacagtgggcataaaggagaagctaattcaagaaattttaaagatcttacttgataactatcttgattctgagataagagaggaagaagttgatgatgagatcctggtttatggctttcagttatggcttgctatttatataacaggaataaagggattgagactagtttcagttttggacgcatgacatgagatatccagagtagagatatccaagtagcaatatctgtaggcattgatatatgccctggcatgataactgccctgcat

SEQ ID NO: 63440 - DNA, 755 bp, Homo Sapiens
  misc_feature (712)..(712): n is a, c, g, or t
ctgtaacgatctatgggaggcctttcctaacgacccccgggtaataaatagacagagaagttctgattaccagtttccatcctctccatttacagacacactaaagggcaccactgaggatgacgtgttgacaggtcaggtggaggagcagtgtgtgccagcagcagaggcagagccgcctgcagtgagcgaaaccacagagaggacagtgttaggagagtacaatctcttttctaggaagatagaagagattttgaagcaaaagaatgtttcatatgtcagtagagtttccacacctatcttttcaacacaagagaagatgaaacggctttccgagttcatgtattctaagacttccaaagctggtgtgcaggagtttgtagatggttggcatgagaagctaaatactattattattaaagcatcagccaagggtgggaattcgccaccagtcagtcctaacgattctggtgctaagatagcatcgaatcctctggaaaggcatgtcataccagtttcctcaagtgacttcaacaataaacatctccttgagccactgtgtagtgatcctttgaaagataccaactctgatgagcagcattccacttcggctttaactgaagtagaaatgaaccagcctcaacatgccacagagttaatggtgacttctgatcatattgtgactggtgatatggcccgggaaccagtagangaacaacaacatcgcgagtgatgtaacatgtctgtcagcagtc

SEQ ID NO: 63441 - DNA, 822 bp, Homo Sapiens
gggtacagccagagggacgagctagcccgacgatggcccaggggacattgatccgtgtgaccccagagcagcccacccatgccgtgtgtgtgctgggcaccttgactcagcttgacatctgcagctctgcccctgaggactgcacgtccttcagcatcaacgcctccccaggggtggtcgtggatattgcccacagccctccagccaagaagaaatccacaggttcctccacatggcccctggaccctggggtagaggtgaccctgacgatgaaagcggccagtggtagcacaggcgaccagaaggttcagatttcatactacggacccaagactccaccagtcaaagctctactctacctcaccgcggtggaaatctccctgtgcgcagacatcacccgcaccggcaaagtgaagccaaccagagctgtgaaagatcagaggacctggacctggggcccttgtggacagggtgccatcctgctggtgaactgtgacagagacaatctcgaatcttctgccatggactgcgaggatgatgaagtgcttgacagcgaagacctgcaggacatgtcgctgatgaccctgagcacgaagacccccaaggacttcttcacaaaccatacactggtgctccacgtggccaggtctgagatggacaaaagtgaagggtgtttcaggccacacggggcaaactgtcctcccagtgcagcgtagtcttggggtcccaagtggccctctcactacctggaggtcccccgggggaaagcacacatgaacttctacgtgggaggccctcgcctttcccggacaccgactcccg

SEQ ID NO: 63442 - DNA, 616 bp, Homo Sapiens
ggacagtgtctgagttttcatcggtcttcacatgctgctatatattccacagagttccttgcatgtactgagcttttgttttagatggaatagcacaaggagaaaaatctttaaacttagtgctttgtctattctttatttctctcagggtggccagtattttgacttatttatcctgcttgaaagctacttgagatgtgtactgctattctaaacacgtgatctagtttctttcatctctggcataagattatataacttaatgttaagtgtcttgaggcataaaagacaaaatgtggcttattttaggatctgttttttcatcgaggtctcgaggtatcctttcaaagatagtgagaagcagacactgctccttgtgcagctctggtacctcctgcccactgctgtcacttcaagccactggcaatgcttctgtcctcgtgtcttggaggaaaatcacctggggggaggggacttcttgtggtaagagcaagtgcaggtatgaaatgcgaagattgccccagctaaaagtggacaagtccgctttgtgagatgaatacttccctgagaaacttgaccagtatctctccattttaccattatgaaaactatcatt

SEQ ID NO: 63443 - DNA, 717 bp, Homo Sapiens
gtctcttcggtagtgcggccagtcagcaacggtgtgtcactaatacccggactccttcatcagtcagaaagcagtggttggccggtgtgcctaagacaagtcctccagcaacagtgatttcttctgtgacaagcactggtagttcccggccttctgtctcctcggcacctatcactagcgggcaagctcccaccacatttctaccggcaagtacttctcaagcacagctttcttcacaaaagatggagtctttctctgcggtgccacccaccaaagagaaagtgtccacacaggaccagcccatggcaaacctatgtagccgatcttcgactgcaaacagttgcagtagttctgccagcaacaccccgggagctccagaaactcacccatccagtagtcccactcctagttccagtaacacacaagaggaggcacagccatccagtgtgtctgatttaagtcctatgtcaatgccttttgcatctaactcagaacctgctccattgactttgacatcacccagaatggttgctgctgataatcaggacaccagtaatttacctcagttagctgtaccagcacctcgagtttctcatcgaatgcagcccagaggttctttttactccatggtaccaaatgcaactattaaccaggatccccgttctatttttgttacgaatccagttactttaacaccacctcaaggcccaccagctg

SEQ ID NO: 63444 - DNA, 614 bp, Homo Sapiens
  misc_feature (208)..(248): n is a, c, g, or t
aagctgaaggtcaaggggagatggtggaatcttcccgtatttatcccctcaggtcagttacatagaagctgcttcttgactagtatagctcggtgacccttgttcaaccgctgaggttgatttcttaccctttcttctccccattttcatactcttcccagggattagtgatggaggtgaggtctccctaatcatggtaaagtgttannnnnnnnnnnnnnnnnnnnnnnnnnnnnnnnnnnnnnnnntgtcttcctcaattctccgtctcttttttttcatcactgattgccttgtgtccctccaagtctacttgttactatccatctccaggctctgggccgtgtagacactaaacctcatgccctaaggacaggaggaaagaccctctgtttggagcattattagtagagtgaggatcccaccagttctgcctggcttcctccatccccagaggcactaaaagcagtattttaaggttggtgtcttactccctggaagcctgaaatgggtggaatagcggtaaggcttgagtaaaactaggggacagaggttcttatttgtcgattttattttataattggaccttcagcctcaggggatctctagagtcg

SEQ ID NO: 63445 - DNA, 444 bp, Homo Sapiens
  misc_feature (68)..(124): n is a, c, g, or t
tatgctgaaagtagaacacaagtcacatttcagatggaggctgtaaatatctggcattttcttatatnnnnnnnnnnnnnnnnnnnnnnnnnnnnnnnnnnnnnnnnnnnnnnnnnnnnnnnnnttttgtaatgcctttgtacagctcatactttcctgctgacatatctgatcatctctttcatgcagttgccaatattcataactgataataatctggtttatcataagtaaaatgggaaacttgcctctgttttttgcaaggggaggtaaagagtgtttagtaattacctatcttaaatctttctgagttggtagtagattcatgttcaaggaacaggaaaaatggaaaaacataagtttaaatcagttctttttaaataactttttattcttttgtataaataaaatttcacaggcttcaaattctcatgctttactttt

SEQ ID NO: 63446 - DNA, 1398 bp, Homo Sapiens
  misc_feature (129)..(281): n is a, c, g, or t
  misc_feature (1275)..(1286): n is a, c, g, or t
gtgcagaaatgtggcttttgccccactttgcatctccaaaattacaacggttggccgatcccatttgaggacaatgcttagttataagtctccgagttggaaaaggaagaaagccagagctgtctagtnnnnnnnnnnnnnnnnnnnnnnnnnnnnnnnnnnnnnnnnnnnnnnnnnnnnnnnnnnnnnnnnnnnnnnnnnnnnnnnnnnnnnnnnnnnnnnnnnnnnnnnnnnnnnnnnnnnnnnnnnnnnnnnnnnnnnnnnnnnnnnnnnnnnnnnnncataggaataaatatatacaaggtatcatgtagtgatagttgctgtggagaaaaataaagcaggggagggagtaagaaatcctggagatgaggctgcagttttaaatggggcctcactgggaatgtgacgttgagcagagacgttagggaagtggatcctggacaaggcattccaggcagaggaacaggatgtgcactgccccaaagtgagaacttgctctacgtggtcaggaaagagcagggagaccaagcagagtcgtgggcaggggtagaatggaaggagaggcggctggagaggacaggtggtggagggccttggcttctgctaagtgagatgggaaccactggagggtttgaacagaggagtgccttgattgatttatattttgcaagggtcattctagctgccatattgtgaaaaactttagtggacaagggcagaaggaagagggaagacctgttaggaagctactgcaaggttccaggcttgggcctgggccacagcaacagcagtggtcaaatatctagatttattttgaaaagagccaataggatttgctgagagtttgaatgtggagtgtaagagaaggaagagttaatgatgacattaaggtttttggcctgaatagcaggaaagatggagttaccagttactgtaatagggaaggatgggctgggtaagtaaggaatttggtgcaaagcaggctgtctgtggttggaatgggaggttctggctgcaaatcaaggtggagagttctctcaggtcaggtctgcagcagagctcgagacagggatctgaatgcacttggtttattgttgggggtgctctcagaaggaacctgtgaaagcctttatcagtcatttattggctgtgagaagttctctgggaatgggggtacatttgaaaggcaagtgacttcagtttgagggcaagtctctgggaaaaaagggttgtaggcttctggcaacctaccatgcatgggtaccgtggttnnnnnnnnnnnnctccttggccaacggggtggcgtgaaaggcgatctgggccggggcaccacagcatgcccacccaccggccgatgtagccctgtgcggcgacgtattcacggacccatgcgga

SEQ ID NO: 63447 - DNA, 537 bp, Homo Sapiens
taggcattgcatacacatatgcacacgtatgtgcatgtgccacacattttttgtataatgttgggtttgattataaaagtgttgtcaaatgttttatttatctgcatatagcagtggttggcttttttgaattgaaatttttgcgcattgatgcattgaaataaggaaaattatttatctctgagcactaaacttatttttgcatatttctgtaatattgcagtccccagatccagaacatgggaagttagggaaaatgtgtgattttgtgttttgaattactgtcagaattacatacacaattacaacaaactttttttaaaagacatttcattgtactgcaaaaatctgaatatttatatttcttgtttttttctttatatgttttgcattttaatatgttgagccactggaaatttgtaacagattaatttgttataggagtttaaatgtgttgtcattgtctccattgtctttgtccagagcctattattatggaaacaataaaatttattgtgtcagttgctttgattctta

SEQ ID NO: 63448 - DNA, 805 bp, Homo Sapiens
gattgttttgagcaaagttgatcagtctcttcataccaacacatcgctggatgctgcaagtgaatatgccaaatactgctcagaaatattaggagttgcagctactccaggcacaaatatgccagctacctttggacatttggcagggggatacgatggccaatattatggatatctttggagtgaagtattttccatggatatgttttacagctgttttaaaaaagaagggataatgaatccggaggttggaatgaaatacagaaacctaatcctgaaacctgggggatctctggacggcatggacatgctccacaatttcttgaaacgtgagccaaaccaaaaagcgttcctaatgagtagaggcctgcatgctccgtgaactggggattctttggtagccgtccatgtctggaggacaagtcgacatcaccatgtgttactggcctggaaactgaagggagttttgcaagtgaaaatttagatttctattgacatccttttgttttctaattttaaaaattataaagatgtaaatggaattataaatactgtgacctaagaaaagacccactagaaagtaattgtactataaaatttcataaaactggatttgatttctttttatgaaagtttcatatgaatgtaacttgattttttactattataatctagataatatgatataagggggctaagaatttttaaattgaatcatatatatgatataatttgatccttcttgtatcttgaagttttgtacttgggatttctggactgataaatgaatcatcacattctgaaa

SEQ ID NO: 63449 - DNA, 526 bp, Homo Sapiens
gccacacttagaccgattttaagcttgtacttcgggcaaggtgccatccttacatatgtttatattagcaaggtctgtttttaataccatatactttatatttctatacatttatatttctaataatacagttatcactgatatatgtagacacttttagaatttattaaatccttgaccttgtgcattatagcattccattagcaagagttgtaccccctccccagtcttcgccttcctctttttaagctgttttatgaaaaagacctagaagttcttgattcatttttaccattctttccataggtagaagagaaagttgattggttggttgtttttcaattatgccattaaactaaacatttctgttaaattaccctatcctttgttctctactgttttctttgtaatgtatgactacgagagtgatactttgctgaaaagtctttcccctattgtttatctattgtcagtattttatgttgaatatgtaaagaacattaaagtcctaaaacatctaaaaaaa

SEQ ID NO: 63450 - DNA, 1185 bp, Homo Sapiens
  misc_feature (785)..(811): n is a, c, g, or t
  misc_feature (850)..(919): n is a, c, g, or t
  misc_feature (1010)..(1017): n is a, c, g, or t
  misc_feature (1019)..(1019): n is a, c, g, or t
  misc_feature (1021)..(1029): n is a, c, g, or t
  misc_feature (1031)..(1039): n is a, c, g, or t
  misc_feature (1041)..(1041): n is a, c, g, or t
gggagactcgggagaggctccgtcttgtgcaagggtcctgtgggctggctgcactggcctctgcggtggtgcctgccagaatgccccacttggaaaacgtggtgctttgtcgcgagtctcaagtgtccatcttgcagtccttgtttggagagagacatcatttcagctttccatccatttttatttatggacatactgctagtggaaagacctatgtaacacaaacgttgttgaaaactttagagctcccacatgtgtttgtgaattgtgttgaatgctttacattgaggctgcttttggaacaaattttaaacaaattgaatcatcttagttcttcagaggatggatgttctactgaaataacctgtgaaacatttaatgactttgttcgcttgtttaaacaagtaaccacagctgaaaatcttaaagatcagactgtatatattgttctagataaagcagagtatctaagagatatggaagcaaatcttttgcctggatttcttagattacaagaattggctgacagaaatgtgactgttctctttctcagtgaaattgtttgggaaaagtttcgtccaaatactggatgctttgagccgtttgtcttatatttccctgattacagcataggcaaaccttcaaaagatcctgtcccatgatcatcctccagagtattcagctgatttctatgctgcctacattaacattcttcttggagttttctacactgtttgtcgagatttgaaagagctcagacttctgaaagaagcagggtcttgccnnnnnnnnnnnnnnnnnnnnnnnnnnntgttcacaggtgcagtcacagcacactacaggcttgatnnnnnnnnnnnnnnnnnnnnnnnnnnnnnnnnnnnnnnnnnnnnnnnnnnnnnnnnnnnnnnnnnnnnnntataattacatttgacttgagcaaatgtgtttaaataaaatttcctgaactgcaatacagattttacttgaaaaataaatttctaattgcnnnnnnnnanannnnnnnnnannnnnnnnncntggtcggccgccctcggcccctcggagaagcttttcctagaccatttcggtttgggcgcgcccgggcccccagtagggtaaagtggaaacatggggtcataggctggttttccctaggggagatccctgggtccatggaactag

SEQ ID NO: 63451 - DNA, 580 bp, Homo Sapiens
tttcaagtttcaagtactatactctgtattctcacaaatagagaagactaatattgcagacctggtgacagctctgattgtccttttggttgtatccattgttaaagaaatgaatcagcgcttcaaagacaaacttccagtgcccattccaatcgaattcattatgaccgtgattgcagcaggtgtatcctacggctgtgactttaaaaacaggtttaaagtggctgtggttggggacatgaatcctggatttcagccccctattacacctgacgtggagactttccaaaacaccgtaggagattgcttcggcatcgcaatggttgcatttgcagtggccttttcagttgccagcgtctattccctcaaatacgattatccacttgatggcaatcaggagttaatagccttgggactgggtaacatagtctgtggagtattcagaggatttgctgggagttctgtcctctccagatcagtagttcaggcgagcacaggagggaggacacagattgctgggcttattggtggcgtcatcgtgctgattgtcgtcctagccattggatttctcctgccacaa

SEQ ID NO: 63452 - DNA, 616 bp, Homo Sapiens
gggtatctgggtgatggtgggtggggcatctgggtagtggtgaggtgcccggggatgaagagggagtgaaaatctgtagggaaggggggagcagggaggttggactggtgatgcactaaggacctgggatgctcctgggaggctgcatcctgctttcctcgggggctctgagctgagtttgtccaagtgaggagtgagtatggctgagtaaaaggagtaaaggatcctgctgacacatttttcatccttctaggttgttcttcgtgggctcccgggagggccacctaccggaccttctgtccatgatccacattgagcgttttacacctatccctgctttactgttcaattgcaccatggcactcatctacctcatcgtggaggatggtttccagcttatcaactacttcagcttcagctactggttcttcgtgggcctgtctgttgttggacagctctacctccgctggaaggagcccaagcggccccggcctctcaagctgagcgtgtttttccccatcgtgttctgcatatgctccgtgtttgtggtgatagtgcccctcttcaatgatcaccattaacttccactcattggcatcgggattgccctgctcat

SEQ ID NO: 63453 - DNA, 480 bp, Homo Sapiens
gatcttggggattctggctgtgaatttggtgcacgaccattatggtacaaaaacatttgcttggtctaaagaagatcattaatgttttgtggccataacaagattgtaacagctggattgtttttatgtgtaggtattgttaaatacagggactgtttccatgcacagaatatgtatcgtaagttaggatggacattagatgtgattatgatgataaagcgaaggtctgcggtcctatatctacagacacgtggtgagaaattagaacaaactggagacgggccattgacacatggactctgcctgggcatgttaggttaattctttgactccaagccttaaaatactcacatggagtcagcgctcacctcattcacacattatcatagagctcctggacctgaaccttaaagggaaaaggtctacctggagccggagcatcagggtggcttggagcatgagagtgatcatctgctcgat

SEQ ID NO: 63454 - DNA, 420 bp, Homo Sapiens
atcttgttccctggaggatccagggatgaggatagagtggcctgagagcagtgcttggattcagcctcctgctgggtccttctgctggatacaggcaccaagaggcgggggtggagcagggagtgcgccttcctggggtgcccggtggtgtgtagagaaaagctgcttgtttactccttaagtcaatgtattggtgactgttgatttgttggacaattcaggaatcacgggctgtggagaaactccctcatgttgttggcaacaggtgaatgaacctagagcggtgacatgaaaataaagctcactgttactcgctgtttttgtctttatttggtagtaaaaggtctttaaatacccaactattcatggaggtggcctccagggcttactgggttagctgaggtgatcttctggacgata

SEQ ID NO: 63455 - DNA, 636 bp, Homo Sapiens
ccgaacacggagatcgagaacggacacgaagcgtatggaccaggtgaatggatgaactgaaggagaagacgacggagctgggcaaaatgatgcgggagcagcagcagattgagaaggagatcaaggagaaggactcagaattgaaccagcaagcggcctcagtacatcaaagccaaggaggacacctcccacaaaatcaagaagctggaagcagccaagaagtctctgcagaatgctcagaagcactacaagaagcgtaaaggtgacatggatgagctggagaaggagatgctgtcagtggagaaggctcggcaggagtttgacagaacggatggaagaagagagtcagagtcagggcagagatttgacgttggaggatgacctgaaggagaagaagaagcagctgggcaaactgatgcgggagccgcacgcagattgagaaggagatccacggagaaggactcagcattgaacccgaagcggcctcagtacatcaaagccaaggaggacacctcccacaacatcaagaagctggaagcagccaagaagtctctgcagaatgctcaggagcatctacacgaagcgtaaaggtgacatggatgagcctggagaaggagatgctctcagtgagaagga

SEQ ID NO: 63456 - DNA, 717 bp, Homo Sapiens
ctgctccgcccctctctggccccagctctggcctcagctctggcccctgttccccaggccccccagggcccgtcagtggcctgaggagatggttggatcattccaaacattgtctcagtgtggaaactgaggcagacagtggtcaggcaggaccatatgagaactggatgttggagccagctctagccacaggagaggagctgccggaactgaccttgctgaccacactgttggagggccctggagattagacgcagccacctgaagaggagactttgtcccaagcccctgagagtgaggaggtacagaagaagaaggctctggaaaggagtatgtatgtcctgagtgaactggtagaatacagagaatattgtacgtggacgacttggggcaagattgtggagggttatatggccacacatgtctgcttcagggggtccccgagagtcttcgagtcacatgacaggattgtgtttgggaatatccagcattatctatgagtggcaccgagtactatttcttgcaagagctacaacaggtgtctgaaagatcctgattgtctggctcagctattcatcaaacacgagctcaggctgcatatgtatgtggtgtactgtcagaataagcccatattcagagcatgtgctgtcagagtgtggggacagctactctgaggagtccggcagcaggtggggcaccggccggcagttgaacgac

SEQ ID NO: 63457 - DNA, 644 bp, Homo Sapiens
aaggctggcacaactgccacttatgagggtcgctggggaagagaaacagcacagtacagctcccagaagtccgtggaagaaaggtccttgaggcatcctctgaggagactggagatttctcctgacagcagcccggagagggctcactacacgcacagcgattaccagtacagccagagaagccaggctgggcacaccctgcaccaccaagaaagcaggcgggccgccctcctagtgccaccgagatatgctcgttccgagatcgtgggggtcagccgtgctggcaccacaagcaggcagcgccactttgacacataccacagacagtaccagcatggctctgttagcgacaccgtttttgacagcatccctgccaacccggccctgctcacgtaccccaggccagggaccagccgcagcatgggcaacctcttggagaaggagaactacctgacggcagggctcactgtcgggcaggtcaggccgctggtgcccctgcagcccgtcactcagaacagggcttccaggtcctcctggcatcagagctccttccacagcacccgcacgctgagggaagctgggcccagtgtcgccgtggattccagcgggaggagagcgcacttgactgtcggccaggcggccgc

SEQ ID NO: 63458 - DNA, 565 bp, Homo Sapiens
gagtggtcagtgtcttccagaaagtattaggagcctcacatctactctgccaagccggccccagcaggcactgtgctgggtttaggggctaccactggatgatggcattgccgcgactcacacacctctacttctgttcttccctcactctatccccgctaccgtcctggccagctaccgtcatagagaaccagagctccaagtctttaatttgccaagatgaagaaaatgagttctcaaggagggaatgctttgtttgaggccacacagcaggtaggtagcaaagatcttgtctagccagggcagcccttatcagcttgtgacaaccttccccaggacagaagtcatacaaggcctctggggttaatacaaataggttgtgccctgctttaaggaacctgctatcaggaaatctacatgtgtgcacagagagagaaaagtagaacggttctttgcatttggctctacttactaacaacccctctagaatacattggtgatttcatttaaagagattgtatgcatttgtggctttcctgatttctgagtctgtgtttggaggtgt

SEQ ID NO: 63459 - DNA, 1190 bp, Homo Sapiens
  misc_feature (475)..(475): n is a, c, g, or t
cgcgcttccgagactcgcagtctacgcgagctgcctgtttttttcctgcttggacgcgcatgagggccccgtccatggaccgcgcggccgtggcgagggtgggcgcggtagcgagcgccagcgtgtgcgccctggtggcgggggtggtgctggctcagtacatattcaccttgaagaggaagacggggcggaagaccaagatcatcgagatgatgccagaattccagaaaagttcagttcgaatcaagaaccctacaagagtagaagaaattatctgtggtcttatcaaaggaggagctgccaaacttcagataataacggactttgatatgacactcagtagattttcatataaagggaaaagatgcccaacatgtcataatatcattgacaactgtaagctggttacagatgaatgtagaaaaaagttattgcaactaaaggaaaaatattacgctattgaagttgatcctgnttcttactgtagacagagaagtacccttatatggtggcatggtatactaaatcacatggtttgcttgttcagcaagctttaccacaagctacacttaaagaaattgtggcagaatctgacgttatgctcgaagaaggatatgagaatttctttgataagctccaacaacatagcatccccgtgttcatattttcggctggaatcggcgatgtactagaggaagttattcgtcaagctggtgtttatcatcccaatgtcaaagttgtgtccaattttatggattttgatgaatctggggtgctcaaaggatttaaaggagaactaattcatgtatttaacaaacatgatggtgccttgaggaatacagaatatttcaatcaactaaaagacaatagtaacataattcttctgggagactcccaaggagacttaagaatggcagatggagtggccaatgttgagcacattctgaaaattggatatctaaatgatagagtggatgagcttttagccaagtacatggactcttatgatattgttttagtacaagatgaatcattagaagtagccaactctattttacagaagattctataaacaagcattctccaagaagacctctctcctgtgggtgcaattgaactgttcatcatatgatatatgatgaacacgaagtctgctttgtctaatccactcaagaagcttggaccctacc

SEQ ID NO: 63460 - DNA, 661 bp, Homo Sapiens
gcaatccagctttcatacttttcctgttggaacttctgacctgccagaaagattttaccaattattttggacacctggaaggctgtggtgctgatctacacaaagaaattcgagacacttactatcaacttgttctgtttttggtcaaagcagttaaaggatttagtagcctaaatgacaggtccttgctccctgccttatcctgtgttcagacagccctgcttcatcttttggatatgggctgggaacccaatgatctcgccttctttgttgatattcagttaccagatctcctcatgaaaatgtcacaggagaatataagtgtccatgacagtgtgatcagccaatggagtgaagaagatgagcttgctgatgccaagcagaattcagaatggatggatgagtgtcaggatggcatgtttgaggcctggtatgaaaaaatagcccaggaagatccagagaagcagaggaaaatgcacatgttcattgctcgctactgtgacctgttaaatgtggacatctcttgtgatgggtgtgatgagattgccctctggcatcgataccgctgtctgcagtgcagcgacatggatctctgcaaaacttgcttcctaggtggggtgaaacctgagggcacggagagaacatgaatgtccacttgggt

SEQ ID NO: 63461 - DNA, 465 bp, Homo Sapiens
caacacaatggccctgcctcccaccgctttatttctttcggtttcggatgcaaaacaaaaaattttaaaagaaaatgtgacttcaaaggaaaagaacaaatttccaaagacttgggggagtgaaggcagagcctggtgcagatggacgaggtctgcagacggagggcagaggtggtggaaggggccaggggcctgcaggcctccccctggaactgggactggtctcggtctgctgacgtcagggtcagctcccccgcggagctgacttcagcagcccacagctgtggggcttcagcagccacaccagcccagcccagcccagctctcgatacgtttggtctttcatgctgaaaaataaataataaagcctgtcccgtgtctactgcctcccccaactgcacagacgccagcctctaggcctgactgccagggaggtggaaacactggccaccagcccggcagccc

SEQ ID NO: 63462 - DNA, 403 bp, Homo Sapiens
ttttgtctttaggtttaggaggagatactaagatactggatgtttatcctatcttagtttggttggagtaataagagagaagaagagggtggcctttggcttttcagtgttttttcccctaaagagtgatattgctgacgtttctatcaattttacacataatatgtggctatgaaaccatatatctcacttaagtaacaaagtaatccctttgtctatcactaagtaatagacaaaaatcattgtctattatttaaagccaccaaaacagtgtaacagttttaagttcaataatgttaagtattgtatagaaatatattggaggcaaagttcagttgatgacaattgtgtatatgttactgatgctgtaaattatttttaataaagaaaattgtattatcac

SEQ ID NO: 63463 - DNA, 524 bp, Homo Sapiens
atgggggctaaccagttagtggtgctcaacgtgtacgacatgtattggatgaacgaatatacctcatccattggaattggagtttttcattcaggaattgaagtctatggcagagaatttgcttatggtggccatccttaccccttttctggaatatttgaaatttccccaggaaatgcttctgaactaggagaaacatttaaatttaaagaagctgttgttttagggagcacggacttcctagaagatgatatagaaaaaattgtagaagaactgggaaaagaatacaaaggcaatgcttatcatttaatgcataaaaactgcaatcatttttcttcagctttatcagagattctttgtgggaaagagattcctcgctggatcaatcgacttgcctacttcagctcctgtataccctttctacagagttgcctcccgaaggagtggctcacgcccgcagccctgcagtctagtgtcagccaagaactccaggatgaactggaggaagcagaggatgctgccgc

SEQ ID NO: 63464 - DNA, 602 bp, Homo Sapiens
  misc_feature (195)..(195): n is a, c, g, or t
  misc_feature (197)..(276): n is a, c, g, or t
atcgagctcggtacctgttgctaggtggagtgcagtggtcgaaatctcgtgtcatgcaagctctgttcccaggttcacgccattctcctggctcagctcccaagtagctgggactacaggcacccgccacagtgcctggctaacttttttgtatttttacgtagagacagggtttcaccatgtgagccaggatgntnnnnnnnnnnnnnnnnnnnnnnnnnnnnnnnnnnnnnnnnnnnnnnnnnnnnnnnnnnnnnnnnnnnnnnnnnnnnnnnnccatgaaccaagtgtttttaaggaaacaaaactactttttttaatcatcagatttatactagctatatggatattcgcatatctggtcattatgcatctcagaatttttttacatatttttataatcctgttcgctcagttattggatgagtgcaagctaatcatgttggtttataatagtagtcaatttttgtaaaataaaaattacactatcaaactctttactttataaatggtccataggccacactttaatatcacattataaagggaaggacagtcttcattcctcctggtaattggtatgcttgtcattgacgatatct

SEQ ID NO: 63465 - DNA, 889 bp, Homo Sapiens
ggcccaggatgacagctggagaatggagtcagttttatccaagtatgaagatcagattactattttcactgactacctagaagaatatccagatacagatgagctggtatggatcttagggaagcagcatctccttaaaacagaaaaatctaagctgttgtctgatataagtgctcgtctatggtttacatacagaaggaaattttcaccaattggtggaacgggcccttcatcagatgctggttggggatgtatgctacgctgtggacagatgatgctggctcaagcccttatctgtagacacttgggaagggactggagctgggagaaacaaaaagaacaacccaaagaataccaacgcatcctacagtgcttcttagatagagaagattgttgctactctatccatcaaatggcacaaatgggtgtaggagaagggaaatcaattggagaatggtttggaccaaatacagttgcacaggtgttaaaaaaacttgctttatttgacgaatggaattccttggctgtttatgtttcaatggataacacagtggtcattgaagatatcaaaaaaatgtgccgtgtccttcccttgagtgctgacacagctggtgacaggcctcccgattctttaactgcttcaaaccagagtaagggcacctctgcctactgctcagcctggaaacccctgctgctcattgtgccccttcgccctgggcataaaccaaatcaatcctgtctatgttgatgcattcaaagagtgttttaaagatgccacagtctttagggggccattagcgaggaaaaaaccaaattaaccgcgtatttatttcatagggattcttagggtgacggagctcatcttcttgggaccttcatacaacccagc

SEQ ID NO: 63466 - DNA, 1087 bp, Homo Sapiens
gcagggagcttaacagccaggcctggacaccctcaagagactgtgtgctgattctcagtcgtcactccttggatcaggaaccatagtcctgatctttgaccatcagtctgtgacctgccccttctctttacatgcagccgctctctgctccctgccccaatgaacatctgcactaggcccaagccttggagtaatttacctgaagagtgacaccattgattttgaaactactgaagaaacccaagacagctgaaaaccagaaggcatctgaggagaatgagattactcagccgggtggatccagcgccaagccgggccttccctgcctgaactttgaagctgttttgtctccagacccagccctcatccactcaacacattcactgacaaactctcacgctcacaccgggtcatctgattgtgacatcagttgcaaggggatgaccgagcgcattcacagcatcaaccttcacaacttcagcaattccgtgctcgagaccctcaacgagcagcgcaaccgtggctacttctgtgacgtaacggtgcgcatccacgggagcatgctgcgcgcacaccgctgcgtgctggcagccggcagccccttcttccaggacaaactgctgcttggcttacagcgacatcgagatcccgtcggtggtgtcagtgcagtcagtgcaaaagctcattgacttcatgtacagcggcgtgctacgaggtctcgcacgtcggaagctctgcagatcctcacggccgccagcatcctgcagatcaaaacagtcatcgacgagtgcacgcgcatcgtgtcacagaacgtgggcgatgtgttcccggggatccaggactcgggccaggacacgccgcggggcaactcccgagtcaggcacgtcaggccagagcagcgacacggagtcgggctacctgcagagccacccacagcacagcgtggacaggatctactcggcactctacgcgtgctccatgcagaatggcagcggcgagcgctctttttacagcggcgcagtggtcagccaccacgagactgcgctcggcctgccccgggaccaccacatggaagaccctgctggaa

SEQ ID NO: 63467 - DNA, 671 bp, Homo Sapiens
tatcaagttggaaaaaccatggtctttctaaaggagcaggaacgacagcacttacaagatctgcttcaccaagaggtgctccgcagaatcatattgttgcagcgatggttcagggtcttgctgtgtaggcagcatttcctccatctgagacaagcatctgttattatccagagattctggaggaattacctaaatcagaagcaagtcagagatgcagctgtgcagaaggatgcttttgttatggctagtgcagctgctcttctccaagcttcctggcgtgctcacttagagaggcagcggtacttggagttacgggctgcagccatcgttatccagcagaaatggagagattactataggcgcaggcacatggctgctatttgcatacaagcaagatggaaagccttcagtgaaagtgaaaggtaccaagaacaaaggaaaaaaattatccttttgcaatcaacatgtagaggattcagagcaagacaaagatttaaagctttcaaagaacaaaggctatagagaaacaaagccagaagttggattggtgaatattaagggatatggatctctggaaattcagggttcagacccttcagaatgggaggattgttcttttgactacagcaataaaggccatagaggaatgtaaatctggattcagataggag

SEQ ID NO: 63468 - DNA, 726 bp, Homo Sapiens
tgagctggtgcgacccggccgttgccgtagagatggcaggctggatggagtggggtgcggtgagctgagctgaccctgcttcgccacggggactgcagtgaccccggcttgccggcagggcgggtaacaggttgagccagagtggggctgctcaggggcgtggagccgaggccaggatttctctgaagacccggcacaggctattcctttctgcgacgagcccattgctatggaaaccaaagcgttaggccagcggggattgaggctgcgggatcatgacgggtctctctcccgaggaaccttgcctaaggcttccccaagcggctacttcctgagcgaacccgcccacctgcctgaaggagagagttttccatggacacagcctagcagaaagacgcagccttcgtgcttcgctgactgctgaccactgacccaccgccttgatgacagcaaccctcgtgtgccttcccagttcagttccggcagccctcagtcagcgggctctcgcagattaccaaaagcctgtatatcagcaatggtgtggccgccaactacaagctcatgctgtctagcaaccagatcaccatggtcatcaatgtctcagtggaggtagtgaacaccttgtatagaggatatccacagtacaatgcatggtacgctgtgcgacggactcctcctaacgcacgtctctgtgacttcttggaccgtgctggaaatgcatgaaag

SEQ ID NO: 63469 - DNA, 835 bp, Homo Sapiens
aagaaaaaatagacaggcactgctgggagacagtggcagccagaactggagcactggaacaacagataaatatgggcgtctggaccgagagctccagagagccaattctcatttcattgaggagcagcaggcacagcagcggttgatcgtggaacagcaggatgagcagttggagctggtctctggcagcatcggggtgctgaagaacatgtcccagcgcatcggaggggagctggaggaacaggcagttatgttggaagatttctctcacgaattggagagcactcagtcccggctggacaacgtgatgaagaaacttgcaaaagtatctcatatgaccagtgatcggcgccaatggtgtgccatagccatcctctttgcagtcctgttggttgtgctcatcctcttcttagtgctgtgacggcggggcctctgggtgcgagttcctcctgcatatgaaccgaggggaggaggagaagctgagcacgtgtgacattgccgtctactcacattcctatcctggaaacatactgctgcactgacttttctccgtgtgaccccacaattgacatggctcctccatcccagcgctggaagggccagtgggaagaggaaatagatgtctgcactcctggctgcagctggacaacagaagccccatgccgcctgtccagttcggaggagaactagctgctgccttgccttccgggacctcgtttgctgaggagggacttacagactccactggtgttttgctgttgctcattccatgcatctttggcagctcttttcttctgctcagacccttccccgtgctcagacagtgcaccgctgt

SEQ ID NO: 63470 - DNA, 423 bp, Homo Sapiens
ctgccaatatattgatcctttatagttatttcctaaaatgctgttttcgaaacattcctttttcaccctgttgtgtggcttagacccatctcgtaatctgttaattggaaagaggctacagacaccagcagtgtgcgttctgcaggtacacgctgccaaagtaattcctgctcatccatgccctgtctctgtctcttttagagtcataccttatttgagtataggttgcttaattttgctagacttcctgaaaacactaaggtggagtatcagaagtgattttagtcacagttctgcgggagagcttagaataacatcctcctttgggaggtggtctcgggtgcgtggatgttggtatacagtctttattgtaagtctgatacaaaatgctaataaatttaatgtttttcttccttaaaaaaa

SEQ ID NO: 63471 - DNA, 405 bp, Homo Sapiens
tatttcaaaggaagttactctaaagacactcagattatttcagaaaaatgcaataaggggaatagttttggggtttattttttattttaaaagaaaattgacttatttaccacaagctatttttttcccttctggctgtaaggtttgtacagactggtttggtaaatgctaaacttttgtgtcttttgcctttttaaaggaattgttaacattggaattgagggtatgtacagagaagttggtgtcaacaccatttaaaaagtcatattttttcacaaatatagaaaatcattttacataagaattttaagtatttgcaataaatatatgtatatagattgtatgtattcctatattcttatttttcattttattattaagtaaaagatcattaaaagtgaaaat

SEQ ID NO: 63472 - DNA, 809 bp, Homo Sapiens
  misc_feature (621)..(624): n is a, c, g, or t
  misc_feature (628)..(628): n is a, c, g, or t
  misc_feature (632)..(632): n is a, c, g, or t
  misc_feature (634)..(634): n is a, c, g, or t
  misc_feature (645)..(647): n is a, c, g, or t
  misc_feature (649)..(649): n is a, c, g, or t
  misc_feature (705)..(715): n is a, c, g, or t
tactataacggtccgtaattgtagcgaggcctgggtggcgaattcggcacgaggcgcaagataagctaggagccgcgcgagtcgtagtgtcgctgtttgcgggtctccgcgcgggaccggggcgcagcggggtcgctgaggcgagggtgtcatgtcagacaacgaggacaattttgatggcgacgactttgatgatgtggaggaggatgaagggctagatgacttggagaatgccgaagaggaaggccaggagaatgtcgagatcctcccctctggggagcgaccgcaggccaaccagaagcgaatcaccacaccatacatgaccaagtacgagcgagcccgcgtgctgggcacccgagcgctccagattgcgatgtgtgcccctgtgatggtggagctggagggggagacagatcctctgctcattgccatgaaggaactcaaggcccgaaagatccccatcatcattcgccgttacctgccagatgggagctatgaagactggggggtggacgagctcatcatcaccgactgagctggagtcatcttcctgcccttgccccatgcccaattttcattctcactttatatgtgtaaataataaaatattcaactttctannnnagcncaananaaaagaaaaannnanccctgtcgggccgccctcggcccttcgagaaacttttctaagaccatttccgtttnnnnnnnnnnncccccgttaggtaaagtggacatgggcccatagcctgttttcctagggagatcctggggccattgactaaggggtttgggtttcctcccccaat

SEQ ID NO: 63473 - DNA, 1709 bp, Homo Sapiens
cggcgtagccgtagaggtgcacagagaacacccctagcatgaacagtgtgaggattccaccagctttttcaccatgaaggagacagaccgggaggccgttgcgacagcagtgcaaagggttgctgggatgctccagcgcccggaccagctggacaaggtggagcagtatcgcaggagagaagcgcggaagaaggcctccgtggaggccagacttgaaggccgccatccagtcacagttggacggggtgcgcacaggcctcagccagctccacaacgccctgaatgacgtcaaagacatccagcagtcgctggcagacgtcagcaaggactggaggcagagcatcaacaccattgagagcctcaaggacgtcaaagacgccgtggtgcagcacagccagctcgccgcagccgtggagaacctcaagaacatcttctcagtgcctgagattcgtgagggagacccagcgacctaacttgaacaaggggcactcctgcaagcccaccggaagctgatggacctggaatgctcccgggacgggctgatgtacgagcagtaccgcatggacagtgggaacacgcgtgacatgaccctcatccatggctactttggcagcacgcaggggctctctgatgagctggctaagcagctgtggatggtgctgcagaggtcactggtcactgtccgccgtgaccccaccttgctggtctcagttgtcaggatcattgaaagggaagagaaaattgacaggcgcatacttggaccggaaaaagcaaactgggctttgttccctcctgggagggcccaggaattggaaggagaaaatgttcaccatccttggagagggactgtgacccccagaatttgagggcacacaggcagataccagagagtctgacaagatgtggcttgtccgccacctggaaattataaggaagtacgtcctggatgacctcattgtcgccaaaaacctgatggttcagtgctttcctccccactatgagatctttaagaacctcctgaacatgtaccaccaagccctgagcacgcggatgcaggacctcgcatcggaagacctggaagccaatgagatcgtgagcctcttgacgtgggtcttaaacacctacacaagtactgagatgatgaggaacgtggagctggccccggaagtggatgtcggcagcctggagccattgctttctccacacgtggtctctgagctggttgacacgtaccatgtccacgctcacttcaaacatcatcgcctggctgcggaaagcgctggagacagacaagaaagactgggtcaaagggacagagccagaagccgaccaggacgggtactaccagaccacactccctgccattgtcttccaggtgtttgaacagaatcttcaagttgctgctcagataagtgaagatttgaaaacaaaggtactagttttatgtcttcagcagatgaattctttcctaagcagatataaagatgaagcgcagctgtataaagaagagcacctgaggaatcggcagcaccctcactgctacgttcagtacatgatcgccatcatcaacaactgccagaccttcaaggaatccatagtcagtttaaaaagaaagtatttaaagaatgaagtggaagagggtgtgtctccgagccagcccagcatggacgggattttatacgctacgcgaaggaggctgcacggtcaac

SEQ ID NO: 63474 - DNA, 572 bp, Homo Sapiens
gaccatttccatactaaaccagtttgttaactttagattttttccaatagtgtgagtatatccattgctggcagtggagggcttgccatgaaaatgcaacttatttaagacatttatgagacatattaacttgtcgtgtcgccttttagaaggagaaacttaagtgtggaatgcattatatgggcaaagaagctatgaagatacatgatacactttgtacaactatcctgcagcccattggttgcttatatttatcgcttggctcaagttctgccctttggagaaatactgagcaagtctttcattctctgtgtgacagccctctgaatatttgaagttgtttgttgtaacttaaggttataacagcccttagttcatttactctgcatttgttcaataaatatttaactgaattcttcaattatttcatctaagatagtttctggaaatttcactctcgatctttctgtggacacaatctattttgtcattgtgtctatatgaatctcttaagtagaaatgagttgtatggtgaatctgtgtagtgataattatataatttatttattttg

SEQ ID NO: 63475 - DNA, 570 bp, Homo Sapiens
  misc_feature (20)..(20): n is a, c, g, or t
  misc_feature (54)..(54): n is a, c, g, or t
  misc_feature (468)..(500): n is a, c, g, or t
gcccccaatgcaacccagcntctggtcctattcttgcctgcaaaagaacagagntttctcaaatgcctcagtccctgagagccatttcttcccctacatcgtctcactttgcttcctattgactgctggtagaaggagatttggggtaggggctagacctccttttatttgaagggggcaagggctgagatgtggtccccaaggggccagaaattcccaagttggtcacaggtggcttagaagtgtgtgttatggttttacggatttccttgaagcctctctccttctctgcctacaaagaccctatactctcagtctccccaacccacccccaaggagctgtgggaggctttgtgttatctgtgaaactccaaaacatgggtgttgcggagaagggagagttcaaggcaaacgcaaggactggacttagctccctaggtgccacagtcagatgccggacacggattnnnnnnnnnnnnnnnnnnnnnnnnnnnnnnnnncccactcatcacggccatctttgttgtaaccatttctgtgtttataaatgcattatctctgagaattttc

SEQ ID NO: 63476 - DNA, 302 bp, Homo Sapiens
ctagaggatcccgtaatccccaacactagcaaatctaggtcctactaaatacaaatctactgggtggatgatcttctagtactgtatttttaaattaaggagttttagttataatgaaattgatttgtagtctagttttgccgtaaacttgtttttctttaaattgttcttacagtgatatcttactatttttaactgtctggggtttctagatatggggatttcagcccctggttaatcagtcttgtcccctacaagtccctgatgcagtatgtttatttgtgatgtttaaagaacatttc

SEQ ID NO: 63477 - DNA, 1270 bp, Homo Sapiens
  misc_feature (67)..(67): n is a, c, g, or t
  misc_feature (242)..(242): n is a, c, g, or t
  misc_feature (981)..(1162): n is a, c, g, or t
tttttcctagccgcttacgacctgcggcagggataagaggcgcctggcggcatgcaggcggccttgnagccggcgccgggggctgcagcccaagaagcgtttcgctttcaagacccggggaaaggatgctgcttcgtctaccaaagtagacgcggctcctggcatccccccggcagttgaaagcatacaggactccccgctgcccaagaaggcggaaggagacctcggccccagctgggtcntgcggtttctccaccctggagtcccaagtcttggagaagagagccagcgagttgcaccagcgcgacgttcttttgacccgaactgagcaactgcacggtcagactgtatggaaatcccaacaccctgcggctaaccaaggcccacagctgcaagctgctctgcggtccggtgtctacctctgttttcctggaggactgcagtgactgcgtgctggcagtggcctgccaacagctccgcatacacagtacgaaagacacccgcatcttcctgcaggtgaccagcagggccatcgtggaggactgcagtgggatccagttcgccccttacacctggagctacccggagatcgacaaggccttcgagagctctggtttagataggagcaaaaataactggaacgatgttgacgattttaactggctggcccgggatatggcctccccaaactggagtattcttcctgaagaggagcgaaatatccagtgggactaagcagttgtcactctgttcttcactcctaccaaatactttccacgttggactttccccctttattgggtctcgaagtttacttattgtcacactgtgtatgttttcagcattttaaggctagagattgtaatgggctcctacttgtaatttccattaaattcgtaacaggtataacactaaagcatttttgctattttcgtcatgcctttgagactgagtcttactccgtcccccagcgtggtggcnnnnnnnnnnnnnnnnnnnnnnnnnnnnnnnnnnnnnnnnnnnnnnnnnnnnnnnnnnnnnnnnnnnnnnnnnnnnnnnnnnnnnnnnnnnnnnnnnnnnnnnnnnnnnnnnnnnnnnnnnnnnnnnnnnnnnnnnnnnnnnnnnnnnnnnnnnnnnnnnnnnnnnnnnnnnnnnnnnnnnnccacaatagtttgaagcagtaagggggaaggagggtgattatattgctttgtaatggtttgtgatacttgaaacatcacggtgcataataaagtaggtctgcagtaaa

SEQ ID NO: 63478 - DNA, 712 bp, Homo Sapiens
tcagccggaccgtgatgtatctgcccaacacagagatgtctgtcgcagtgaacaggcccagctcgggaaagaaaccagtcctgatccaggaaaatgtctctccattacggttgctgctgccctgagtgcacatctagtggccataaaggaaatgatgtgggtgattcggccaagagttgcctgtgtggtcaaggatgccggcagcgcaggaaagtcaagaccaggcaggggaaagaatttcagctcctgaaagggaaatctactgtcattattgcaaccaaatgattccagaaaataagtatttccaccatatgggtaaatgttgtccagactcagagtttaagaaacactttcctgttggaaatccagaaattcttccttcatctcttccaagtcaagctgctgaaaatcaaacttccacgatggagaaagatgttcgtccaaagacaagaagtataaacagatttcctcttcattctgaaagttcatcaaagaaagcaccaagaagcaaaaacaaaacctcggatccacttttgatgtcagagcccaagcccaggaccagctcccctagaggagataaagcagcctatgacattctgaggagatgttctcagtgtggcatcctgcttcccctgccgatcctaaatcaccatcaggagaaatgccggtggttagcttcatcaagaggaaaccagtgagaattcagctagat

SEQ ID NO: 63479 - DNA, 699 bp, Homo Sapiens
acagttcctcccatcagtccctcaacgcctgtcttccctcgcgcgtagagagtgactcgaaggaccccctctcctcttcgctgcagcccctccccatgcacgctgggagactcttggaggggataaggtggggcccggagaggaagagaagacaatcggattggataggcagctgccatggcaactggaggctgtggttatattgtcatagtaaccgatgtgtgcggacagggtcaccctccccttggccaatggattcccaggaaaccacccagggttccccgttggcttcccttccatctaaaggcctcccccaagttaggaatcgatatagttctccccggtggtgaagtccacttcctcctcccttcccacttcccacagcaactggggggacaccccgaggcattcaccatgggcttttccacccgcctgcgagcgggaaccacctccgtagtttcctctcagagccgggcgtggagagggctgggcctgcgaagaggatgcatggcctggaggctggcgggcggcgggctggagtcgggagggcgaggcgacagcgccaagcggcgaggaagggcaaggggtttccccacaactgccttgggctctgggaggcgggatcccgcctggacggggtccctgagggaggagagcggacacgacagccgcgatgccttccctgccgacggggatagc

SEQ ID NO: 63480 - DNA, 549 bp, Homo Sapiens
  misc_feature (79)..(79): n is a, c, g, or t
cctctctagaagcagcttctcgcctttccctcccgagggctggcaggagtcactgtcagtcaccctcatggggtctganaggttgcatgggctcacctggtcttagacaaggacagttgcagcttccgcaccaggcagacctgcagtttgagtggctggggataggtggagcggcggcctggccacagtgccctggacagcagcacatcacatcagttaacactgtttgccttccaactagttattacggtgtcctgtgggacaattagactggaggagccaaaggaatgtgcaggggcactgggtttctgtttggagagaggctctcggtaaacagagttcgcattcctccagattctgtgggaccagagtaaatatcattatgccacagccaggcttaagcaatctatctgcagtgccgttcccgcagcgcacactgctccctctgtctctgccgatgaccttcgaggctgtcctaggcaggttctccctgaggagctccccacaccaagcctccctaactctgcaaagcagccggagcaacagaga

SEQ ID NO: 63481 - DNA, 414 bp, Homo Sapiens
ccgtggatcaaacaaggtcagtctaaagtggcaggtcctaggtgtgacctgataccaccaccctttgtggcagcaccgggctggactgccctgatccctgggacgtgagacttagcttccagccagtgtgaatcattgtatctgtctcataatcacagcacagctgcagacacaacaacgtgcagcattttttacataaaaatatggtagaattaatttatgacatggaaatgccttacgtggtatcacacttagtcttgaaaaaaacaccaaggtgacgtttaaaatttttagtacatatcctcaaattggagctaagttatacttcttttataaccttttgggcatctggtcgagagaagacaagattttctctatttacagtgaggcaataaatatgtttgccacctttgg

SEQ ID NO: 63482 - DNA, 403 bp, Homo Sapiens
gaattatccccaacaccatgaatctttttgagagaaccttatattttatatagtcctctagctacactattgcattgttcagaaactgtcgaccagagttagaacggagccctcggtgatgcggacatctcagggaaacttgcgtactcagcacagcagtggagagtgttcctgttgaatcttgcacatatttgaatgtgtaagcattgtatacattgatcaagttcgggggaataaagacagaccacacctaaaactgcctttctgcttctcttaaaggagaagtagctgtgaacattgtctggataccagatatttgaatctttcttactattggtaataaaccttgatggcattgggcaaacagtagacttatagtagtgttgggcgataacatcacggg

SEQ ID NO: 63483 - DNA, 299 bp, Homo Sapiens
gtaatattgtcaaatgtctctatggattctgacagagatttctttttgttttgttattcttttggttgtcagtttcattttaacgagtgtaactagtaacattttattctttggattttgtataattacagtacatgattgtgtattgtgacatgaatgctgtcaaaatgacattgatggcattgtgaagcctgttactttgtgtcacttcctgataaataagaggtgatgacatggatatacaacagaaaaccctttgagttgaaagtaaacccaagctggctgcttccctgtggcaa

SEQ ID NO: 63484 - DNA, 590 bp, Homo Sapiens
tgaaacaaataatgagttctttaatctgaggtatgccattttgaagactgagacgttggagttttatcctagaggataaaggaaatctttgggaaagtcagtattttatatagcaaaaatatgaacctcaaactgaatcctctaaaggccccatacaatgaagtagacattggtggaaacatttacacccagtcagcttgaagagtttcaaatggaccctaccactgagaaatcaagatggcagtctactatggggaattgaggaaaaatggattaatacaagagtcctgtgataatatacaaccaagacagggttcttttaacatggattccatgcagtgaatgaagacataggtttcttacccaacacaaatggacagtggatttgactttctaaagactttttttgtggacattttgacatttggagaagaaagatggcacactaacccagataatagtttttatgcctggaattttttgcagttagatttgtatacgtatgacctcttgaaatgttaatttttaataaaatttgtaacacttaaaaatttctcagtttgggtatcttttccaagttggcacacgtt

SEQ ID NO: 63485 - DNA, 858 bp, Homo Sapiens
ctcgatactccaggcagctgttcctctgctgaggtcaaggagccgccaggatagtccagctccaggaataccttggagctttcatctaattcccatctagcttctaaggactgggcccatgtaacttgtgttccatttctggcatccatgctaagtagagggaagtatcttgtgaagaactttctgatgtgatcatactaggaactgtagtagaaagaacacttttatctattataaggatcactgttgttcatctgagcctctggtctcagttctctgctccgcctatggcaacttatttgtatgtattgttctttttttgggaactgaaatgtgatgttgagtgttttgtaatattagccataattttcaaaatcattttctaattcattgaagattaaacattatctttgtatgaagtcaaaaatgaatgtaattgtccacatccattattatgttcacaacatgacactctaacagaagtaaactgttgctgcatatttaatactattttctctttacggacaagttgtaccattgtgtttatctcgccattaatagtgagggacatattctctctcgtgctaaggagacaggctcacatattgagggagtgaccggtgcccgcgagacagaaagaacaatgtcagccacatcaggaccgctggggcttcgagtctgccctaatttgggtttgtctaggagctccagcctgatcttggattgtcaggcgtctctcaacctgccagccacctgagatgctgacccgcagtgaaggctgcactagttttctacactacaggaattactgttgatgatttttgctgttgtttcatgatgcgtcctcgagttggtccg

SEQ ID NO: 63486 - DNA, 1055 bp, Homo Sapiens
ggacacagaacgaagacttcaaaaagcttctgactgatgcagaaaactcggtgaataagttaaccaacaaactacctgatctttggcgcaagattgaaagtatcaaccaacagctgttgcccttgggaaacatctctgacaacatggacagaatacgagaactaattcagcaggccagagatgctgccagtaaggttgctgtccccatgaggttcaatggtaaatctggagtcgaagtccgactgccaaatgacctggaagatttgaaaggatatacatctctgtccttgtttctccaaaggcccaactcaagagaaaatgggggtactgagaatatgtttgtgatgtaccttggaaataaagatgcctcccgggaataaaatcgcattgccatttttggatgccagctcacctgtgtctacaacctgggggaccgtgaggctgaactccaagtggaccagatcttgaccaagagtgagactaaggaggcagttatggatcgggtgaaatttcagagaatttatcagtttgcaaggcttaattacaccaaaggagccacatccagtaaaccagaaacacccggagtctatgacatggatggtagaaatagcaatacactccttaatttggatcctgaaaatgttgtattttatgttggaggttacccacctgattttgaacttcccagtcgactaagtttccctccatacaaaggttgtattaaattagatgacctcaatgaaaatgttctgagcttgtacaacttcaaaaaaacatccaatctcaacacaactgaagtggagccttgtagaaggaggaaggaagagtcagacaaaaattattttgaaggtacgggctatgctcgagttccaactcctctctcttttggtagctctgaattcagtttgtatctcaccatgagcttgccatcttctatatttagagatatgaagcgatccccgttttctgcaaagaacagcaagcctctatccacggtggtctgaatgtctgtccaaaggttgggatgggagcatgtgttgagttgattcgcgacc

SEQ ID NO: 63487 - DNA, 565 bp, Homo Sapiens
  misc_feature (466)..(466): n is a, c, g, or t
ataggagtggagaacatgcacaattactgctttgtgtttgctctgggatacctcacagtgtgccaagttactcgagtctatatctttgagtatggacaatattctgctgatttttcaggcccaatgatgatcattactcagaagatcactagtttggcttgcgaaatacatgatgggatgtttcggaaggatgaagaactgacttcctcacagagggatttagctgtaaggcgcatgccaagcttactggagtatttgagttacaactgtaacttcatggggatcctggcaggcccactttgctcttacaaagactacattactttcattgaaggcagatcataccatatcacacaatctggtgaaaatggaaaagatgagacacagtatgaaagaacagagccatctccaaatgtaaggtcatgagatttatctggagcctttacagcatgtattgacttgcggntgttcagaagctcttagtttgtgggctgtcctttttatttcacttgaccatctgtacaacattacctgtggagtacaacattgatgagcattttcaagc

SEQ ID NO: 63488 - DNA, 428 bp, Homo Sapiens
tgaaacagaaaaaagatgccaagtttatcaaagaagagtggtgttaactactagctctggagagtttttgatctggagcaactcagtcagatttgttatcgatgtgggtgtggaaagaagaaaggtgtacaacccgagaataagagcaaactcgctcgtcatgcagcccatttgccagagccaggcagagatacgcaaggcagatttcttgcgctcatcttcttcaggaaaatttttctgcctgtacactgaagaatttgcctccaaagacatgacgccactgaagccagcagaaatgcaggaagccaacctaacaagcatggtgctttttatgaagaggatagacattgcgggcctaggccactgggacgtcatgacctgaccagcaccagaaagtttgatgcaggcagtggaagacttagattatc

SEQ ID NO: 63489 - DNA, 1203 bp, Homo Sapiens
  misc_feature (34)..(34): n is a, c, g, or t
  misc_feature (786)..(786): n is a, c, g, or t
  misc_feature (858)..(858): n is a, c, g, or t
  misc_feature (939)..(939): n is a, c, g, or t
  misc_feature (1015)..(1015): n is a, c, g, or t
ccggagggtgtgtgttgggcaaagccggaggagnaggaggacgattgttttacggatcccgtgatcggcccgtccttctcccctttcccccctccctaccgcccctgtcccgccggggagcggcggcggccttggactttgctgtctttcctcgcggagacagatttcaacactacacttgcacaatgtctttgaaaccaagagtagtagattttgatgaaacatggaacaaacttttgacgacaataaaagccgtggtcatgttggaatacgtcgaaagagcaacatggaatgaccgtttctcagatatctatgctttatgtgtggcctatcctgaaccccttggagaaagactttatacagaacctaagatttttttggaaaatcatgttcggcatttgcataagagagttttggagtcagaagaacaagtacttgttatgtatcataggtactgggaagaatacagcaagggtgcagactatatggactgcttatataggtatctcaacacccagtttattaaaaagaataaattaacagaagcggaccttcagtatggctatggtggtgtagatatgaatgaaccacttatggaaataggagagctagcattggatatgtggaggaaattgatggttgaaccacttcaggccatccttatccgaatgctgctccgagaaatcaaaaatgatcgtggtggagaagacccaaaccagaaagtaatccatggggttattaactcctttgttcatgttgaacagtataagaaaaaattccccttanagttttatcaggaaatttttgagtctccctttctgactgaaacaggagagtattacaaacaagaagcttcanatttattacaagaatcaaactgctcacagtatatggaaaaggttctaggtagattaaaagatgaagaaattcgatgtcganaatacctacatccaagttcatatactaaggtgattcatgaatgtcaacaacgaatggtagcagaccacttacagtntttacctgcagaatgtcataatataattcgacaaggagaaaaaaatgacatggcaaatatgtaccgtcttactccgtgctgtgtcccctgggttaccctcatatgattccgggagcttgcaaaaccaccatcccatgatgaagggcctttcggagccaaacacgcaaaccctttacttccaggaaaac

SEQ ID NO: 63490 - DNA, 963 bp, Homo Sapiens
gagatccgtgctcagctcacagagcagatgaaatgcctggaccagcagtgtgagcttcgggtgcaactgttgcaggacctccaggacttcttccgaaagaaggcagagattgagatggactactcccgcaacctggagaagctggcagaacacttcctggccaagacacgcagcaccaaggaccagcaattcaagaaggatcagaatgttctctctccagtcaactgctggaatctcctcttaaaccaggtgaagtgggaaagcagggaccataccaccctgagtgacatctacctgaataatatcattcctcgatttgtacaagtcagcgaggactcaggaagactctttaaaaagagtaaagaagtcggccagcagctccaagatgatttgatgaaggtcctgaacgagctctactcggtcatgaagacatatcacatgtacaatgccgacagcatcagtgctcagagcaaactaaaggaggcggagaagcaggaggagaagcaaattggtaaatcggtaaagcaggaggaccggcagaccccatgctcccctgactccacggccaacgttcgcattgaggagaaacatgtccggaggagctcagtgaagcaagattgagaagatgaaggagaagcaccaagccaagtacacggagaataagctgaaggccatcaaagcccagaatgagtacttgctggccttggaggcaaccaatgcatctgtcttcaagtactacatccatgacctatctgaccttattgattgttgtgacttaggctaccatgcaagtctgaaccgggctctacgcaccttcctctctgctgagttaaacctggaacagtcgaagcatgagggtctggatgccatcgagaatgcagtagaaaacctggatgccaccagtgacaagcagcgcctcatggagagtgtaccacaacgtcttctgcccccctatgaacttga

SEQ ID NO: 63491 - DNA, 1253 bp, Homo Sapiens
gggaagatggcgacgcggcgactatcccatcggtagccacggccacagcagcggctctcggcgaggtggaggatgaagggctcctggcgtcgctgttccgggaccgcttccccgaggcccagtggcgcgagcggcccgatgtgggccgctacctccgggagttgagcggctcggggctggagcggctgcggcgcgagcccgagcgcctggcggaggagcgggcgcagctgctgcagcagacgcgcgacttggccttcgctaactacaagaccttcatccgcggcgccgagtgcaccgagcgcatccaccgcctgtttggcgacgtggaggcgtcgctcggccgcctgctcgaccgtttgcccagcttccagcagagctgcaggaactttgtgaaggaagccgaggagatcagctccaaccgccggatgaatagcctgaccctaaaccggcacacagaaatttggaaatactggagattcctcagctcatggacacctgtgtccggaacagttattatgaagaggccctggagcttgcagcctacgtacgccgactggagaggaaatactcttccatccctgtcatccagggcatcgtgaacgaagtgcgccagtccatgcagctgatgctgagccagctgattcagcaactgaggaccaacatccagcttcctgcctgcctccgtgtcattggctacctgcggcgcatggacgtcttcactgaggctgagttgagggtgaagtttcttcaggcccgagatgcttggctccggtccatcctgactgccattcctaatgatgatccctgtttccatattacaaaaaccatcgaggcctcccgtgtccatctctttgatatcatcacccagtaccgtgccatcttctcagacgaggacccactgctgccccctgccatgggtgagcacactgtgaatgagagtgccatcttccatggctgggtgctacagaaggtctcacaattcctgcaggtgctggagaccgacctttaccggggcataggcggccacctggactctctgctgggccagtgcatgtactttgggctgtccttcagccgggtgggagctgatttccggggtcagttggctcctgttttccagcgggtggccatcagcactttccagaaagcaattcaggaaacagtggagaaattccaggaagaaatgaactcctacatgctcatctcggctccagccatcctgggcaccagtaacatgcctgctgctgtgccag

SEQ ID NO: 63492 - DNA, 856 bp, Homo Sapiens
ggtatacagcctgagagaatatttgaacaataaacggcaaaatacctttgtgttcctctactagactaaaaatttcctatttattagtggggtgattaattaatcaccaataatttaatgaacatatatattagaaataccttaatgaaggagaaagtaagcacataagtaggtcatatttatatgagactactaggtttttggcctttgttatgttgaacacgtagatgcttactaatttttatatttaaacttctactatgtaagataaattgtaaaggattagaacaaagcctcaaatgtaagaaagcaattaagaatgataaaatgtgtttggtttagataccctcacttaaaatagaagatacagtgttccatgtatttgataaagttaaagtgaaaatcatgttagactcatctaatcttcaacatcagaagatccgaatgtccctggtagaaccacagataccaggaataagcattcctactgatacttcaaacatggaccttaatggaccaaagaaaaagaagatgaagcttggaaaatagctatattcaacaaaaatcttcaaagactggttgctttttttaaaagaaaaaacttgaaagaacacttctaagcctaagtgtgtgatacagtttgttacttttaagtacattttaataatttcagacatctgcatttttattgaacagttgtctgtatctgacccatcatactactatacttctgggttgaacagaattatttatgcagaataattcaattgaatatccatcacttaaatacagtgacaggacagcaacttcagggatctgtaaagatcatttaaatggagtgctcacctcattgagg

SEQ ID NO: 63493 - DNA, 709 bp, Homo Sapiens
aacctgacaagatttctttttcccttttcagggggaaagggtcaccttaaaaataaattattttcagggactttgggaatctaatgataaatattacacataatctatgaatagcttaatcctttatatattccttaaaataggaattcctcgacatcactcctggccacactttccttgcctgtgttgttgctatgtgtatttgaaagtaatatctgcattccttttaagatgttctgtaagtcatatttgtcagttatacagagtagtcttccttttccccacgttcagtgtaatctcactgaacagtaataatagccatagctaacaacatctgcacagcaccttacagtttgcaaagaacgttcacacattctcatttgagttttgcatagtgaacctgttacgagatgtctcttgacgtcgatgctaaaagtgttagaatctttacatcactagagtcattgaatatgctgtagtattgaatagtgccctgactagggggaggatttggatgtgctgcatttcaagccgtgtataatcatcaaaatggggggcttgagttctttagctacttgaatccgatttacttctgttaagtgatgcttttctaaccgttttctggatggattttgtattcactatattgtagcttgtaatttgtataaatgtaccatctgatgtcattaaaaaaagtgtttgtagtgct

SEQ ID NO: 63494 - DNA, 1241 bp, Homo Sapiens
  misc_feature (542)..(544): n is a, c, g, or t
  misc_feature (546)..(546): n is a, c, g, or t
  misc_feature (548)..(558): n is a, c, g, or t
  misc_feature (560)..(566): n is a, c, g, or t
  misc_feature (568)..(895): n is a, c, g, or t
  misc_feature (1087)..(1088): n is a, c, g, or t
  misc_feature (1090)..(1094): n is a, c, g, or t
  misc_feature (1097)..(1097): n is a, c, g, or t
  misc_feature (1102)..(1102): n is a, c, g, or t
  misc_feature (1126)..(1126): n is a, c, g, or t
  misc_feature (1206)..(1206): n is a, c, g, or t
cttgctacgaggttgtggccggagtatgtatgaggtccatcctggcctgagcagtggctcacccaccggccttgaagaggtgagcttggcctctctggtccccatggacttagggggaccaggccagaactctgacagagctttgggggccgtgatgtgattgcagctcctgaggtggcctgcttagccccaggtcttaggaatgaacttctgttggaacttgcataggcgcctagaatggggctgatgagaacatcgtgaccatcagacctacttgggagagaacgcagagctcccagcctgctgtggaggcagctgagaagtggtggcctcaggactgagagcccggacgttgctgtactgtcttgtttagtgtagaagggaagagaattggtgctgcagaagtgtacccgccatgaagccgatgagaaacctcgtgttagtctgacatgcactcactcatccatttctataggatgcacaatgcatgtgggccctaatattgaggccttatccctgcagctaggagggggaggggttgnnncngnnnnnnnnnnncnnnnnnncnnnnnnnnnnnnnnnnnnnnnnnnnnnnnnnnnnnnnnnnnnnnnnnnnnnnnnnnnnnnnnnnnnnnnnnnnnnnnnnnnnnnnnnnnnnnnnnnnnnnnnnnnnnnnnnnnnnnnnnnnnnnnnnnnnnnnnnnnnnnnnnnnnnnnnnnnnnnnnnnnnnnnnnnnnnnnnnnnnnnnnnnnnnnnnnnnnnnnnnnnnnnnnnnnnnnnnnnnnnnnnnnnnnnnnnnnnnnnnnnnnnnnnnnnnnnnnnnnnnnnnnnnnnnnnnnnnnnnnnnnnnnnnnnnnnnnnnnnnnnnnnnnnnnnnnnnnnnnnnnnnnnnnnngcgccacggcgaccgccaaaagccccagcccaacccagagccacaaagcacgaccacaagacagcacgccccgccgccccacccgccggagcgccacaacaacgccaagcgggcgccgccaccacacaacacgacaacccaggaaagcaaaacccccacctcggagacggcgcgacactagcgcgctatttnncnnnnnccnacccngccacccccaccccacgcacctcncgaacaccacacaagaaagacacaggaaactcacacgcggagcccccaacctagaccccgcactcgcctaaatagcaagnatctttaacaacacccgtcacgcacatcttctccg

SEQ ID NO: 63495 - DNA, 1065 bp, Homo Sapiens
tggaccggtccggaattcccgggattgttcctgcagttacaagacctaagttccaagaagcagcagtcccacaacattctggatctgcttcgaacctggaatatccggatggtcaccatcatgtccataatgctgtgacttgtattatttggctacagtcctggtgatggtgggcaagtttggagtcacggctgccttttccatggtctacgtgtacacagccgagctgtatcccacagtggtgagaaacatgggtgtgggagtcagctccacagcatcccgcctgggcagcatcctgtctccctacttcgtttaccttggtgcctacgaccgcttcctgccctacattctcatgggaagtctgaccatcctgacagccatcctcaccttgtttctcccagagagcttcggtaccccactcccagacaccattgaccagatgctaagagtcaaaggaatgaagacacagaagaactccaagtcacacaaggatgttaaaagatggtcaagaaaggcccacaatccttaaaagcacagccttctaacatcgcttccacgtaagggagaaactgaagaggaaagactgtcttgccagaaatggccagcttgtgcagactccgagtccttcagtgacaaaggcctttgctgtttgtcctcttgacctgtgtctgacttgctcctggatgggcacccacactcagaggctacatatggccctagagcaccaccttcctctagggacactggggctacctacagacaacttcatctaagtcctaactattacaatgatggactcagcacctccaaagcagttaatttttcactagaaccagtgagatctggaggaatgtgagaagcatatgctaaatgtacattttaattttagactacttgaaaaggcccctaataaggctagaggtctaagtcccccacccctttccccactcccctctagtggtgaactttagaggaaaaaggaagtatttgcacaaggagtttggattcttaccttttttcagttacagaggacattaactggatcattgcttccccaggacagga

SEQ ID NO: 63496 - DNA, 973 bp, Homo Sapiens
  misc_feature (209)..(209): n is a, c, g, or t
  misc_feature (619)..(619): n is a, c, g, or t
cccctttgacaagagcagcctccgcgggctggagccatgtgccatctctattgaggtgctgggggcccgacatctgccaaagaatggccgaggcattgtgtgtccttttgtggagattgaggtggctggagctgagtatgacagcaccaagcagaagacagagtttgtggtggacaatggactcaaccctgtatggccagccaagcccnttccacttccagatcagtaaccctgaatttgcctttctgcgcttcgtggtgtatgaggaagacatgtttagtgtccagaatttcctggctcaggctactttcccagtaaaaggcctgaagacaggatacagagcagtgcctttgaagaacaactacagtgaggacctggagttggcctccctgctgatcaagattgacattttccctgccagcaggagaatggtgacctcagtcccttcagtggtacgtccctgcgggagcggggctcagatgcctcaggccagctgtttcatggccgagcccgggaaggctcctttgaattccgctaccagcagccgtttgaggacttccgcatctcccaggagcatctcgcagaccattttgacaggtcgagaacgaaggggccccanagaaggactcgggtcaatgcgagacaaccgcctctagttgtaccccagcctcgttggagagccagcaggtgctgtgcgcctttgtagaatgccgcgaactgggttctttggaagcagacccctgtggcggccttccgggtctcgcagcctgaagcctggaattccagcagtgaatgcctagacagaaaccaagccattcagtgagatgtaatcactgtttggggcctccatgccccagctctggatgaagggcaaaactgtactgtgttgcgcataaagcacacacatctggccctgacttctgcagatggatccttccatcttgtggggccaggaccatggccgaagcccctt

SEQ ID NO: 63497 - DNA, 359 bp, Homo Sapiens
ttgatgtgaaatgccatggttccagttgaattttaagcatattttcatttagatataaaatatatgaagtatgctttgttgattatagtgagaacccatgacatagttaaccaaagaatatgtttggttcaaataaaaatagaagcttaatactgggcattcatactttttaaagagaatgaatgaagaaatcggtttcctgctgtagttctctatgggtaagtcttagtaaagacgagaatgctgaagtcggccgtggcgattccctcctaggaactgggaggtgtggcttgcccattacccgcttgaagctcacatctttaccctcctctcccactgtggtttgatcttcagtctca

SEQ ID NO: 63498 - DNA, 674 bp, Homo Sapiens
  misc_feature (16)..(16): n is a, c, g, or t
  misc_feature (504)..(525): n is a, c, g, or t
agaggatcctcggatnggcgacatttcaacggccaatactcggactggggcatgggactccagagtagggaaaagacaaaagatttggcagcctgacacaggcaacctacccctctctctccagcctctttatgaaactgtttgtttgcccgtcctgccctaaggcagaagatgaattgaagatgctgtgcatgtttcctaagtccttgagccatcatggtggtgaccattgccactagggatatgaggcccgtgccacccagagggtggtgcccagtgccacctcccttccgatctattcccctctgcattctcggagcacccccgtttgcctttgatgtgtccgctgtgtatgttagctggactttgatgagccagatttcctgagcggtacactcccaagagataggagaacttgccgcctcttcttttttgtccctttatccaactccgataagctttaacaaaatccctggaagatcatggacatgtggaatgggcaannnnnnnnnnnnnnnnnnnnnnaacaaagtctgaactgaacagaacaagactttttcctcatacatctccaaattgtttaaacttactttatgagtgtttgtttagaagttcggaccaacagaaaaatgcagtcagatgtcatcttgatatgtcgccatccggggtcctca

SEQ ID NO: 63499 - DNA, 836 bp, Homo Sapiens
  misc_feature (87)..(87): n is a, c, g, or t
ctggggtgagcctgcccccgaagacccccccaagcagcgttgccgggcccccgcctgtgatcattttggcaatgcaagctgcaacgnctactgcaacgaatgctttcagttcaagcagatgtatggctaaccggaaacaggtgggtcacctcctgcaagaagtggggcctcgagctgtcagtcatcatggtgctatcctctgaacccctcagctgccacttgcaacagtgggcttaagggtgtctgagcaggagaggaaaagattaagctcttccgtggtgcccacgatgctcaggtttggtaacccgggagtgttcccaggtggccttagaaagcaaagcttgtaactggcaagggatgatgtcagattcagcccaaggttcctcctctcctaccaagcaggaggccaggaacttctttggacttggaaggtgtgcggggactggccgaggcccctgcaccctgcgcatcaggactgcttcatcgtcttggctgagaaagggaaaagacacacaagtcgcgtgggttggagaagccagagccattccacctcccctcccccagcatctctcagagatgtgaagccagatcctcatggcagcgaggccctctgcaagaagctcaaggaagctcagggaaaatggacgtattcagagagtgtttgtagttcatggtttttccctacctgcccgggtcctttccctgagacccggccagaaatgcagaaaccatccatgggactgtggattctgaaggcttgctgaaaactgaaccttggttcacattgtaccagaaaaaaacaagctgcctcctttaataataatgcaccccttttt

SEQ ID NO: 63500 - DNA, 560 bp, Homo Sapiens
gggtggggctgggtcccgacagcgtgaggactgccacttccacgaactcactgtttggaataaatgatcactttgtgcatttccaaatcaaaggacaagcggacaaaatgcatcccaagatcaaggaagggacaggccagcttcctccccacacgcctccccggctgcctctgtgggcttctcctggggggcccaccccacccctgccagtctcctggagatgcttgaggatcggtcctccccagaaccaggccaggacgttgcccctggggcctggtgaccctgtgaggtcaggtcccccagattgaggtctgagtgtgggcaagtgtgtcaaaaggggctgccccccaggggagatgaggctgagagcagggagttgaggccgaagaagtcaaggcccctcccgcaaatgtgtacccctgcccgcgccactgcaccccgccgcacccccacctcccccgggggccctgctgcggatgccggagtgggagagtctctgagctgtgagattgatcttgcccctaattggagaggaagccgggcgccaagacacacggggc

SEQ ID NO: 63501 - DNA, 672 bp, Homo Sapiens
ttctcctctctttgctttgtcccccccactctgatacgattcgagctcgtaccccaacgatgtcctcagctcacttccctattagtggaaaggggcatgaaataatctttgttttatgccatttaaaaattattcttaatctaatctgataatcagatattttacatatcatattgtgattatttttaaatatggaagcactgttttcataaactcttaaattgttagtaaagagttagcctacatttgttataaaatgtaaagagaagatgaaaatggacttttcttccagttttacagctgttctcttccgttgatccccactggctcttctttcatttcagcctcttggttctttcttaaaagaaaaccatgtctttttccccttagtccagaggtagacatagctgaacagaaagcttagacattcccatttagtgtatttgcttctttgtgagattaatttgtttctctttctctttccctcttctctagtgtggattctttaaacgctctaggtacgatgacagtgttccccgataccatgctgtaaggatccggaaagaagagcgagagatcaaagatgaaaagtatattgataaccttgaaaaaaaacagtggatcacaaagtggaacgaaaatgaaagctatcatagctgaggaccatcgttg

SEQ ID NO: 63502 - DNA, 413 bp, Homo Sapiens
tcttgctatgtctgctaaagaacgagcatcagcctttcaagcttgacaggctgtgtgatgtgttctgaaagtgtccagggcaaagcgtagggagagggtggatttgtgcagggtgcagctctggagaagaagctggatcactcttggtcccattccctaggccctgagcaagtcaggctcctggctctgggtgtggttcccccaaacgaagtactggacttcagcctgtgaggggagggttgagggaggctctggaaagcccagccacacctgagtccctggcagtagccttggggcagagggcaacccgcagagtcccagagattatgtgggcagtgggcagggagagccttggcgcctctgttgcccaccacttccccaggaaggagggacagcatttctctggctggttc

SEQ ID NO: 63503 - DNA, 1195 bp, Homo Sapiens
  misc_feature (71)..(71): n is a, c, g, or t
  misc_feature (112)..(112): n is a, c, g, or t
  misc_feature (132)..(132): n is a, c, g, or t
  misc_feature (135)..(135): n is a, c, g, or t
  misc_feature (171)..(171): n is a, c, g, or t
  misc_feature (174)..(174): n is a, c, g, or t
  misc_feature (770)..(855): n is a, c, g, or t
  misc_feature (1033)..(1033): n is a, c, g, or t
tggtctcggaaacgaaacgaaattcggtccctgggcctcctcccgggcgctgcggtccctcagcgcgccgncaacccggaacagacccttctcccgccattttcggcgggcntgggagactgaggcccgcgngcntgagctgcgcgccccggaagaggcgggcggcatgcntgngcggtggactgcggggacggggttggcgcccggcagcacgtgttcctggtttcagaatatttaaaagatgcttcaaagaagatgaaaaatgggctaatgtttgtaaaacttggttaacccctgttcaggaagaaggagccatttacttgttcaatatgtgtctacagcaagctgtttgaagtaaaagttttcaaggaaaaacaccattcttggtttataaatcaatcagttcaatcaggaggtcttctccattttgccacacctgtggatcctctatttctgcttctccactacctcataaaggctgataaggaggggaagtttcactcccttgatcaagttgtggcggacaacgtgtctccatactgcatcttgctgttcaacctttctggacttgagaaggcccttctgtgtgcgcctcaccgagctctctactcccccacactctctaattcacaccccattagtaccactattcgagaagctttcacccacgcccccaaaattctttcacttatcttgtctctcctgaaaatcttcctcccctcgccctgttcccctccaccgcgacttgcgccctcctttcttctctattnnnnnnnnnnnnnnnnnnnnnnnnnnnnnnnnnnnnnnnnnnnnnnnnnnnnnnnnnnnnnnnnnnnnnnnnnnnnnnnnnnnnnnacaaaacctcgacgcatctctctctcaccctttatatctccctatcttgtccccacccattgcacacttccatgctttcatacccccaccgatttcacgccgcaaccgccaccacccctatcacccacgcctctctgtcgtaccagatactcccacttcactccccccagtcaccatntcgcttctaactgacgcttcatccactacagctaaccaccgttaccccctgcaccttaaccttctcaccctaccacgcttactcgtctctccgcgtactatactgtaaccctgtaatacgtacatcagccccttaacactcgaaatcgccacgtttctgttg

SEQ ID NO: 63504 - DNA, 277 bp, Homo Sapiens
aaagttaaataaatactagttcccttctcgtccaaaggagcagggaatgggaaccgggaaggcacgaagtctctaaagcatccagaagacccctacaccagggtctggtccgctcctattcgccgcagcctttctgttccgcctgcaacccattttccagacagtaaaaaggcggcgcacttctttctccgtcaggcaccaggtcataaggaacccaagagtctgtgcctctgaggcccaaattatttgctgtttcctcaggggagccggcggccgc

SEQ ID NO: 63505 - DNA, 557 bp, Homo Sapiens
gtagcgctctagagcatccccaggctgatgctgagcgtgaacacatctgagaactaaatgtgcttccatgagactggcttgagaagtcttcagcaccaagttcctgaaagcttttctgtggcaggaaagaatgcaacaaaaaagttaaccaccaccatctctctcctcttcaaagctaatgaatacaattgaaacagacaaaaattccagtagcatccagatccttaagccagaggtgcatgcttctttttaagtatgagggtttgttggtcacagtgggagaggtttcaccaccgcattctgacctcctcctcccaaaaggtgctaaacctctctgacctgtgtacattcacaaaccacagctagaattcctccacctaggattaagctggagagaagtaagtaatttaggtttcatggtactgtagaggccaggctgaaatgtcatatctgaaggaagaaagcagcagctggacaatgtttctttgcaaagcaacactcgaaccaaaagatgcctcaatcccattttgatattcattttagtgaaaggatgcaca

SEQ ID NO: 63506 - DNA, 435 bp, Homo Sapiens
  misc_feature (123)..(149): n is a, c, g, or t
atgacccactccccttggaaatgcatgtatgaactaccctatgaaatgtaagctgcagaatagataaaacacaggtttccactaataaaagacatctgaacgtcctgaatatagagacagaannnnnnnnnnnnnnnnnnnnnnnnnnnaacatgtttaaccaacagaagttatttacagaaattcatatatccaggcacacaaaactcctttattcaaaatcactgctatctttgggactaaacacaggctactttctgtttactcctaacaaaataaagcaagcaaatttgagtcaaatattggtgcactttaatactatcacatctttgaaaactcaatttgagttttaccaattaatgtgtctcatgaagagaagacaccagttttaaaatgagccacaaacagtaaagccctatcagtataaaatttgaa

SEQ ID NO: 63507 - DNA, 570 bp, Homo Sapiens
cggtccattacaggctgatgctcactgctcactgtctatccccacgaaatttagttttatcagtagtcttaaagtgttgatctcaaacaagtacattagaaaaatcatgtttcttctctctcatcttacttttctcttctcagatttctcccttcctagaacattctctctgtttagcactaatgttcacctcgtattttttggaagtgcaaaaatctcaatttgtgtctgtttacagctctctctcctcactgctcacagcaaggggttctgtatcagtggatttcattttgtagctgctgagatgttaaggcaagcctcagcatctgcccctgctgggtgcacaatgctgcttcctcgaagagaagacacagagtccaagtggcaggacttgaggttggcttccactctgccttagaagttaattttccaaagtacattacaaatctctgaggccattaggggaaaaggaaggggtgtggtttgtctttgaaattacggttaatacttttagacagtaagtccggctggttgcagggctattgccccgacagcatcagcctttcagct

SEQ ID NO: 63508 - DNA, 437 bp, Homo Sapiens
tagcagtagatttccaacaccagagattgagctggtcagaagttccacgtgcagtacttgggcatgttacctgtagacaaaccagtcggaatggatattttgaacagtgccatagaaaatcttatgacctcatccaacaaggaggactggctgtcagtgaacatgaacgtggctgatgccactgtgactgtcatcagtgaaaagaatgaagaggaagtcttagtggaatgtcgtgtgcgattcctgtccttcatgggtgttgggaaggacgtccaacacatttgccttcatcatggacacggggaaccagcgctttgagtgccacgttttctggtgcgagcctaatgctggtaacgtgtctgaggcggtgcaggccgcctgcatgttacgatatcagaagtgcttggtagccaggccgcgcttctcagaaagttcga

SEQ ID NO: 63509 - DNA, 753 bp, Homo Sapiens
catatatagcataacacacatttaggaaaagatcaaagtaaagagacgattgagaagctttaagtcatatgttgatatattctctgagaggcagtcttccttggcaaggcttaaaggctgacacattaaaggagaggtatcagaaaattggagatacaaaacgggctacaccaatagaagtgttatgtgaaaattttccagaagaaatggcaacatatcttcgttatgtaagaaggctagatttttttgaaaaaccagactatgactacttaagaaagctttttactgacttgtttgatcgaaaaggatatatgtttgattatgcatatgactggattggtaaacagttgcctactccagtgggtgcagttcagcaagatcctgctctgtcatcaaacagagaagcacatcaacacagagataagatgcaacaatccaaaaaccaggttgtaagttctacaaatggagagttaaacacagatgaccccaccgcaggacgttcaaatgcacccatcacagcccctactgaagtagaagtgatggatgaaaccaagtgctgctgttttttcaaacgaaggaaaaggaaaaccatacagcgccacaaatgactctggacacagacagatcctggggagttacttaatgttcatctgctgtttgtgataaatcatctctgatgacacgatatttcagatcctctaaacaagcaatcaccattgggcatctcttttcatctgatatagccgagaatat

SEQ ID NO: 63510 - DNA, 1186 bp, Homo Sapiens
ccggctggcgcggcgtggtttcactgttacatgccttgaagtgatgaggaggtttctgttgactatatgctacacagcagggacaggcaaaggccatcgcagaagaaatatgtgagcaagctgtggtacatggattttctgcagatcttcactgtattagtgaatccgataaggtctcggtgattcagaatacacctacttttgcaatggggggaagataattgataaacgacttcaagagcttggagcccggcatttctatgacactggacatgcagatgactgtgtaggtttagcaacttgtggttgagccgtggattgctggactctggccagccctcagaaagcattttaggtcaagcagaggacaagaggagataagtggcgcactcccggtggcatcacctgcatcctcgaggacagaccttgtgaagtcagagctgctacacattgaatctcaagtcgagcttctgagattcgatgattcaggaggaaaggattctgaggttttgaagcaaaatgcagtgaacagcaaccaatccaatgttgtaattgaagactttgagtcctcacttacccgttcggtacccccactctcacaagcctctctgaatattcctggtttacccccagaatatttacaggtacatctgcaggagtctcttggccaggaggaaagccaagtatctgtgacttcagcagatccagtttttcaagtgccaatttcaaaggcagttcaacttactacgaatgatgccataaaaaccactctgctggtagaattggacatttcaaatacagacttttcctatcagcctggagatgccttcagcgtgatctgccctaacagtgattctgaggtacaaagcctactccaaagactgcagcttgaagataaaagagagcactgcgtcctttttgaaataaaggcagacacaaagaagaaaggagctaccttaccccagcatatacctgcgggatgttctctccagttcatttttacctggtgtcttgaaatccgtgcaattcctaaaaaggcatgtttgcgagcccttgtggactataccagtgacagtgctgaaaagcgcaggctacaggagctgtgcagtaaacaaggggcagccgattatagccgctttgtacgagatgcctgtgcctgcttgttggatctcctcctcgcttctta

SEQ ID NO: 63511 - DNA, 1188 bp, Homo Sapiens
gggggagggggaggtaggcggggcggcgcgtgacctaaggcctctctgccgcgcgcgcagagccaaggcactgatgtttgaactggaaacttcaaaacgtttaataagagtcttcaggatgggtttgaactagacaagctagaaatttctttagaacaccagctctagcatgcatctcccacttttggctttcctggagaggagcttgaagaggtggttctgcagacagccacagtgatactcaggaaaccagaggaatggatttgacttttctgctaggattctttgttatagtttctccctgagttgtaagaggcatggaaatatacatgaaactgaagaacctgcaaggaagggaagtggaactttccatgctgagtgaaaactaaccaagtggcagttgtgactgaaaacactgaaacctaccacgtccagattcactggattgggggatagaggaacggtcacagctagggagaaagaagtgataccggaaaagaaaacctaaatgaagagaatgaggatgactgcacagtagatggccacctctacctccacagaggcaaagtcagcctcgtggtggaattatttttttctttatgatggttccaaggtaaagggaagaaggcgatccaacaagagctggcatttgttacttttatccttcccagaccctgctagaccaacaggagttgctttgtggacagattgctggagttgtccgctgtgtttctgacatttctgactctcctcctactcttgttcgtctgagaaaactgaagtttgccataaaagttgatggagattacctttgaggtgctgggctgtgctgtggagctccctgatgtcagctgcaagcggtttctggatcagctagttggattctttaatttttacaatggacctgtttccctagcttatgagaactgttctcaggaagaactgagcacggagtgggacaccttcatcgagcaaattctgaaaaacaccagtgatctgcataagattttcaattccctctggaacttggaccaaactaaagctttgagctacaccctgtccagctggtctgtacaaccctttcccccttttcttccctcctgattggggaccatgcctaatgggttgggcatgatgccctcttggccctgcacagggggaacccccggttgtttgctgaaagcaacc

SEQ ID NO: 63512 - DNA, 493 bp, Homo Sapiens
ggttgaacttcagtttcaattaaatcgattacccctctgtgaaatgcactatgcactagacaggatcagggacaatggggttttgtttgcagacatcagtatgactcccaccataccatggagtcctaacagacaatgggatgaacagttggatcctcgactaaatgcaaaacagaaagaggctgttctggccattaccactccacttgcaatccagctgccgcctgtgcttatcatcggaccctatgggacaggcaaaacgttcactctagctcaggctgtcaaacatattctgcagcaacaggagattaggattctcatttgcacccattctaatagtgctgctgatctctacataaaggattatttacatccatatgtagaagcaggcaatccccaggcaagacctctcagggtatatttccgaaatcgctgggtaaagactgtccacccagttgtgcatcagtactgtttgatctcaagcgcacattcc

SEQ ID NO: 63513 - DNA, 666 bp, Homo Sapiens
gatgacagagcgagactccatctccaagaaaaaaaatgtccacatgctcataccgagatttctggcagtgactgcctccgtatcaactgtccccccaatgagctcctgttcttttctttgtagagtcacttatacctactggtcactgaccagggctttctacaggaggagcaagtcgtatgggagagcctgcacaatgtggatggagacagctgcttttgtgactctgactttcacctgagtcattccctgggcaaggggcctggagcagaacggtgggagtggctccccatgaaaagcatgctgcagggtagaccatggtgtgtagggcacgttaggaaaagtgtcagatgtgcacattgtgccgtcagagatgcttatttacatgcatacatgtttaatctgctatgacggccatgtgaacccatgcctctctctctgggttacctcagaccgtctcctcacttggtgtgtattctctggcaccacagataatgcatttggctgtgtgtgctgctctgtggggagaaagagctagagtatttgagggatgtgggagtactgatttggaaaccttgcctgaatatctacggctctgggcctcagcccactgcacaactcttgttctccctaggactacctgattgctctgtccctgcagcagca

SEQ ID NO: 63514 - DNA, 889 bp, Homo Sapiens
tcgatctagcaggatcccctttaacaggctgatgcaggtgtggagtcaatgtgggtgcctcctgcagccgggtgccaggaggggtggaggggccaccctgggctttgtccgggagcctggtcttcccgtccttgggctgacaggtgctgctgcctctgagccctccctgctaagagctgtgtgctgggtaaggctggtggccctttgggctccctgtccaggatttgcgctctggagggtagggcttgctgggctggggactggaggggaacgtggagctccttctgcctcctttcctgccccatgacagcaggcagatcccaggagagaagagctcaggagatgggaagaggatctgtccaggggttagacctcaagggtgacttggagttctttacggcacccatgctttctttgaggagttttgtgtttgtgggtgtggggtcggggctcacctcctcccacatccctgcccagaggtgggcagagtgggggcagtgccttgctccccctgctcgctctctgctgacctccggctccctgtgctgccccaggaccatgaatggcacctacaacacctgtggctccagcgacctcacctggcccccagcgatcaagctgggcttctacgcctacttgggcgtcctgctggtgctaggcctgctgctcaacagcctggcgctctgggtgttctgctgccgcatgcagcagtggacggagacccgcatctacatgaccaacctggcggtggccgacctctgcctgctgtgcaccttgcccttcgtgctgcactccctgcgagacacctcagacacgccgctgtgccagctctcccagggcatctacctgaccaacaggtacatgagcatcagcctggttaagctacgac

SEQ ID NO: 63515 - DNA, 553 bp, Homo Sapiens
tctggtgactattttaagaagaagaagaaaaaagacaaaaataataaggaacccataattgaagatatttctcaacctggagagttctccaacagcttcaggttcatcagtaagtcctggtttatacagtaaaaccatgacccctatatatgaccccatcaatggaacaccagcatcatccaccatgacttggttcagtgacagccctttgacggaacaaaactgcagcatcctcgcattcagccaacccccccagtccccagaagcacttgcggatatgtaccagcctcggtctctggctgataaagccaagctcaatgcaggttggctagactcctcacgctcccttatggaacaaggcatccaagaggatgagcagctgctcttacgatttaaatattattctttcttcgacttgaatcctaaatatgatgctgtccgaataaaccaactctatgagcaagccaggtgggccattctcttagaagaaattgattgcacagaggaagaaatgttgatctttgcagctctacagtaccacggtgctataaag

SEQ ID NO: 63516 - DNA, 797 bp, Homo Sapiens
  misc_feature (711)..(722): n is a, c, g, or t
gggaataatgctctttttcacaatgaactggtcaaattgactatcttgtaaagtgatactttactatgtcagtgaaatttcagtttgattttagtcaaccagattatatcctttgtatctactgatattaacacatcatattaacacatcatttcttaaaaaaacatttcttctgtttggcaatcataattaactctggttatcagcctattttgtaattattgtctttgtcgtcacttttcttgaattgttttctagtcattaaacagatatgaaggcattgccaaagagctttaatatccagtaacaagatccagaaaccacactttaaccagtgatcagttttccgtgctgcattgtaactcagctcattctggcattcaagttttaggcaaaaaaagaggaaacttctaacatttagcttgtaagtcctgacataagatagtgaagatatttatcttctttctaatatttgtatagtccgccaatgtattttcttcccactattcccattaacataccaaacactgtttctaggtccaaagtctatttctaggagtggccaatatttgtattgctgaatctcctagggaatgctaaatgtttcactttagaatacctatttataccaagtagcatgagattagtactagagtgagatttggaatattagtccccctatcacaaactgcttgcctacatggaatagannnnnnnnnnnncaccccacctttcttaaccaggaaatttgcttcccttaaatttgtttggtgatagatgttggctgaattgttcgt

SEQ ID NO: 63517 - DNA, 788 bp, Homo Sapiens
ggggtaccagagtgctcagaaagtcaagataggatatgcctcaccctcagctactccttgttttaaagttcagctctttgagttacttcttcattttctttcgggacacttgggttgaattcagtaagtttcctctgaagcagcctgaagggtgccatccttacagagctaagtggagacgtttccagatcagcccaagtttactatagagactggcccaggcactgaatgtctaggacatgctgtggatgaagataaagatggtggaataggttttatcacatctcttatttctcttttccccttactctctaccatttcctttatgtggggaaacattttaaggtaataaataggttacttaccatcatatgttcatatagatgaaactaatttttggcttaagtcagaacaactggccaaaattgaagtcatatttgaggggggaaatggcatacgcaatattatattatattggatatttatgttcacacaggaatttggtttactgctttgtaaataaaaggaaaaactccgggtatatgtatagatgttcttcattatagacatcttctttgctttcctttggccttgggggagggaggggagaagtgctcttttccacttgtgggggtctcccattggaaacataaatcctatagtcccaggaaggattcagtcccccagtggctttcccatccaaagaagaaagagtttgagtttcttaaactctgctgttctggccacttactcccactagaacaacccagggacaaggtgccaacatg

SEQ ID NO: 63518 - DNA, 1068 bp, Homo Sapiens
tatgtggggacttcctacacgtggctggtgaagaggtatggaagaaaggagaggctttctgcctagaaattctttgagaacacctgaaaagacagtttaatcatgtcacaacactcttaaggctcaagtcagtgttctggtttccggtagctttaggattggattctaaacgagggctggtggtgagtttggtgtttgtcacgtgtcaccctcacccctcacctcctcagtttaggataagagacataatgatttctaccagaatccaaagtaaatccaaagggggaaaaaagacataactgttttttcttctacctttttttgttaaagagttacatctctcacaggaggaaagaattcaagagtctatatgattagttacagagaatattttcatcccctctccctgaatagaaaagcaggggtcaccatttgtatccttacccttgaggtgtttttgaagatgctgtaactcttgaagttgagctgaggcagaaaggttggaaaaatgcagccctctgggtattgtggggagggatgtgatgtagtaagagggtgttttgtggtgctaggattcccacgccaccaacttgcagctttataagagcgctaccaagaaccaccactggggaaaaggttcttattcattgtttctgttggaatgtgatcttgctttctggattttaggaattcaggttactcagtataaaactctgagaaatcagtgtgacttagtccttcacctcctaagataaagtgaatatttctttacaaaataattcatgtccttaatgttaaagatgtaattttattttcaaaacatctataacatgactttcagaagcagttcatttttccaagattcctcacattatactagataaataataggccctcagttaatacccttcagttattgaattaatctagtttgtggaatgaggtgtatcctgccaacttccctctgctcccaagtacactctgagaggtaaaatgctctgggaaatggaacaagaatcgagtggatgctgactctgtgtgcccacctcctcactgattgataatggt

SEQ ID NO: 63519 - DNA, 820 bp, Homo Sapiens
  misc_feature (635)..(635): n is a, c, g, or t
gtagcaatttgtattaaagaaatcacaagtgcaaataaaaagtcatttatcatttgtttaactaaactgtcatggtttagtttacaatttttaaaaagttcttaaaatactgaaaatgcagttgacacttgtgtatggcttatgaagttatttttgatagtcttacattacttgaattgttcaaagtacagtatattttaaattaagaaaagtgaactatatgtatttgttttatacatttaaggcttagactcataaataatgctattgtttatgatttgaaaactttcaggcaaaatccaatttacatttttcccttccctagcaattacttttttccagcttcaactcttcttagttactaatactttgttgactttaaaaatgaaatcattcacaaacttttggtatatgatggagaatgaaaaactagagtcagacagctttaattgacattgtcaacacctccagttatcaggaatacatttttttactgccttaacctgtagtgcgtagaatatgcatccatttcttgaaggagattcatgtttttataagaattttcatgtaattattgcaattgtggtcaaataaagaaacgtttcctgcttgaaattatattgatttaaatgatngtgtgagatgttttcaccatttttcaggcaactgtggtaattctattggtaattaaactgggcagggtatccttttgtaactataaattagtggcatggctccagccatggtacactggtaaaataggcctttttaccaaaacgtggttttgtaacaagggacccataaatttaacattccaccc

SEQ ID NO: 63520 - DNA, 1413 bp, Homo Sapiens
  misc_feature (1131)..(1131): n is a, c, g, or t
  misc_feature (1205)..(1205): n is a, c, g, or t
  misc_feature (1227)..(1227): n is a, c, g, or t
  misc_feature (1237)..(1237): n is a, c, g, or t
  misc_feature (1293)..(1293): n is a, c, g, or t
gctaggtacgaggactgggtgttaatcggcacgagggcgccgcgcagcagtcgcacctgcggaagaacacgctactgcaggacctggccgacaagtaccgccgcgccgcacgcgagatacaggcgggctccgaccctgcccactgcccctgcccgggctccagttccctctccagcgcggccgcgaggccccggcgccgcccggaactgcagcgggtggcagtagagaagagcatcacagaagttgctcaggagctgacagagctggtggaacatcttgtagacattgtcagaagcctgcagaatcagaggcccctatcagaatctggaccagacaacgaactgagcatcctgggcaaggctttttcttctggggtggatctttccatggcttctccaaagctggtgacttccgacacagctgcagggaaaatcagagatattctccatgacctagaagaaattcaggaaaaattacaagaaagcgtcacctggaaagaggctcctgaagcacaaatgcagggagaactcctggaagccccgtcttcctcctcatgcccattgcctgaccagagccaccctgcactcaggagagcttctcggtttgctcagtgggccatccatccaacctttaacttgaagagcctttcctgcagcctggaggtgtccaaggattcccgtacagtgactgtgtctcaccgcccacaaccctatcgctggagctgtgagaggttttctaccagccaggtcttatgttcccaggccctgtcttctggaaagcattactgggaagtggacactaggaattgcagccactgggcagttggggtggcttcctgggagatgagccgcgaccaggtcctgggaaggactatggactcttgttgtgtggaatggaaggggactagccagctctctgcatggcacatggtcaaggaaactgtccttggctcagacagacctggggtggtgggcatctggctgaaccttgaggagggaaagcttgccttctattcagtggacaatcaggagaagcttctgtatgagtgtaccatctctgcctcctctcctttgtaccctgccttctggctgtatggcttacatcctggaaattacctgataataaagcaangtaaaggtgtaaggtttcctaagggattacaacacagtgggtttcctgggtctctctccctgtcatccaatcanggggtagtaacttggacttaangaataccacnttttttagaaaaattaacgaatagaagatggggaatctcactagggttgcccaggnctggtggtcgaattcctgggtctcaagcagtcctccccactcagcctccccagggtgctggggaattacagggtgtgagccaccacacctgggccaagaatacccactttttgaaagtta

SEQ ID NO: 63521 - DNA, 850 bp, Homo Sapiens
  misc_feature (370)..(457): n is a, c, g, or t
  misc_feature (614)..(742): n is a, c, g, or t
aagggggaaaacgcgggcatgccattcagtcgggcgcgaacagtgctccggaactcagagagttttccagacgggctggagatcgcgttccctgcccgccgaggtcccatcgcttccctgctgggaagacaaatgaggcgctttagccgtctccacggccagcccctccctcataatccgagattctttgtgggctcttagtccatagctgcctttgaggtggtgtagaccttgctaaccaggacggcccagtaggcagagctcatttttattcctgtctgcaatcgtgcaaaaacgcctcttatggaaaagccagagcgccaggagtcagcaaaacacactaaagattgggcagtcactggggagaacnnnnnnnnnnnnnnnnnnnnnnnnnnnnnnnnnnnnnnnnnnnnnnnnnnnnnnnnnnnnnnnnnnnnnnnnnnnnnnnnnnnnnnnncatttggtgctgaagacccaggacaggcggactcctttgggagaccagtgccctgttgtcgccctcactccgtgcggagatccacctatgatctcacggtcctcagaccaaccagcccaaggaacatcttgccaatttcaaatcggaagataggagnnnnnnnnnnnnnnnnnnnnnnnnnnnnnnnnnnnnnnnnnnnnnnnnnnnnnnnnnnnnnnnnnnnnnnnnnnnnnnnnnnnnnnnnnnnnnnnnnnnnnnnnnnnnnnnnnnnnnnnnnnnnnnnnntttgtgatttgttcctgccccacgctaactgataccatatattcctcccccgcccttgagaatgtaacttgtacacctatccccaaacctataagaactaatgataat

SEQ ID NO: 63522 - DNA, 959 bp, Homo Sapiens
  misc_feature (732)..(732): n is a, c, g, or t
  misc_feature (789)..(848): n is a, c, g, or t
  misc_feature (873)..(873): n is a, c, g, or t
  misc_feature (890)..(890): n is a, c, g, or t
gggggttttgaaatcgggccgcggggggtctctcaagctggttccaacgctgaggccccacagcctcccaattccgggcagacccctgacacctgctgtctggccccttccggcctgaagctgcagccgcgccatgtccacccctccgttggccgcgtcggggatggcgcccgggcccttcgccgggccccaggctcagcaggccgcccgggaagtcaacacggcgtcgctgtgccgcatcgggcaggagacagtgcaggacatcgtgtaccgcaccatggagatcttccagctcctgaggaacatgcagctgccaaatggtgtcacttaccacactggaacatatcaagaccggttaacaaagctacaggataatcttcgccaactttcagttctcttcaggaagctgagattggtatatgacaaatgcaatgaaaactgtggtgggatggatcccattccagtcgagcaacttattccatatgtggaagaagatggctcaaagaatgatgatcgggctggcccacctcgttttgctagtgaagagaggcgagaaattgctgaagtaaataaaaaactcaaacagaagaatcaacagctgaaacaaattatggatcaattacgaaatctcatctgggatataaatgccatgttggcaatgaggaactaagctgatatttaaatttcctgctttacacatgttataccattgttttttccctcaagtatttntttccctgtggaagaagattatttatctgcttttattttagtcactaaaactaaagnnnnnnnnnnnnnnnnnnnnnnnnnnnnnnnnnnnnnnnnnnnnnnnnnnnnnnnnnnnntgaaagattattgtaataaactttngatggggttttgtattnttggttaatcttcatgaattgaataattgtttttttaaagcaaaataaagttttttaaataaatgttaa

SEQ ID NO: 63523 - DNA, 557 bp, Homo Sapiens
ccttttacaggctgatgcgttatctgaagaaagggacgttcaagtaccggatcagcgtgggcgcccctgtctacatggcggcagtcattgagtacctggcagcggaaattctagaattggccggcaatgccgcgagggacaacaagaaggcccggatagccccgagacacatcttgctggcagttgccaatgacgaggagctcaaccagctgctaaaaggagtgaccatcgccagtggaggcgtcctgcccagaattcaccccgaactgctggccaaaaagcgagggaccaaaggcaagtcggaaacgatcctctccccacccccagagaaaagaggcaggaaggccacgtcaggcaagaagggggggaagaaatccaaggctgccaaaccacggacgtccaaaaagtccaaaccaaaggacagcgataaagaaggaacttcaaattccacctctgaagatgggccaggggatggattcaccattctgtcttctaagagccttgttctgggacagaagctgtccttaacccagagtgcatcagcctgtttcaggtat

SEQ ID NO: 63524 - DNA, 654 bp, Homo Sapiens
  misc_feature (128)..(194): n is a, c, g, or t
ccatgttgggcatggaagggaggaagagctgctctctgggtcccatcacagtctcgttattaattataattattaaagtttactggcgtgagccaccactgcacctacacctggccatgctagggctnnnnnnnnnnnnnnnnnnnnnnnnnnnnnnnnnnnnnnnnnnnnnnnnnnnnnnnnnnnnnnnnnnnagatggggagactgtgcagggattcaaacttgggtgctccagctcctgactctgtggccttggagacgccctgcactccaggacttgtgtttcctcacttggcggtgagtggttgggctggtccttgaggcctccaccctcaccagtggctgagcattcattcaatgggcagagagaacgttgggctgcagcagaatgggatctcccgtacagcagttggcaacccacagcggggttgccaggtcagcattgatgccttggctactgacttcacctttaaccccactggccatttttcaaatgaatgtggttggtcctaagggagagcaggtggaaagatcctggccccagcgtgaatccaggcactgctgtgcctgtctgagtagtgccctctggggaaccagctagccaggcaacctgccatcatgttgcctagtgagctcttggcatcagcctgtta

SEQ ID NO: 63525 - DNA, 854 bp, Homo Sapiens
  misc_feature (708)..(720): n is a, c, g, or t
ccgtgatccctcgagggatacttctagagcggccgcctttttttcctttcggaatttagtttcccaagtttattgtaagtggttttaagttaagtctcatccaaacaagttatcacacagcacttaaccaagccctgggatttactgtcttgatgactacacggctttgcacagtctgagatgcttcagtgtgcaaggcagcagctgggggggaggagggggtcttcacagggacagctggcaagagacttcctgaggcacatcagctacgttggtcaatttagggcacggtctggttctgcagctttgaaaggtggattctttctattagcacactttacaagagggattgtaaaggattaactcagtcaccagaaacgaaacaccacttcagaaattcagagacctctgatcaacagaacagacatttgggctttaactgctaaagcagctacctacttggggaaaccatggcattctgctgcctggacagcaggaattaagagagatttcagagttactggcacgaggacaaagcctctcagctcgcttcaccttggcaaccttaaacagtccctccttggtctctatgatagcagtatgttcctttggatggaatacttggtttggaaataatgtagtcaaatgtaggatactgtaagtactcctcaacagtcacaagtccatcctagtatcttaaatagtgannnnnnnnnnnnnaattaacaaaagaggtttattggacttacagttccacgtggatgggaaggcctcaaaatcatgggggaaggtgaaagccacatctcacatggcagcagataagagacaaaacggtagtgatctttaagaacaga

SEQ ID NO: 63526 - DNA, 559 bp, Homo Sapiens
  misc_feature (222)..(260): n is a, c, g, or t
ccagtactgcttcttgaaaccggggtgtgtgtggctcagcttccacggcgtgtatggttcggtccatgtgtgtgcgtgtgtatactataagagaactgtcgtagtctgattatagcactattggaggaggactaaagttgcctgacaactttatgtgttatgccagaactctgagggcaaactgctgaaaaacaaagggtttaaggatgacatttctgaccnnnnnnnnnnnnnnnnnnnnnnnnnnnnnnnnnnnnnnnaatgtagacaatacagctttggaaggggaagtctcatacaggttataggtctttctctctctagatttcaagaagcaggaactggccagttcctgcttcttgaaaggagagaggtggagcaacaaggctttttgcatttgggggaacatgatggcagtcttgacttgcgatctagaagatcagttcaagaaggtaatccaagggcctgatgactcttttggtaaccagacgcctatcagtaaggggaggagatgaaaatggaatgatttcgttccatgccacctgtgccttataacgtg

SEQ ID NO: 63527 - DNA, 1048 bp, Homo Sapiens
  misc_feature (745)..(745): n is a, c, g, or t
  misc_feature (1026)..(1026): n is a, c, g, or t
ccgagacagtctttctcatcttgttcctgccttgaggttaccaggtagaaaactggtgtcatcagctgtttctcccagcatcatacctcaagaggatccttcccagcagttcctgcagcagagccttgaaagagtgtatagtcttcagcacttggaccctcagggagcccaggagctgctggaattcaccatcagggatctgcaaagacttggagaacttcaatctgaattggcaggagtagctgatttctctgccacctatcttcgctgtcaactacttctcatcaaggccttgcaggaaaagttgtggaatgtagctgcccctttgtatttgaagcagagtgatttggcctcagcagcagcgaaacagattatggaagagacctacaaaatggaattcatgtacagtggtgtggagaataagcaggtggtgattatacatcacatgaggctgcaggccaaagctttgcaacttatagtaaccgcacgaactacacgaggacttgaccccttatttgggatgtgtgaaaaatttttacaggaagtagacttttttcagaggtatttcatcgctgatttgccccacttgcaggacagctttgtggaccaactccttgaccttatgccccgactcatgacatccaaacctgcagaagtggtcaaaattctacagaccatgctgcgacagagtgcctttctgcatctcccgcttccagagcagatccacaaagcctcagccaccatncatcgagccagcgggcgagtcagacaaccctttgcggtttacctctgggttggtggttgccctggatgttgatgcaaccctggaagcatgtgcaaggatcctcagaacactgttaaggtccaggtcttatatccaagatggccaaggctcaagatgattcaccccaaagcctgcaagactttccgggaatcctgggcccaagggcgggcaccgggcttcaatcacttcaggtttatctctcccacaaccgctttggacaggaggcatgccaaggtggaaantgaaggcttgctgcttggccta

SEQ ID NO: 63528 - DNA, 411 bp, Homo Sapiens
tggaaaagatattatcgaacaatttcagccactcctctcttgtcagcacttctgagaacacagtttcaagaagcaggaactggccagttcctgcttcttgaaagtgaattttataaaggcaaaatactggagcactaatgcccatgagattgaaggcacagtgtttgacaggagtggaaaagcggttcatcggctgtttgggaaatggcatgaaagcatctactgtggcggcggctcctcttctgcctgtgtatggagagcaaatcctatgccgaaaggctacgagcaatactatagcttcacacagtttgcgctggaattaaatgaaatggatccatcatcaaagtctttattgccacctactgacactcgatttaggccagaccagaggtttcaagaagcaggaactgg

SEQ ID NO: 63529 - DNA, 833 bp, Homo Sapiens
ggaacatgtccaaaaggaaatgaatcagcaacattcaggacacatccgaaggcagtatgaagatgaagggggctttctgaaggaggtagagtcaaggagagtggtctctgaagacacttcacattacatcttgataaaaggcattcaagctaagacagttgcagaagtggattcagagtctcttccttcttccagcaaaatgcacggcatgtcttttgacgtgaagtcaactccatgtgaaaaactgaagacagagaaagagcctgatgctacccctccttctccaagaactttactagctatgcaagctgccctgctggggaagtagctcagaagaggagctggagagtgaaaatcgaaggcaggcccgtgggaggaacgcacctgctgctgtagacgaaggctccatatcaccccggactctttcagccattaagagagctcttgacgatgacgaagatgtaaaagtgtgtgctggggatgatgtgcagacgggagggccaggagcagaagaaatgcgtataaacagctccaccgagaacagtgatgaaggacttaaagtgagagatggaaaaggaataccgtttactgcaacacttgcgtcatctagtgtgaactctgcagaggagcacgtagccagcactaatgaggggagagagcccacagactcagttccaaaagaacaaatgtcacttgttcacgtggggactgaagcctttccgataagtgatgagtctatgattaaggacagaaaagatcggctgcctctggagagtgcagtggttagacatagtgacgcacctgggctcccgaatggaagggaactgacaccg

SEQ ID NO: 63530 - DNA, 765 bp, Homo Sapiens
tgctacctattggaacagcactagctccatgacgaggcattacgtgagactactccctcctgttcctccttctccatcccccatggaggaggcatcgcactttaccaagctgatgcattcctacagaagtgggccccggatttctgcaagtcgactatcatgatgacttcgctggaggaaaggtgatacgtacatacgcattgagggcctcagctttatatagttcaaaatgcagcaaacttttcagaaagccacgtaaataaattggttaggttccttataccagtcacatggggaagttgaaaagaattgtatattcttggcagtgctttttctttagcattctgtcaattcaaagaagggatcctctttcaaaggctacctttatgaagtagacactattgccctcagaatgagagaacattaaactaccagtctggtaagctggatttttttccccatggctttacttccttgctgtgtgaccttgggtgagtcattgtcttcttggagcctcagtttccctgtctgtaaaatgagttctttgaaatggatgatctctaagggcaccaaatctggtattctaaggttctcctgttttcaccatctataatagtatgggatgatttttgcttgtggaaggtatcatccgtgtgggttcttccctcctgccctcaattgtttttctgggccttgttttttagtttctgtatgttttaatctcatgtgagatgagctgagagaagctccgtggcctttaagcgt

SEQ ID NO: 63531 - DNA, 427 bp, Homo Sapiens
  misc_feature (12)..(12): n is a, c, g, or t
ataagatcactngagagcgtttcatggtacaatggcagagttaagcaactgtgacaaagacaataaggcccataaagcttaaaatatttgccatctgtctctctaacaaagagtttgtatgtgaaggaaagattgcaaggaaattgaattattttatggaatggaaggtgaatctgtagagagaacagagtccagtcctctttactttcaggaagcttagggagagcctaaacgggtgctgagaatgtctcttttctttccaggttttctctttctttgatttgatccgctactgtgtcagtgtttgcaatcagattgcgtctacacctgcacatacatgtcttcagaatcaaggtctctacagctcattctaatcatcattaatgatgtaattggtatataggaactggtttcaagaacgaactgg

SEQ ID NO: 63532 - DNA, 508 bp, Homo Sapiens
ccacgcgtccggccatttgtacctgtttgcttcccatcccacttggcacccactctgacctcttgtcagtttcctgttcctggttccatctttttgaaaaaggccctcctttgagctacaaacatctggtaagacaagtacatccactcatgaatgcagacacagcagctggtggttttgtgtatacctgtaaagacaagctgagaagcttactttttggggaagtaaaagaagatggaaatggatgtttcatttgtatgagtttggagcagtgctgaaggccaaagccgcctactggtttgtagttaacctagagaaggttgaaaaattaatcctacctttaaagggatttgaggtaggctggattccatcgccacaggactttagttagaattaaattcctgcttgtaatttatatccatgtttaggcttttcataagatgaaacatgccacagtgaacacactcgtgtacatttcaagaagcaggaactgggggtaccgagctcg

SEQ ID NO: 63533 - DNA, 411 bp, Homo Sapiens
gatttggttccatcctaccaaggccaccacttgctgaaagcatcactaatgaattcagacaaagggtaccattttcagtttttactactaatccttgcagaattcagtactgtacacaggaaattactgtcttccgtgaagacttagtaaataaaatgtgcagaaactgcgtccgttttcctagcagcaatttggctattcctaatcactttgtaaagactatcttatcccaaggacatctgactcccctacctctttatgtctgcccagtgtattgggcatatgactatgctttgagagtgtatcctgtgcccgatctacttgtcattgcagacaaatatgatcctttcactacgacaaataccgaatgcctctgcataaacctggctctttttcaagaagcagaactgg

SEQ ID NO: 63534 - DNA, 996 bp, Homo Sapiens
  misc_feature (819)..(837): n is a, c, g, or t
cagcagtaacgctcatcagtattatatgcagtatcaagctgcagtttcagctcaggccacatcaaatgtcaacccaacccagcctactacttcacagcctctaaatttggcacatgttcctggagaagaacccccaccagctccaaacctagtggcccaagaaaatcgacccatgaatgagaatgttcaaatgaatgcacagggaggtccagtactaaatgaagaagacttcaatcgagactggctagactggatgtacacgttctcacgagctgcgattctccttagcattgtatacttctattcttcttttagtcggtttatcatggtaatgggagccatgctactggtttatttacaccaggctggatggtttccttttaggcaagaaggaggtcatcagcaggctcccaacaataatgccgatagttaacaatgatgggcaaaatgcaaacaacttggaacttgaagaaatggagcgtcttatggatgatgggcttgaagatgagagtggagaagatggaggtgaagatgccagtgcaattcaaaggcctggattaatggcttcagcttggtctttcatcaccaccttctttacttcactaataccagaggggcctccccaggttgccaattgacctgaaaaactgtgccagctacaaggagggtctgacttcaggaaagtggtttaaataacagtgccatttcaaaaaaatttataactttcttttgatcatcatgtacacaggtgttttttttctttaggcttctcatgcatatgaatattttaagcacgaatggactactaaatatctgagnnnnnnnnnnnnnnnnnnnaaagatcctaacagaacatagcgtaacaatattggtcttccaggtgttactcatttcaattatgtgtagtataccaggacagacctattttcatgtcttatttctttaaagagctgcttcattggccgggcgccatggctcacgtctgtaatcccagca

SEQ ID NO: 63535 - DNA, 1147 bp, Homo Sapiens
aagtgttgctgcaggagctgccaggcagcgagcacatcgagatgctggccaacgccaccaccctggcctatctgtaacgtgtgctccttgggccctgactcctgtgccacaggactcctgtggctcggccgtggacctgctgttggcctctggggctgtcatggcccacgcgttttgcaaagtttgtgactcaccattcaaggccccgagtcttggactgtgaagcatctgccatggggaagtgctgtttgttatcctttctctgtggcagtgaagaaggaagaaatgagagtctagactcaagggacactggatggcaagaatgctgctgatggtggaactgctgtgaccttaggactggctccacagggtggactggctgggccctggtcccagtccctgcctggggccatgtgtcccccctattcctgtgggcttttcatacttgcctactgggccctggccccgcagccttcctatgagggatgttactgggctgtggtcctgtacccagaggtcccagggatcggctcctggcccctcgggtgacccttcccacacaccagccacagataggcctgccactggtcatgggtagctagagctgctggcttccctgtggcttagctggtggccagcctgactggcttcctggggcgagcctagtagctcctgcaggcaggggcaggtttgttgcgttcttcgtgggttcccaggccctgggacatctcactccactcctacctcccttaccaccaggagcattcaagctctggattgggcagcagatgtgcccccagtcccgcaggctgtgttccagggccctgatttcctcggatgtgctattggccccaggactgaagctgcctcccttcaccctgggactgtggttccaaggatgagagcaggggttggagccatggccttctgggaacctatggagaaagggaatccaaggaagcagccaaggctgctcgcagcttccctgagctgcacctcttgctaaccccaccatcacactgccaccctgccctagggtctcactagtaccaagtgggtcagcacagggctgaggatggggctcctatccaccctggccagcacccagcttagtgctgggactagcccagaaacttgaatgggaccc

SEQ ID NO: 63536 - DNA, 715 bp, Homo Sapiens
tgaagtccctgtctctgctcctcgccgtggctttgggcctggcgaccgccgtctcagcaggacccgcggtgatcgagtgttggttcgtggaggatgcgagcggaaagggcctggccaagagacccggtgcactgctgttgcgccagggaccgggggaaccgccgccccggccggacctcgaccctgagctctatctcagtgtacacgaccccgcgggcgctctccaggctgccttcaggcggtatccccggggcgcccccgcaccacactgcgagatgagccgcttcgtgcctctccccgcctctgcgaaatgggccagcggcctgacccccgcgcagaactgcccgcgggccctggatggggcttggctgatggtcagcatatccagcccagtcctcagcctctccagcctcttgcgaccacagccagagcctcagcaggagcctgttctcatcaccatggcaacagtggtactgactgtcctcacccacacccctgcccctcgagtgagactgggacaagatgctctgctggacttgagctttgcctacatgccccccacctccgaggccgcctcatctctggctccgggtccccctccctttgggctagagtggcgacgccagcacctgggtaagggacatctgctcctggctgcaactcctgggctgaatggccagatgccagcagcccaagaaggggccgtggcatttgc

SEQ ID NO: 63537 - DNA, 935 bp, Homo Sapiens
gtcttcacgtgacagagttaccgctcgcggctgcagttctccacaccgaaggaggagggctcttacccaggcaaccaggactacagtatacattgtggacattcaggacatagattctgcagctcgggcccgacctcactcctacctcgatgcctactttgtcttccccaatgggtcagccctgacccttgatgagctgagtgtgatgatccggaatgatcaggactcgctgacgcagctgctgcagctggggctggtggtgctgggctcccaggagagccaggagtcagacctgtcgaaacagctcatcagtgtcatcataggattgggagtggctttgctgctggtccttgtgatcatgaccatggccttcgtgtgtgtgcggaagagctacaaccggaagcttcaagctatgaaggctgccaaggaggccaggaagacagcagcaggggtgatgccctcagcccctgccatcccagggactaacatgtacaacactgagcgagccaaccccatgctgaacctccccaacaaagacctgggcttggagtacctctctccctccaatgacctggactctgtcagcgtcaactccctggacgacatctctgtggatgtgggcaagaacagtcgggaaattcaagaagcacaggccaccacacacaccaccagagccagatccagagcccctgagcgtggtcctgttaggacggcaggcaggcgcaagtggacagctggaggggccatcctacaccaacgctggcctggacaccacggacctgtgacaggggcccccactcttctggaccccttgaagaggccctaccacaccctaactgcacctgtctccctggagatgaaaatatatgacgctgccctgcctcctgcttttggccaatcacggcagacagggattgaggaaatattttattacc

SEQ ID NO: 63538 - DNA, 863 bp, Homo Sapiens
ttctctgataccagactttctaaccttgtggagacaccgaagattgttcgaaagctgtcatgggtcgaaaacttgtggccagaggaatgtgtctttgagagacccaatgtacagaagtactgcctcatgagtgtgcgagatagctatacagactttcacattgactttggtggcacctctgtctggtaccatgtactcaagggtgaaaagatcttctacctgatccgcccaacaaatgccaatctgactctctttgagtgctggagcagttcctctaatcagaatgagatgttctttggggaccaggtggacaagtgctacaagtgttccgtgaagcaaggacagacacttttcattcccacagggtggatccatgctgtgctgacgcctgtggactgccttgcctttggagggaacttcttacacagccttaacatcgagatgcagctcaaagcctatgagattgagaagcggctgagcacagcagacctcttcagattccccaactttgagaccatctgttggtatgtgggaaagcacatcctggacatctttcgcggtttgcgagagaacaggagacaccctgcctcctacctggtccatggtggcaaagccttgaacttggcctttagagcctggacaaggaaagaagctctgccagaccatgaggatgagatcccggagacagtgcgaaccgtacagctcattaaagatctggccagggagatccgcctggtggaattctctcggggtgaagatgattacaaagccatgtttcaacaggtggcatataccacgaggcagtaaggtatagtgttcaacatcactggtgcctgcttgaatgactcagatgacgactcaca

SEQ ID NO: 63539 - DNA, 480 bp, Homo Sapiens
cagaagtaacgctcatcaactatactctctgccaattttacctcagtgtatttaatggtcctttagtctgatataagatgccaagggtatttgataaaaattcttcttccatgccatgtcaggagttaatacaaattaagaaattccgtgggttcccctgggataagtgagggttgtgtcttggacatcactattgtttgaaggtttatcttttctaatcatgctctaccgcattgtagagagcctaaagagagttgtttctgagctgatctcagggaaatacaaataacttgggagatgagggaaataagatgaattctgtgctgtcaaggcagtatgtctgaagaaaggaccatgcttcttatattatcttccaccttgcttaaaacagcccatagctttgagttgacattttcattcttggcggatagcctactttatgaaggtaaggaatgactcctaccctcttggcgccaggtt

SEQ ID NO: 63540 - DNA, 851 bp, Homo Sapiens
ggggttttaaaagtcaattggtatcacctccacactgactagggtagtggggtgcatttggttttcaaattgggtacttttaacactttagtgcctgactgctgttctttactgacttgattcagtcactcgtagctttattggtctgaaccagctccttgttcccaggttacagacctgcctatcgttccaataatcctgtttcacttgaatgaagggagtatgtcttaaatgtaaagtttctggttctcacactgtactctgaggtccaaatactgtctgtcaatgtgtaacctgatgtctcaaccccctgtgagaagagtccattatttggtgttcaccaacgtgggagacttcaccggaacaggcttttttgctttgggctctgctatttgtttgcagaacacccaagagcgagcaaacatgctctcttcacagcagtaccttagggttttgccattgtaaatgggtctgatgtgatatgacaagaccagagaaattggatgtaaatttacatttttgaatatgcttgttgtttcacatgatacatttagggtatgcagctccttttgtagtttttatttttactatttaagtttggaaatgatgccaaatttttgtatttctttaatccatgtgttctcttcggtgatatatattgcattatatattgatgtgtgtatcaatatatattgatatgtattacccttacacatacaaacacatataagagggggtgaaaaccgtagcctttgcattctctatagcctctgcagagagatactaagcagcaaaatcttggtgttgtgatgtacagaaatggagaagagtattaaaccatatttaagaat

SEQ ID NO: 63541 - DNA, 1388 bp, Homo Sapiens
  misc_feature (810)..(810): n is a, c, g, or t
  misc_feature (988)..(988): n is a, c, g, or t
  misc_feature (1101)..(1101): n is a, c, g, or t
  misc_feature (1111)..(1111): n is a, c, g, or t
  misc_feature (1129)..(1129): n is a, c, g, or t
  misc_feature (1141)..(1141): n is a, c, g, or t
  misc_feature (1246)..(1246): n is a, c, g, or t
ttttaatcagaagttatgaagaacaaaaagaaaaaataaacacagaagcaagtgcaataccacctctcttctccctctctcctagggtttcctttgtagcctatgtttggtgtctcttttgacctttaccccttcacctcctcctctcttcttctgattcccctcccccccttttttaaagagtttttctcctttctcaaggggagttaaactagcttttgagacttattgcaaagcattttgtatatgtaatatattgtaagtaaatatttgtgtaacggagatatactactgtaagttttgtactgtactggctgaaagtctgttataaataaacatgagtaatttagcaccaggacctgcaagaggcgacgctccactggacaaactcctcgcaaacgcaaatatgccaatcgccacgattcacgaaatgaacctgaacctcggaacctcctgtgctgcaagagcctttgggttcccggcatcgccctgtggcgcgatctccatcccgtcctcgccggtccgccctcgcccgggacggacctgcatacaagcgcgaagtacgagtattcatgaaacgatgttccgcttacttcgccgccgccgggctccccctctatacgaggtgggagcctactgttacggtccaaattcccccaattcctaggggaccatcccgcggaaacgtgctttggcaagcagcccttgcgccggggcgagtccactgtcatcgtccccctagaatgccacgcacgcacccattctctgtaatccacactgccggcccccttccccacattaccaatacgntcctccccgaaactcttcccctctatgatggcgggctgcgtccttctgcggtaaaaccccgagggacgcgcaacacacacacggcgcccaccgtctgttatccccacctctttggtacccctctttccgcagaagcacgccttgtgagccttctccggtacgccgccagtgtctgtantaataagaattgctagccacacccatgctcgttgacagcgctgcggaacccgccacactatagttggctaacaccggcgctgccgggccatagatgatataagccccgcccgntcacacaagncggaggttataggtgcgngagactcactcntcaccgctcccattgcgcgcgcggctcggccgcctccccccaacacttatcccacgctcccccgccgcctccctacttataccccccgtgaccctgggcatacgntttccgcgacgctcaaacaacaaagctctgactcagaggaaattaacccaccacagcgcccccgcggatcgaacggtcacgaaggctttacatgatcagcgcatcggccgcggcgacgcagcctgtgatcgagaccacgcgg

SEQ ID NO: 63542 - DNA, 1257 bp, Homo Sapiens
  misc_feature (1035)..(1077): n is a, c, g, or t
  misc_feature (1100)..(1123): n is a, c, g, or t
tccttcttatatgtataaaatggtgtataatatttgtgaacgatagttgtttagcagtgagtgtcatctcgtagagtaatcctggtgtgttagtgtgtgaaatgttatgcttgtgttagatattattttgtaaggtgatgggggtggtgagtggtgtatgtatagtggtaatgataggatgtgttagggttttggtgagttggggggtattgatggaggcttgtgatgaaggttttctttgaactgtatatacttggaatatttgttgtttttacttctttttgcccaaatgactcattttgtattatctgatcatatataatttctggtcatgtgtatgttattatagatattttgaggttgtatggttatagggtggataagtactcggtattacagtagtaaccaaattattttcactccagatttgtgttttctctggcacagagtagatcttttgggaaatatatatgaaagtggattaagtttgactacccttatgttagccacatctggatgagaacagttacaaagagtttggtctctaagttgatttgtacccagtgggtcaacttctgcaaaattccgtaatggtgtattagtattagaatagtgaataaaatgggaaagttatacatgtatacttattatcttgctcagtattttatctcacttgttctagaattttctgtaaaccctgctactgggtttgaagagttttagtcatcctttaacaatttttaaaaatttagcttctagattccatttggtaaggaaatcaatattggaagtattgctaaaatcttataatatgaaaagagatccactaatgtagcttaaggttattagatttgggcttttaatcatggaataatcttatgtattggtgtaagagttgatgaatgactttagctgtgtgaatatataatagtcaaactgcaaacattttgcatcccttttgtgacctaatttacagacatttaaattgtgttgcagttctgctttgccgtttaataaaaagctatttcagaggtnnnnnnnnnnnnnnnnnnnnnnnnnnnnnnnnnnnnnnnnnnncaaccagcgcccccaaccttttnnnnnnnnnnnnnnnnnnnnnnnnccctggtggcccgcctcgcccctcaaaaactttccaaaacctttctttgggccccgggccccatagggaaggggaccagggcctaacttttttccaagaaaatccgggcaaggaaaagggttgggctcccccac

SEQ ID NO: 63543 - DNA, 1549 bp, Homo Sapiens
  misc_feature (120)..(128): n is a, c, g, or t
  misc_feature (776)..(924): n is a, c, g, or t
  misc_feature (950)..(950): n is a, c, g, or t
  misc_feature (998)..(1006): n is a, c, g, or t
  misc_feature (1338)..(1358): n is a, c, g, or t
atgatgatcaataaattataccaaatatatgtttacagtatgatttaaagtctgattcagaccagggactctattttaagttcaactgaaataacactgggttttaattatatcacaggnnnnnnnnngtgcatttaagtattgttatcgtggactttataaaagcaaaggaaattgaaagtaacttttgattctgtatcaagaatcatattttcatacagtcataactgtctttctgtgaccctttcacagggcactgtaggatggattaaaggtggcaatttactgataactgcagatgtctctactttgttctaaaatctaagtcatgaggtgatttgatttactttatagaagctggattttgaagatctaatgaaaaattttttgataatatagtagtacaaaaaaagcaccagcaactgataaaaattgcttttttgtgcgctacccaactggttaaagccaatgtgatccttttatggtgaaactcctaagaaacaggtggttttgctggaaacttggtagacccttaattatagtggtgctaatgagcactactgtaatataaagccaccattattttttatcaaacatctgaatacattttacaaaggctattgtgagggcattattttgagcatctattttgaggtgatgtttaaaaaaactttaacatcaaatcaaattgtaaattaatttaaatatattgccttaaggacctactaaagaatgtgccaccagactttaagtgatagttgcaatatccttgtctnnnnnnnnnnnnnnnnnnnnnnnnnnnnnnnnnnnnnnnnnnnnnnnnnnnnnnnnnnnnnnnnnnnnnnnnnnnnnnnnnnnnnnnnnnnnnnnnnnnnnnnnnnnnnnnnnnnnnnnnnnnnnnnnnnnnnnnnnnnnnnnnnnnnngaacacagcgcagaggcgaccaaccnaagcgacacaaaaaaaatacaaaagtgcgggcgcccccctcccgccgnnnnnnnnnttcctatattcccaccccggcgggcgcccggggagcgcttcgccgaggggtgacggggggaaagcgctcctcccctcctttcctcccccaaacaacactagccctgcaaatcacaatcatctgtttggtgacttaccctccccccacaaaaacaaagaggtagccccctggcgggggagacccacccatggggccgtgaccataccacaaaatcccaccgtcgtcggacgagtaccaagggcagggactcccccttccgcgtatctcccccaacacaacaggacgctctttagtaaagcgccgacacaatcacaaataacacataatactannnnnnnnnnnnnnnnnnnnntcaacttaagttattgacagacacgcgttggtgggtgagataaccgttttgggacagctcctcgcaggcccctaacatctgcaacccacccccccacctacttatatagcgcaaataataacctaacctcaatgcgccctcacaacccagcgggccaacagtacccccgctacatatatagtaacctcacc

SEQ ID NO: 63544 - DNA, 905 bp, Homo Sapiens
  misc_feature (353)..(362): n is a, c, g, or t
  misc_feature (470)..(513): n is a, c, g, or t
ggaagtccagaaaggaaaataatttaaattaatgctggtgatcttaacaatattttgtaaaatgatgcttcccccttctccatggtctagtcaattttgtacaattaggtatctgactttacaagtttgttatcctttctaatttttactgaactgaaagcacaaagaagactacacagaaaatctggaaacagttgcaggtgttgggaggaagatgaaatcgagctgtcttttaacttttgtatgtgttttatcagaatttgctggactatgctggcaaggactttgtttacgatcaaattgtactagtgtctgcagggtttgtcagtactcgtcaaagccaagtccaattnnnnnnnnnngtctttgccctccaaaaaaaataacacccttcacctactcctaacccccggggcccaacctccaaacgcacgctcggcccgccgccggggagccatatataccagcannnnnnnnnnnnnnnnnnnnnnnnnnnnnnnnnnnnnnnnnnnnaccgccactcatgtcgactttcccccgccgccgcgccacacgcaacgacctacccccccgcccaccagagccgttccccgcccttgtggggggtggcggtcacctattctcgtgggccccccactcacaagaaaaaccgccttcttcttatatataacgacactattctccccccctgttgggggggtatacgcatgcgcaacctcccacacctctttgatacacatgacatagatagagagcccaaaaaccagtcggggggctcatcaacacagagcggcgccgttcaaactctcgagaagcagagaagaacacgtgcggggcgcgtcaccactcttatccgccaccagccgcgtgcttgtgtggcactatcctctcatcgcaccccacac

SEQ ID NO: 63545 - DNA, 721 bp, Homo Sapiens
ggggcagccattttggtgcgagagaaacaataggacggaaacgccgaggaacccggctgaggcggcagcagagcatcctggccagaacaagccaaggagccaagacgagagggacacacggacaaacaacagacagaagacgtactggccgctggactccgctgcctcccccatctccccgccatctgcgcccggaggatgagcccagccttcagggccatggatgtggagccccgcgccaaaggcgtccttctggagccctttgtccaccaggtcggggggcactcatgcgtgctccgcttcaatgagacaaccctgtgcaagcccctggtcccaagggaacatcagttctacgagaccctccctgctgagatgcgcaaattcactccccagtacaaaggacaaaggccaaaggcccccttgttagcctggccatccctgccccattttttcccctggtcctttcccctgtggccacagggaagtgtggcctgaataccccaccccggctcctctgcacccagagctgggggccacctcagaagtgtcatctctctctgagcacgcattcccctgcagcagtcgaggactgagcagattgagtgatgctggggcagaaaggcctgggaggaaaggtgttcagccagtcgtttgtaaagcgctcgtcggcacctgctgaaacgcccccacctgaaagccccatccctcaaagactggctta

SEQ ID NO: 63546 - DNA, 464 bp, Homo Sapiens
aattcatctagccactagtgagcaggtccgggttcagttctcctggggtgataagtcataattgaaagaagcctatggcatgctgtaaatcagcattgtgcaactgatttgttgttgtattatgtgtcacttctgtgggatctatgtgagtgagtgtgtaataacaaatatttaaatgagctgatgttgtgttgatggccattaaaaaaatcatactgctggccttttttgcccccttacctgttgtgtgcccagatcttttaaaaattcatcccatatccagaaagtaccagttataaagattgctgaccaagcaaagttttgcatcaaagtgtcacctcattgctctgaccaaagactgactgttgtggttttaactgcctctctgtaaagcattgtgcattttccccaagctcctttctgaaagaagacccgtgcgagcgccgtactgtcatttccactgt

SEQ ID NO: 63547 - DNA, 317 bp, Homo Sapiens
cctggcttgctcaggtctccaagatgtagctaatgaccgtggttcccactgaggttagtctcttgtattaaactcttcacaaaatctgtttagcagcagcctttaatgcatctagattatggagcttttttccttaatccagctgatcagttacagcctgttagtaacatgaggggacattttggtgagaaatgggacttaactccttccagtgtccttagaacattttaattcatcccaactgtctttttttccctaccattcagtgatactgtcaagctgcttagatccaacttgattttactctgcaagcttta

SEQ ID NO: 63548 - DNA, 394 bp, Homo Sapiens
aacccgtgacacccatcaccaccacaactatcggtgaccgcaaccccaacacccaccggcacacagaccccaaccatgatacccatcagcaccaccactacggtgaccccaaccccaacacccaccactggaagcacggggccccccacccacacaagcacagcaccgattgctgagttgaccacatccaatcctccgcctgagtcctcaacccctcagacctctcggtccacctcttcccctctcacggagtcaaccacccttctgagtaccctaccacctgccattgagatgaccagcacggccccaccctccacacccacggcacccacgaccacgagcggaggccacacactgtctccaccgcccatgaatcccacgttgcggtaccgag

SEQ ID NO: 63549 - DNA, 449 bp, Homo Sapiens
  misc_feature (341)..(358): n is a, c, g, or t
gaagtctaagcttattttagttataactattaaaatcatttttaaaaatttgttagttttgctgacagagaaaaatcgtcagttgtcagattttgcacaccacaataaatgtaccaccacacacggaatatgctaagaaaactatcagatagcgtttgatacactagtcattgtctcaatcactgatcctgtaagttgtcatcaaaatatgatttagaaatattggccaaggtgttgctttaactgaggagaaaagaaagcacactgcctaaatgtgtaaaagaaaaatgcagaggttattaaaatgtaaagaagtaacaatctttggatttgtctatacnnnnnnnnnnnnnnnnnnggctttgccttaatatacccccttttttgtttgtgactttcaactgtaatcagttaataaagtatttattctctgcattcaggttcaaaaa

SEQ ID NO: 63550 - DNA, 359 bp, Homo Sapiens
  misc_feature (337)..(337): n is a, c, g, or t
gcacgaggttggaaacatgtcccaaatttttaaaattctgcttctctgccaaaagcaatgtctttcttggttgatatttgagttttaaaagggtcaaatctttctaattttttgtatctttagagggcagcactagaagaaatcagcaggtctaatcccaccagtaagaaaactaccacttcttgatttttacagatttaaaaaaatcttttccgtgacctttctttttaatgtaaatacaaatttaaacctaggcttaatataggcgtttcccctttcacccaagtgatgtcacagttcgatgcaaaatcaatgatccagatgatcgtgggtaaanataactcaagtgtttcttaagg

SEQ ID NO: 63551 - DNA, 432 bp, Homo Sapiens
taaaaagtctcaggtgaccaaaggctcctgaagctagaaccaggtttggataaagattgaagagccacaggccactcttccctctgagccattgggcctagtggtgtcatgtattgtaattgctcgcagggagagcagtctttttggtgtaatagtgggatgtctgcttagttggcaggggttcagtccaaatggaagaatattgggaaataaacctccactatcctttatagccagggacttttttcttatttattcataaaataaattatagttaattatacccataacacctttatttaaatccagtgttctccgcagccttttgtctatttatatgtgtaccaagtgttaaacataattattattgggcatttgaactttgtttttctttaaagaaatgctgctattaaacatatttgtaaatggtta

SEQ ID NO: 63552 - DNA, 254 bp, Homo Sapiens
catcaatctaatggtgagcacagaaccattggctctcactgaaacagatatatgcaagttgccgacagacgaaggaacttgcagggatttcatattaaaatggtactatgatccaaacaccaaaagctgtgcaagattctggtatggaggttgtggtggaaacgaaaacaaatttggatcacagaaagaatgtgaaaaggtttgcgctcctgtgctcgccaaacccggagtcatcagtgtgatgggaacctaag

SEQ ID NO: 63553 - DNA, 231 bp, Homo Sapiens
aactcatgaaagacacggcacgtggccagaatctatcgaactaataggcatgtgtatttggagacaacaaggaagagagaaccattctgactgggagctccctggaggaggtagcggacatttgactggggtttggcatattcaaaaaatgtggatgagccaagaggacagagcgcacgatattccatgcgagaaacataacgagcatagcatcctcccattcctaccatg

SEQ ID NO: 63554 - DNA, 417 bp, Homo Sapiens
ggacatcagtcacacacatccagagtaagatatcctgttgcccaactctcactaaccttgaccgtgctgcctccctctctggggctctgggaggaagaatgttctgcagaggtttgtacatctctgagagtcctgcctaagcctgccagcccttactacaccaccattttcctccagcccctacccactggggaacagaaacagagccagagaggaattgagagatggagagagaatgaggtagagacaggcttggtgagtgtttagctagggggagtgagggagagtgaggtgagacatggcatgacagggagcacagagagagggagtagccagccttagatgtaagagagggcccctcccaatgccagatctggcttgcaggctcccccagcttttatagagaccaccaataca

SEQ ID NO: 63555 - DNA, 536 bp, Homo Sapiens
ccaggcagcagtagccccgtagcagtgcgcacaccttggccaggttgggctggatgaggtcgcccttgcactgcctcatgagcctgtcacacggggccctgcagtcgcgcccgtaggtgcagtcggtgctgtgctcgccttggcgggccaagatcgccatcggcctgctggagttcgtggaggagctcttccacggctcttacgggactttctacatgtgtgagaccacactggccaacgtgggctacacagccacctacgacttcaagatggccgacctgcagcaggtggcacccgaggccaccgtgcgccgcttcctgcagggccgccgctgcgagcacagcaccgactgcacctacgggcgcgactgcagggccccgtgtgacaggctcatgaggcagtgcaagggcgacctcatccagcccaacctggccaaggtgtgcgcactgctacggggctacctgctgcctggcgcgcccgccgacctccgcgaggagctgggcacacagctgcgcacctgtaccacgctgagcggg

SEQ ID NO: 63556 - DNA, 209 bp, Homo Sapiens
gtggtgtgtttttttaacgtgcatagttcattccttggaagaagctgtaccatcgatacctgatgaatgaagagcaagctgtcagcaaagtggacggcatcctgtctaactgtggcatagaaaaggagtcagacctgtgtgtgctgaacctcatacggtgagcaccaccaatacaggaagcaccaccaatacagctagcaccaccaagt

SEQ ID NO: 63557 - DNA, 355 bp, Homo Sapiens
cggattggcgaccatttcaatggaattgaaaagtagtcaacttccaggtgcgattcacttggcagagaacatgaaagcaatttgtcctttactcttataaacagctgtttttatctagttttcgcttttgtaaagattgggaaatggagtggctctttaaatttggtttgagtcttgcttcccacgtttcttaatcccactgtgtgaaaagcagatatttagaaacgtgaaggaactcgacacctttatgtaacagaacaacacatcactttctttagattgttgggggaaccctagggttctaaggaagtgagtttcctgatgtttgaaatgtcgccatccgggatcctctggc

SEQ ID NO: 63558 - DNA, 295 bp, Homo Sapiens
gccggtccgttatggtggtgctgactctgtggacgttgaagtgagggtgcagaaaaccatgcatctaaagttgaaggtgataataccaaagaaagagacttggatagagccagtgagaaggtggaacctagagatgaagattggtggtagctcagcaaataaatgcccaaaggcccgagccccagtcagacaatgattccagtgccagtgaataagcaactttctacagttttgcaccacggcgagcaccaccaatacatgcagcaccaccaatacaggcagcaccaccaataca

SEQ ID NO: 63559 - DNA, 235 bp, Homo Sapiens
gtcggctcggtccagtcgggagtgtggcggtacccttactgtgggagatctagtaatggtgaatggactgctttttcagctttcattacccctgaactttctgggaactgtatatagagagactagacaagcactcatagatatgaacaccttgtttactctactcaaggtagacacccaaattaaagacaaagtgatggcatctccccttcagatcgcaccacagacagcacca

SEQ ID NO: 63560 - DNA, 389 bp, Homo Sapiens
aatgaccggccaatagtacagaaattattttatcctgaagtaagctgtttatatttgggattatactgaacctatttatccaataacctgaggtttcaaataattttagttctataagtactataattatataaatagtaatgtattcagattagctgaaaggaacaaaagtagaagcctgactacttggtgctaactactaaagattttggcagaatcaatgttggatttggctttcctgtcccttccccatgccagccttccagagtgttctgccttgtgctgcctcccttcacactggagtgtcacactcctctctctgccagttcagctcttcattcttcaaggcctgacccttgtctgacccttgtgcctcctaatagccctac

SEQ ID NO: 63561 - DNA, 531 bp, Homo Sapiens
  misc_feature (426)..(426): n is a, c, g, or t
ctccctctaaattttccatgcccctcaggcctcagcaatctggcccctcgaaccctagccctgagggagcgcctcaaatcgtgtttaaccgccatccactgcttccacgaggctcgtctggacgatgaagtgtgccttttacacccagccgagcccctccctcaggccccacccgggtctgcaccaaccctgtggctacattactcgaatggcaggatgccctggtgaagactccaaccccacagcccagctgtggcttgcacagtgaagcctgatgggaaggtggggaaacagggacagggggccacctgggcttcttcacagagaaggtcagcaaggaaggcttggcttacagttgcaaaggttggctgagctgtgacaaggtcttctctgtctccagtgtttcattccagttggttctgcctncccccagggctctccatgatgagacaaccactcctgccctgccgtacttcttccttttagcccttatttattgtcggtctgcccatgggactgggagccgcccac

SEQ ID NO: 63562 - DNA, 331 bp, Homo Sapiens
cggattggcgaccatttcaagatgacagatccaatgatggacttttttgatgatgccaatctttttggtgagaccttagaaggtttgtcagatgatgcatttgtacaaccaggacctgtttcactagttgatgaattgaatttgggtgcagaatttgaaccgttgcacatagattcactgaaccatgttcaaggtactccaacacatcagaagatgactgattttgagcagttaaatcatttgattcaataaaatttcaccatgttaatctatcttttggtagcccagctgacatgtgttatctccacactctcagttgaatggtcccatg

SEQ ID NO: 63563 - DNA, 341 bp, Homo Sapiens
gaagaagaagggcttgtaatatgaacagtcgttaaaaagcaggctgggtccggtccggaattccgggatatcgtcgaaccacgcgtccggtgaagctccctgacgcctacgagcgcctcatcctggacgtcttctgcgggagccagatgcacttcgtgcgcagcgacgagctccgtgaggcctggcgtattttcacccccccttgtccagctgaggtgagcacatttacagatattttgcttcatagtttccatgccctctgcccagctcagtttagacagtatacgttccttgtttcttttctcccatgacactgacaagaggtattaccacctcagctt

SEQ ID NO: 63564 - DNA, 352 bp, Homo Sapiens
cttttgtcgagaggaggagagtgatcaaatccgggagaagttcgctgttcctgagagcgatcatttgacctacctgaatgtttacctgcagtggaagaacaataattactccaccatctggtgtaacgatcatttcatccatgctaaggccatgcggaaggtccggtaggtgcgagctcaactcaaggacatcatggtgcagcagcggatgagcctggcctcgtgtggcactgactgggacatcgtcaggaagtgcatctgtgctgcctatttccaccaagcagccaagctcaagggaatcggggagtacgtgaacatccgcacagggatgcctgcctttccagctggaccg

SEQ ID NO: 63565 - DNA, 178 bp, Homo Sapiens
tacctggtccagctggacagggtgggaggttgcagattggagacaagatctggcggtcacagtgtggggctagaggacgtcatgcatgaagatgctgtggcagccctgaagaacacgtatgatgttgtctacctaaaggtggccaagcccagcaatgcctacctgagtgacagctatg

SEQ ID NO: 63566 - DNA, 289 bp, Homo Sapiens
tggagaggagctgggttgaagcggactgctgcggatgcaactcccagcttgcccaccgcgggctgtctgctctccctcctagcagctgtcacactgaagttttgtcctctgctgtctcctctggtcactgagatgagctgtgagcctaggtggccaaggcttcctgcattgcttccctgtgagtccaaggccttcccccaccactgggcagaggctggacagcacaggacttctagagagagccgcgttgccagttcctctcccactcgctcgtcctatcacggacgat

SEQ ID NO: 63567 - DNA, 862 bp, Homo Sapiens
actcttcaggaccacagtttgaaatgtctttcataaaatgtgctacaattagccttcggaatatttgctgggtgatttaaatgtgtgggtctcatttccatgctagccatggtcatctgacagtctctacactgtgaatattgcctggtgatcaagactctcctcaaagaaatgacttgctgtcatcccacatgaactcctgatgttttttctacaaaagtccataaaatgtgaaaactggagaagatcttagaggttgaagcccaccttctcttttcacataggagggaacagaccatggaaatttaaacgacttcctcacggtcacagaactagttttttaatcctcaggcagtgcatccccccaccctacaactgagcacaacctctttccccacagtgcaattcagaatatgctcagggaatgccagccaccttgtaaaactgctgggagaaaagcatgattcccacaaggactaagtatcagtgatttgtaattttcctgttttgtattatctgctttgctgatgtagacaagagttaactgagtagcatgctttattaagcatgagaaagaatcttaagaattgtcaataaaattaacccaaaactttaataatgtgtctgtaaccaagaaaatattgatagcatcatcctaatgaaactaaacatttattttaaacttattaaattgactcttaaactacacaacaaaatatcatcacagaaataaaaacgcgtcatatcaacataacacacactaacaccgcgacatgttctacatagatcacattgactatactaaactaaccataataatcgaactcaagtaatctctatactcctagcatagtcaacaaag

SEQ ID NO: 63568 - DNA, 552 bp, Homo Sapiens
gtccacttcttggactgggaggagcattacagccacggcttgggctggtacctcagccagatgcccttctcctggccacaccagctcacagtggagaagacccccgcgtatttcacgtcgcccaaagtgcctgagcgagtctacagcatgaacccgtccatccggctgctgctcatcctgcgagacccgtcggagcgcgtgctatctgactacacccaagtgttctacaaccacatgcagaagcacaagccctacccgtccatcgaggagttcctggtgcgcgatggcaggctcaatgtggactacaaggccctcaaccgcagcctctaccacgtgcacatgcagaactggctgcgctttttcccgctgcgccacatccacattgtggacggcgaccgcctcatcagggaccccttccctgagatccaaaaggtcgagaggttcctaaagctgtcgtcgcagatcaatgcttcgaacttctactttaacataaccaagggctattactgtctgctgtacagcggtcaggaccgctgcttacatgagttcaaa

SEQ ID NO: 63569 - DNA, 240 bp, Homo Sapiens
agggtgattaccgggtaccgggtcacggccagtccatcatccccggcattctggagcgggaccaggagcagagcgtcacctacggctccatcgacttcggcaagaccgtggtgtcacacccgcggtacctggagctgctggagcgcacgagtcggcccctcaagatcctgcggcaccaggtgctcaacgaccgtgacgaggaggtggagctctgctcctcggtcgagtgcaagggcatca

SEQ ID NO: 63570 - DNA, 324 bp, Homo Sapiens
ccttccaacatctcatgaccgaaatgaccagaaaacagcctgatgttgataaagtaacgaagacctataagaggagagctgctgatccttcctcattacaatcccatattccagtcttggataagggacgagcaggaagaaaacgctttccagcatcaagcttgtatccctctgggtcacagacaccaattgaaacccaaaatcctagggtaaacttactggtgagcaatggcagcaagtctggctccctggcgttggaaagaaggaggaaactctatgatgccttggaccgactagaggagctgagggaattgctacttgatt

SEQ ID NO: 63571 - DNA, 576 bp, Homo Sapiens
tcggacgagtacggagcgcctgcagggacagcctggataaaggctcactgatggctcagttgggagcagttgtggctgtggcttccagtttcttttgtgcatctctcttctcagctgtgcacaagatagaagagggacatattggggtatattacagaggcggtgccctgctgacttcgaccagcggccctggtttccatctcatgctccctttcatcacatcatataagtctgtgcagaccacactccagacagatgaggtgaagaatgtaccttgtgggactagtggtggtgtgatgatctactttgacagaattgaagtggtgaacttcctggtcccgaacgcagtttatgatatagtgaagaactatactgctgactatgacaaggccctcatcttcaacaagatccaccacgaactgaaccagttctgcagtgtgcacacgcttcacgaggtctacacttgagctgtttgatcagattgatgaaaatctccaactggctttgcacaggacctgacctccatgccctgggctggtcattcagctgtgcggtaacaagcccacatacgaccgc

SEQ ID NO: 63572 - DNA, 1682 bp, Homo Sapiens
ctttatcatcagaagtcagttctgataatggttcgaggctatcattatgctacttgtcttgaaggggcactgaaaatcaaagaaattacttatatgcactctgaaggcatccttgctggtgaattgaaacatggccctctggctttggtggataaattgatgcctgtgatcatgatcatcatgagagatcacacttatgccaagtgtcagaatgctcttcagcaagtggttgctcggcaggggcggcctgtggtaatttgtgataaggaggatactgagaccattaagaacacaaaaagaacgatcaaggtgccccactcagtggactgcttgcagggcattctcagcgtgatccctttacagttgctggctttccaccttgctgtgctgagaggctatgatgttgatttcccacggaatcttgccaaatctgtgactgtagagtgaggaatatctatacaaaatgtacgaaactgtatgattaagcaacacaagacaccttttgtatttaaaaccttgatttaaaatatcaccccttgaagcctttttttagtaaatccttatttatatatcagttataattattccactcaatatgtgatttttgtgaagttacctcttacattttcccagtaatttgtggaggactttgaataatggaatctatattggaatctgtatcagaaagattctagctattattttctttaaagaatgctgggtgttgcatttctggaccctccacttcaatctgagaagacaatatgtttctaaaaattggtacttgtttcaccatacttcattcagaccagtgaaagagtagtgcatttaattggagtatctaaagccagtggcagtgtatgctcatacttggacagttagggaagggtttgccaagttttaagagaagatgtgatttattttgaaatttgtttctgttttgtttttaaatcaaactgtaaaacttaaaactgaaaaattttattggtaggatttatatctaagtttggttagccttagtttctcagacttgttgtctattatctgtaggtggaagaaatttaggaagcgaaatattacagtagtgcattggtgggtctcaatccttaacatatttgcacaattttatagcacaaactttaaattcaagctgctttggacaactgacaatatgattttaaatttgaagatgggatgtgtacatgttgggtatcctactactttgtgttttcatctcctaaaagtgttttttatttccttgtatctgtagtcttttattttttaaatgactgctgaatgacatattttatcttgttctttaaaatcacaacacagagctgctattaaattaatattgatatattcagtattctcttcaactttgtcacgaggaagaatttcctgtagttaattttaactttccttcattacattgttgcataaaactagtcccttagtgccagtttggaagttacttgcaattgtttggaagatttgcaggtcgctgacctcatcatttcactctaagtatatgtggtaggctaagctcagaaaaaggtatgtatgctttacactgataggcaccaaatttagtattgtatcctaagtatttttcctcttctgtatttttaaagctccacgcctgaaatatatttaggaataaagaaaaaataaataaagtg

SEQ ID NO: 63573 - DNA, 399 bp, Homo Sapiens
ggttgttttggcctgaggagcagccctgcctgctgctcttcccccaccatttggatcacaggaagtggaggagccagaggtgcctttgtggaggacagcagtggctgctgggagagggctgtggaggaaggagcttctcggagccccctctcagccttacctgggcccctcctctagagaagagctcaactctctcccaacctccccatggaaagaaaataattatgaatgcccctgaggcactgaggccctacctcatgccaaacaaagggttcaaggctgggtctagcgaggatgctgaaggaagggaggtatgagaccgtaggtcaaaagccccatcctcgtactgttgtccctatgagcttaagaaatttgataccataaaatggtaaagacttg

SEQ ID NO: 63574 - DNA, 333 bp, Homo Sapiens
tagaggggtatcagccgaatattcctaatatagtttctcttgaattaataaactgaagatttgtaggaaaatgagtgagcaaaatttgtttactgttgtgaatttttcctacagcactgtttttaatcttgatgttttccaactttctgtactaatagatacatttctgtgcataagattataaagcatatactcacagttcagtagttttcgttaaggatttactgtgtgagtactttactgtgaggaattgcagaaccttttcccctctactcttgtctaaaagttctgtgtggcacacagagatgcgacctactctggaaggtaccggct

SEQ ID NO: 63575 - DNA, 729 bp, Homo Sapiens
  misc_feature (241)..(241): n is a, c, g, or t
  misc_feature (513)..(659): n is a, c, g, or t
aagaaccagcccagtgcacagagcaggccacggtggacacgaactcactgcagaatggggacaagctccaaaagagacctgagaagcggcagcggtcccttgggggcttctttaaaggcctgggaccaaagcggatgttggatgctcaagtgcaaacagacccagtatccatcggaccagttggcaaatccaagtaaacaaatcagcacggttcccaccaaggttctcctgccaccaagantgtgttctccttactccatctcctccccaaacacgctccattgtatatattcttctgattggccagcaaatgaaattcttgcctagaaattaagcccgaagctgtttgtatattgaggtgtattatttacgtctctggtccagtcttttctggcaaataacagtaaagatggtttagcaggttacctagttgggtcagaagagtcgatgatcaccaagcaggaaagggagggaatagaggaatgtgttcgggttaagtgatgaaaatggcannnnnnnnnnnnnnnnnnnnnnnnnnnnnnnnnnnnnnnnnnnnnnnnnnnnnnnnnnnnnnnnnnnnnnnnnnnnnnnnnnnnnnnnnnnnnnnnnnnnnnnnnnnnnnnnnnnnnnnnnnnnnnnnnnnnnnnnnnnnnnnnnnncatggtggcacacacctgtagtcccagctaactcgggagcccaacgcacgagaaccgcttgtacccagga

SEQ ID NO: 63576 - DNA, 906 bp, Homo Sapiens
  misc_feature (82)..(82): n is a, c, g, or t
  misc_feature (155)..(155): n is a, c, g, or t
  misc_feature (177)..(177): n is a, c, g, or t
  misc_feature (194)..(226): n is a, c, g, or t
  misc_feature (701)..(701): n is a, c, g, or t
tctagagtatccccaggcaaagctctacccaccatcaccactcggctgaggggtgggtcggaggcaaagcaatgatacaggncgcaaagctcgggcagctctagtggacgtataaaaaccagactcaacaaaatcgattcagaacccagatcgtncacaccacaccctctttcaggnacccagagcagccgttnnnnnnnnnnnnnnnnnnnnnnnnnnnnnnnnnacgacctgttaaagggcactcgcccttcacattgagaccaaagtccaatgtatttgggtaaaaattgcttcttttagaaaatgcaaaggtttatttgtcttaataaattgaatactaggtgttgtaaggcagtgagaccagaaggacaagctaaattatgcattcttacttgagggatcggactggatggggcggagttctcttcaggctagccttctgggaaaagtggatgtctttttcagagattcatcataccttgacctgtacctcttctctgccctccacttccctgccctggagtccgtttctggagactagaaatgtatctaaattgggggaacagaatgaatgaattaatgaatgagagttcctttgctttaaccattcctggatgcctgcaaagtaaggaataatgcagtttttatgtatctgattttataaggggttactctttcaagagtaacaaaaaaatgcnaactgtaatgaaactacattgtatttctaagtgtgaaacgacaggctgccccgtttttactaattgcatttgcattttaaggtactactgaaggtcagatcaagttgaaatgcacaaatactaattagagaatatgtgaataaatgggatcttcttggtattttatatgtattgtgagtaggagctttgcctggtaatcctcaga

SEQ ID NO: 63577 - DNA, 523 bp, Homo Sapiens
cgtcggggcgcctccacccagctgttagcatgatgtcttacctcaaacaacccccatacggcatgaacgggctgggcctggccgggcccgccatggacctcctgcatccatccgtgggctatccggccactccgcggaagcagcggcgggagcgcaccaccttcacgcgttcacagctggacgtgctcgaggcgctcttcgccaagactcgctaccctgacatcttcatgcgggaggaggtggcgctcaagatcaacctgccggagtctagagtccaggtctggttcaagaaccgccgcgccaaatgccgccagcagcagcagagcgggagcggaaccaagagccgcccagccaagaagaagtcctctccagtgcgggagagctcgggctccgacagcagtggccaattcacgccgccagctgtgtccagctctgcctcgtcctctagctcggcgtccagctcttccgccaacccagcggctgcagcggctgcgggactaggtgggaacccggtggcggccgc

SEQ ID NO: 63578 - DNA, 1001 bp, Homo Sapiens
gtgggaggtgctgagcctgcctgatttattccggtcccagaggagaaggcgccagaaccccgcggggtctgagcagcccagcgtgcccattccagcgcccgcgtccccgcagcatgccgcgcccccgcctgctggccgcgctgtgcggcgcgctgctctgcgcccccagcctcctcgtcgccctggatatctgttccaaaaacccctgccacaacggtggtttatgcgaggagatttcccaagaagtgcgaggagatgtcttcccctcgtacacctgcacgtgccttaagggctacgcgggcaaccactgtgagacgaaatgtgtcgagccactgggcatggagaatgggaacattgccaactcacagatcgccgcctcatctgtgcgtgtgaccttcttgggtttgcagcattgggtcccggagctggcccgcctgaaccgcgcaggcatggtcaatgcctggacacccagcagcaatgacgataacccctggatccaggtgaacctgctgcggaggatgtgggtaacaggtgtggtgacgcagggtgccagccgcttggccagtcatgagtacctgaaggccttcaaggtggcctacagccttaatggacacgaattcgatttcatccatgatgttaataaaaaacacaaggagtttgtgggtaactggaacaaaaacgcggtgcatgtcaacctgtttgagacccctgtggaggctcagtacgtgagattgtaccccacgagctgccacacggcctgcactctgcgctttgagctactgggctgtgagctgaacggatgcgccaatcccctgggcctgaagaataacagcatccctgacaagcagatcacggcctccagcagctacaagacctggggcttgcatctcttcagctggaacccctcctatggccggttggacaaggacaggcaattcaacgactgggtcggggagcaacggaacaacaagggctgcagtggaccggctcctcaaaggaga

SEQ ID NO: 63579 - DNA, 553 bp, Homo Sapiens
tttggtaaatcggccagccctgatggaagcagcgttgaggaactgaccggggaccaggaggccagtgggggtggctctggggggctcgagcccttggagggcagcagcgtggccacccttggcccacctgtcgagagggcttcctgctacaactccgcgttgggctgctgctctgatgggaagacgccctcgctggacgcagagggctccaactgccccgccaccaaggtgttccagggcgtcctggagctggagggcgtcgagggccaggagctgttctacacgcccgagatggctgaccccaagtcagaactgttcggggagacagccaggagcattgagagcaccctggacgacctcttccggaattcagacgtcaagaaggatttccggagtgtccgcttgcgggacctggggcccggcaaatccgtccgcgccattgtggatgtgcactttgaccccaccacagccttcagggcacccgacgtggcccgggccctgctccggcagatccaggtgtccaggcgccggtccttgggggtgatgcggccgc

SEQ ID NO: 63580 - DNA, 1742 bp, Homo Sapiens
acacagcgggtaaacagcggctggtacggtcggaatcccgggatatcgtcgacccacgcgtccgaaaggcgggggggtccctccgagcccacccctggctctcggccccaggatgcaactgtgcacccagcttgccagatttttccccattacacccccagtgtggcatatccttggtccccagaggcacaccccttgatctgtggacctccaggcctggacaagaggctgctaccagaaaccccaggcccctgttactcaaattcacagccagtgtggttgtgcctgactcctcgccagcccctggaaccacatccacctggggaggggccttctgaatggagttctgacaccgcagagggcaggccatgcccttatccgcactgccaggtgctgtcggcccagcctggctcagaggaggaactcgaggagctgtgtgaacaggctgtgtgagatgttcaggcctagctccaaccaagagtgtgctccagatgtgtttgggccctacctggcacagagtcctgctcctgggaaaggaaaggaccacagcaaacaccattctttttgccgtacttcctagaagcactggaagaggactggtgatggtggagggtgagagggtgccgtttcctgctccagctccagaccttgtctgcagaaaacatctgcagtgccagcaaatccatgtccagccaggcaaccagctgctgcctgtggcgtgtgtgggctggatcccttgaaggctgagtttttgagggcagaaagctagctatgggtagccaggtgttacaaaggtgctgctccttctccaacccctacttggtttccctcaccccaatgcctcatgttcataccagccaagtgggttcagcagaaacgcatgacacctttatcacctccctccttgggtgagctctgaacaccagctttggcccctccacagtaaggctgctacatcaggggcaaccctggctctatcattttccttttttgccaaaaggaccagtatcataggtgagccctgagcactaaaaggagggttccctgaagctttcccactatagtgtggagttctgtccctgaggtgggtacagcagccttgtttcctctggggtttgagaataagaatagtggggagggaaaaactcctccttgaagatttcctgtctcagagtcccagagaggtagaaaggaggaatttctgctggactttatctgggcagaggaaggatggaatgaaggtagaaaaggcagaattacagctgagcggggacaacaaagagttcttctctgggaaaagttttgtcttagagcaaggatggaaaatggggacaacaaaggaaaagcaaagtgtgacccttgggtttggacagcccagaggcccagctccccagtataagccatacaggccagggacccacaggagagtggattagagcacaagtctggcctcactgagtggacaagagctgatgggcctcatcagggtgacattcaccccagggcagcctgaccactcttggcccctcaggcattatcccatttggaatgtgaatgtggtggcaaagtgggcagaggaccccacctgggaacctttttccctcagttagtggggagactagcacctaggtacccacatgggtatttatatctgaaccagacagacgcttgaatcaggcactatgttaagaaatatatttatttgctaatatatttatcccccaaaaaaacataaaaagggc

SEQ ID NO: 63581 - DNA, 740 bp, Homo Sapiens
  misc_feature (397)..(450): n is a, c, g, or t
  misc_feature (697)..(697): n is a, c, g, or t
gtcttttggtttttggaagaaacatgccttcacagctttgaacttcattaagaggttctattctggtgacattccagcaggtgttagtttctagtccaaataaattcagtattcccatggatgtgtgataccaggaggctatgattaccttcctgtagcagcggagtggccaatgggaccgggaccagagccgggggccgggggccgccgccgcggggaggttcccggcccaggtgcccagcgctcaccagcccggcggcgccgcggcggccccgcagctgtttcctcgggggggcgtggcgtcgggggccttcgcggcgcagtcctctttcagcatcccgaacagcagcagcggcccgtagggctcgcaggactcggtgcacagcagccctgaggnnnnnnnnnnnnnnnnnnnnnnnnnnnnnnnnnnnnnnnnnnnnnnnnnnnnnntggtgatcggctccttaccagctcacctctcgccgcacatgtttggaggatttaagtgccctgtatgctcaaaatttgtatcctcagatgaaatggatttgcatcttgtaatgtgtttaacaaagccacgaataacctataatgaggatgtactgagtaaagatgctggggaatgtgcaatatgccttgaagaattgcagcagggagatactatagcacgactgccttgtctatgcatatatcatanaggctgcatagatgaatgggttgaagtaaatagatcttgccct

SEQ ID NO: 63582 - DNA, 483 bp, Homo Sapiens
cgcgctcgctggctgagctcctgccacggcctcccctacctgtgcaccggctacgacctgtacgtgacccgcgagccctgcgccatgtgcgccatggccttggtgcacgcacgcatcctgcgcgtcttctacggtgcgccctcgcccgacggcgccctgggcacccgcttccgcatccacgcacggcccgacctcaaccaccgcttccaggtgttccgcggggtgctggaggagcagtgccgctggctggaccccgacacgtaggcgccgccctcctgcctccggacccttcccgctcccggccgtggggcgcccctcctggacttccgggcctcgatttcttccgcacaagcctgaccgtggatttcagggacacataccgcctccagcggggagcacgggtgctgccttccgtgcggatcgagctttcctggactcggtcattggggccaccccgtgccagcggtgcccttctgcggccgc

SEQ ID NO: 63583 - DNA, 736 bp, Homo Sapiens
atttaaacttttaaaaaatccacttcattcaaactagaaagagtcaaagacaaaggacatttatcagccaagagtgtgacgcattcttcgcatctagtctgtagtagtgtctgtgctctgggatggataccgtctgatgtctgtttgttattgatggcgcagccactgcaaaactagtcaactcccatctataactgttactttttctagtgctgctttgtgctgagagaacattttagtttactgcacttgacctgtaaaagactgattctttgtaattttagggataaattaggtggttaatttaaagaagaaatttcaatgttgcctttacatcacattaaaatataacttctttcagaaggataatagaagcactgattcatagtaaaaatcttgtttttagctttgacttttttgtggctgttttttaaaattgtaaattactagtaacatgtcatttctataggatgttttaaattatgtaccttccattggatagttaaaataatttcattttataagccaatttgagtgggaaagatacaaagcacacagttgtctccccacattaggaagagtagtgtgcattcagacattcggaatttttgctagtagttggagatgtttcagtgagtgaattaaaacaaagtctatttaactgacgtgatctattttgtgtctaaaacagaggaatttatcttgtcctagaagttcatgaactataagatctaag

SEQ ID NO: 63584 - DNA, 679 bp, Homo Sapiens
gtgatcagctatttggaaaatagaagagtccttcacataacaagttgtgataaagtgtatcggaaaagatgcaccggattgctcttaagagtaaactggggatgaaagccttgagggaattagacagattttctgttttgaatagccaacacatgtttgaagtactagctgccatgaatcaccgatctcttatactcctggatgaatgcagtaaggtggtcctagataatatccatgggtgtcctttaagaataatgatcaacatattgcagtcctgcaaagacctccagtaccataatttggatctcttcaagggacttgcagattatgtggctgcaactttcgacatctggaagttcagaaaagttctttttatcctcattttagtttgaaaaccttggctttcgacctgttggtttaatggacctgtttatgaagagaatagtagaggatcctgaatccctaaacatgaaaaacattctatctattcttcatacttactcttctctcaatcatgtctacaaatgccagaacaaagaacagttcgtggaagttatggctagtgctctgactggttatcttcacactatttcttctgaaaacttattggatgcagtatattcattttgcttgatgaatcatttctcttggcttgccaatatccgaaggacctcgagac

SEQ ID NO: 63585 - DNA, 864 bp, Homo Sapiens
atcatgttgttaaattgtagattttctaaagtaattgatgtcttaaaaatgttgagaccaaagtagtatagaagtatggacttaatttaattgtaaaattattagaggtatttgttgtagagcttttatatattaaagagaggtattggtgcatataaaaacagtaatattattgttatgcttgtattcttgcctttccgggtaagtaaaccctgaagaaatcttattttagtatagctacagctgcagtagcttttaagtatgtatccacagtttcagttataaattatagcttcctggttctgtgtctcagctgtttcagaactttcagcccagttaaatcttttttggtgttgaaacttttagtaagttgagtaagctattttttttccctacggtaatccaccatctgttctttgtgtgggttgacacctatttataattcttaaaataagggtagctcaaaggagcccagtaccgtagtttagcttgctactgttgagcatgaatagccgtaggttgttttcattaatgcagttttcatcatgtattccagaattttaaatcttgaccatagaaaaatactgtcattcattggcaacgatgtacagtggtggtttagtgcagtgaggaaatgatgggaatttttatcttagaaatggatgattcgtgaataaaactaggtacatagtaagtgtatgatagatgtttgatttgtaaattacaaatataaattatcacccccatttccatttattttcttgatatatcaaaatgtgttgacttagtgattctcaatcttagctacatattagcctggcagagctttaaaaaattgatacctgggtcctattccataacaac

SEQ ID NO: 63586 - DNA, 481 bp, Homo Sapiens
gatgggcgcacctgacttctgcatctgcccaggcagcagctgcctccctgcccaccagtgaggaggacctctgccccatctgctatgcccaccccatctctgctgtgttccagccctgtggccacaagtcctgcaaagcctgtatcaaccagcacctgatgaacaacaaggactgcttcttctgcaaaaccaccatcgtgtctgtagaggactgggagaagggagccaatacgagtactacctcctcagctgcctagccctcacagcctgtgccatcctggaacctccacctttgaacccagagccaggctgggccctatttatgagctccctttgcccttctcctgtatcccacaccaccacatccaacctccttgcctgcctgtatcctcattggtgggagcccagccatggccctaattgtgcctgagcttgactttcagtcagggccacagtgagcattaaattattattccataaa

SEQ ID NO: 63587 - DNA, 945 bp, Homo Sapiens
ctagccctttagggtctgcagcattagaatgctgtatgagcatgtagtgctttgcacggcacagaagccgtctgccgtgtgtgaggagcatacaatggactttctaaagataaggcgtgggcttccacagtgtctgccagagtttagttctttataccttactgaaaaatgcctcgtggtcttcgcagaggggaaggcctgtctaaagtcaatcatccgagatgggttttccattccaaagaaaggcaatatggttccttccttccctcctaaaatatgacttaacttttaagagaaatgttctgacacccacctaaacacacaaggcacgttcctggcctgtgttcaagggaaatgatcagtcattgcattgttattccaaagagcagccaacagtggcctcccccaggccctaccctgcaatgggattcgctttcatttaatggaaacttctgggactgatgcccaactcagtgcactcaagacgcatctccagttttcgggggaagctggtatttgacatagtgtgttaaacagctcctgagaacctttgggacactctgccatggctggcgtgaggcccagaggaccacgcagaggcaatggtagtacagatgtcacagctgagggtacgatgaggcctgggctcagtgagccaggacgaatgtgacagacaccccttgctgccacagtcagccctttgacgaaggtgggctggtgattctggaagtattggctatagcggtgggcccagtcaactcttccttgtggacttacgacagcagattttctctaggataagcttgtgtggttctgccagtgaagcagagaaccacctgtgctgttgtggaaggcgtgccgttgagggggaaaacgaagcccagtatttgctactgtttttcctttttttactatgacaggaaaataaatgcaattttagtggaa

SEQ ID NO: 63588 - DNA, 1032 bp, Homo Sapiens
ctcggtacccctcaacgctttatacttctttgtctttgactcccaggcagggttttcttttgacttatcacctctcacaaagaataatggtgcctataaagttgagacaaagaagtatgacttttatataaatgtgtgtggcccggtgtctgtgagcccctgtcagccagactcaggagcctgccaggtggcaaaaagtgatgagaagacttggaacttgggtctgagtaatgcgaagctttcatattatgatgggatgatccaactgaactacagaggcggcacaccctataacaatgaaagacacacaccgagagctacgctcatcacctttctctgtgatcgagacgacgggagtgggcttccctgaatatcaggaagaggataactccacctacaacttccggtggtacaccagctatgcctgcccggaggagcccctggaatgcgtagtgaccgacccctccacgctggagcagtacgacctctccagtctggcaaaatctgaaggtggccttggaggaaactggtatgccatggacaactcaggggaacatgtcacgtggaggaaatactacattaacgtgtgtcggcctctgaatccagtgccgggctgcaaccgatatgcatcggcttgccagatgaagtatgaaaaagatcagggctccttcactgaagtggtttccatcagtaacttgggaatggcacagaccggcccggtggttgatgacagcggcaggctccttctggcatacgtgaatgagatcggcctgcaccaccagcgatggcagacagaccacatataccacgaggatccatctcgtctgatccaggggcaggctgaacagccaccccatcttttctctcaactgagagctgtatgttcagtttcctgtggaacaccgagtcggcctgtcccattcagacgacgacgaatacagaccaggcttgctctataagggatccccacacgtggatttgtgttcaatcttaatccgctatacagttcgcaaggatacagcattcgcgaag

SEQ ID NO: 63589 - DNA, 516 bp, Homo Sapiens
catgtcctgcacctccccaagtagataacctggaggtcattcagttaacaactgtccctgaggactcagttttgggggaggggttatcttgggagaagctttagcctgttctgagccattaggagacattagtgaattggagcactggagaatcctacaaatggcctatgtctcagaagagctgggacctccttcccagctgctgcagatgctgacaggccctgggaggctgctgtgctctggagaagctggagcagctcatttcttggcctagcctggctgcctcagaaagagcagtcaggacttgagggaagcatcaaattctatacccataaactgcagttggaagtcagctttttgaaatgtccagcctgttgcccaattgtttcagatcatctcaagcctcaggctttggcaggtatcttgccctccatattattccagtgtgttcacctcatcaaggcagcagagtggatgaaggagtaagtctgccctctgccacaccccccaggtgtg

SEQ ID NO: 63590 - DNA, 1715 bp, Homo Sapiens
  misc_feature (197)..(256): n is a, c, g, or t
  misc_feature (743)..(771): n is a, c, g, or t
tttttagtcccataagcagtagactcccacagaaaatttcttcaaaattttttggtgttccaatgaatctgggatgtaaactctgaatgtatttataactatttatttctggatggtcattatcttgtagccaaatttgacaatataaagtaaggagcaaagttacaggccagtttttacttgtttgccctgagggnnnnnnnnnnnnnnnnnnnnnnnnnnnnnnnnnnnnnnnnnnnnnnnnnnnnnnnnnnnntatttttctacatcaaacctagcaaaaatggagatgacggtttctgatttataataaatactagacagttttcaggctcctgttagacaaacacattgatgaagaaattagtcttaataggattgtaggctgtgtagaaaagttggaaatatagcacttcatggagtcttgttttgaagatgacagttttctgtaactacagcttggaaactatgcaaatggtctatttcctcagagctcacatgataggatatagttagtgatgacattttgctcttcttgtgggaacacacacttcaaggaggagatagtgactttgagataggaacagtttaagatgcagtgtgagtctggcctgcgtgcggtgaggaggccccgccaagagactggtggacatctgactgtgggatgtgctctcaagtaggacgtcatcaggacagattctgaataggcatcatgagagtgctggtcagaaacggctgccacnnnnnnnnnnnnnnnnnnnnnnnnnnnnnaaaggaaggaacaatagctaggtaagatttttatcagctttctctgtctgaatccagtttttcctctgtcagtcctggaagcttgaatagaattatattgttgaagccttcaggtcacaaactgtcttttgtaacctcctgtccctcctaaaacacgccaacccctgcagtcaaatccacattagtaatctgatttgctgacagtcctgccctgcctgctcctcgttttcccacatgtcctgcatccctcccccactggagtgatttcagtgaatcagacaaggaaggatgtgtaggatcactactgcattgcaataccctgttatcctcagcaacaaaacccacatttcatacatcctttgtgtactcaggataaagactgatgtttactctctgggcactgttgtaagataggttttgtcagagcataatcattgtctgcaaagtgtttggtgcgaggaagattattgctaattttgtgaaataaagagtctagccctctccttttaatgaacttaactctcgctggcatctgtagtatcattgggagcttaggcgcacatggaaatgagagcccggcgcatggattttaatgtttttctaacaactgtggagatttgagggaatgtgtggtgaatgtaaaatacctagtttacttgccagtctcttgtgtaaattacagtaaaacaaagtaaatgaaatttaaacaaaaaataaatttgatcacaaaatgccaaaaacacccacccaaccttccgccgaaaaccatcacccagttcctctccttttgtcggcccgccctggccccccgaaaaagctttctaaaaccaatttcgtttgccgccgccggccccagtaggtaaagggaaacatgggccatagcttgctttccccaggaaaatccccgggccctgaactaatggcttgggatttctccaccaaat

SEQ ID NO: 63591 - DNA, 1137 bp, Homo Sapiens
gggatcgcatgaaaaacagttgtatcgtatgcaatatgggccactccaacacagaaatcgatgtgaccagcctccgcactccggagctgacgtgggagcgagtacgttctcaggtggaccatgtcatctggccagatggcaaacgagttgtcctcctggcagagggtcgtctactcaatttgagctgctccacagttcccacctttgttctgtccatcacagccacaacacaggctttggcactgatagaactctataatgcacccgaggggcgatacaagcaggatgtgtacttgcttcctaagaaaatggatgaatacgttgccagcttgcatctgccatcatttgatgcccaccttacagagctgacagatgaccaagcaaaatatctgggactcaacaaaaatgggccattcaaacctaattattacagatactaatggaccatactaccaaggaccagtccacctgaaccacacactctaaagaaatattttttaagataacttttattttcttcttactcctttcctcttgatttttttcctataatttcattcttgttttttcatctcattatccaagttctgcagaccacacaggaacttgcttcatggctctttagatgaaatagaagttcagggttcctcactctagtcactaaagaaggattttactctcccagcccagaaaggtgattctttctttaccatttctggggactttagtcttaattaggtaccttattaacaggaaatgctaaggtaccttctctgtggaacaatctgcaatgtctaaatcgccttaaaagagcccatttcttagctgctgaaatcagtgctctttcacttcttcagagaagcagggatggtacctacccggcaggtaggttagatgtgggtggtgcatgttaatttcccttagaagttccaagccctgtttcctgcgtaaaggtggtatgtccagttcagagatgtgtataatgagcatggcttgttaagatcaggaggcccacttggatttatagtatagcccttcctccactcccaccagacttgctcatttttcgagtttttaactagactacactctattgagtttaattttgtcctctaggatttatttctgttgtccaaa

SEQ ID NO: 63592 - DNA, 1475 bp, Homo Sapiens
  misc_feature (1363)..(1363): n is a, c, g, or t
  misc_feature (1393)..(1393): n is a, c, g, or t
ggggaggctgctcttggaattgcaaatcttatagttatgtctatggtagaaaatggcctgtcagaacaagaggcacaaaagaaaatctggatgtttgacaagtatggtttattagttaagggacggaaagcaaaagtagatagttatcaggaaccatttactcactcagccccagagagcatacctgatacttttgaagatgcagtgaatatactgaagccttcaactataattggagttgcaggtgctggccgtcttttcactcctgatgtaatcagagccatggcctctatcaatgaaaggcctgtaatatttgcattaagtaatcctacagcacaggcagagtgcacggctgaagaagcatatacacttacagagggcaggtgtttgtttgccagtggcagtccatttgggccagtgaaacttacagatgggcgagtctttacaccaggtcaaggaaacaatgtttatatttttccaggtgtggctttagctgttattctctgtaacacccggcatattagtgacagtgttttcctagaagctgcaaaggccctgacaagccaattgacagatgaagagctagcccaagggagactttacccaccgctttgctaatattcaggaagtttctattaacattgctattaaagttacagaatacctatatgctaataaaatggctttccgatacccagaacctgaagacaaggccaaatatgttaaagaaagaacatggcggagtgaatatgattccctgctgccagatgtgtatgaatggccagaatctgcatcaagccctcctgtgataacagaatagaagcactcccctgataaatactttctgtgctccagggaaccccttttttcagacaagaagagataatgtcttcagttttatggtgttttctgtgttttgttctccctgaccactttggttgatgtattttttccatgcgtctccacatctgttggggtagacgtgttgattgattgcattgcccaccagcaccctacagtcagatagttgtgatgctttaattctaacatacagcccgtaccacatccaggagatgtaaaaagtgtgtttgtgaatgtcttcacttgtactctaattcagacttgccaaagtatttgctatttactattatgggtaatactcttctctggcctagttcttacagagctactaaaatagaaatttacttttatggatagaagtacagaattttgagaagaaactaaattttcaccaaattttaaggaaaaattgtcattatctaaaaatgttcttatatatctgcttcatcttaccttcatactctgaaattccctatagcagacagagctagggaaatattanaaatttaccctatttattttctggaactanatcaagccttaactataacattatgagagtaatgggaactagtgctggctttaagtaataaaagtcattgttttcaacagtg

SEQ ID NO: 63593 - DNA, 839 bp, Homo Sapiens
  misc_feature (691)..(699): n is a, c, g, or t
gggggtaggaatgggaaaaggggcaacctacaaagattgttggggcaagggaagtcacaagctttcggatgggcggtggcttttcacaaaacatttagctcatcttattctctctttgtcctctctcccctcctgcccgcccgcaccctggaattgccactcagttcctctgggtgtgcacatatgtttggagaaatagaggagagaaaagagggccacgtaactgagagcttacagtgccaatgccgtttgtgttctggccagagtggagtgcgcagccctgactcccaggcgctgagattgttgcctggttacccaggaagctgctgttccggctgcccagcctttctctgagccagcggatgcacagtccgtggccttcttcaggcttattgatgatgctttttgcaaatgttgaatcatggttctgtttctaagttggatcttttttgttttctccttgccaccctaatttgacatcaaaattctctcttgtgcattgggccctgggtcattcaaacccaggtcacctcattccccttctctgttcacgcctaatgtcttgaagagtaggtagccgccgtgtgggcctgaacctaggccagtttgcttagcgggtccccctgctgatgaagtcctggcaaagcggttggtaatgtgtggcaaattgcgcgcacccaagggttcggtnnnnnnnnntctgatcccaggtcttccccccccaacccgccaccaaggggggccccataacagggctatacctggatagtgaccggggctcggggcacctgcgagggagagcctttttcctaaacaccgctttttgcccattttggggg

SEQ ID NO: 63594 - DNA, 443 bp, Homo Sapiens
  misc_feature (324)..(355): n is a, c, g, or t
cggattggcgaccatttcaaccttgggatttttccaaattacttaagatgtttaatgtcagttaaagatttttttaccctctttttgggaacatcaattttgtactgttatgcagtaaacatttataataatataatttcagtcatttcttaactgtcacatctattgaaaatggatatagatacaggttttaagtattttaagtatatattacttattttaattttctgactttactattttaagggccagagggttaatcacaaagagcaattatgtggtctccctgctacatgaaaccgtgtatactaacaagcgtacaannnnnnnnnnnnnnnnnnnnnnnnnnnnnnnncccagttttgaataattacatggtggattctgacttttgaggggaagcaaatgattattttagagtctttgaaatggtcgccaatccg

SEQ ID NO: 63595 - DNA, 538 bp, Homo Sapiens
ggggggctatgcttttgatgtgcatctcaatgctttttatccactcctggtcattttgcattttatccagctttttttcatcaaccatgttatcctgacagacacatttattggatatttagttggaaataccttatggttggttgcagttggctattatatctatgtaactttcctgggatacagtgcattgccatttttgaaaaatacagtaattcttctgtatccatttgcacctctgattctgctctacgggctttccctggcactgggatggaacttcacccatactctctgttctttctataagtacagagtgaaataaaaagtgagaagaagattcaatcgtaactgtgtcaacagtattgtgaagtgatcatttcttgtaaaacttgtaaataaactatcatctttgtagatatcttaaaggtgtaaagtttgcaaatttgaagaaatatatattaacactgtggtcaggtacattccttaaaactaattaaatgtacatttctataataaatattttttaaactaaaaa

SEQ ID NO: 63596 - DNA, 1053 bp, Homo Sapiens
actctagatgatcccctcctgcacaggcactgcaaaggtgatgatgtcgggaaggcggccaacaatcccaaccactgtaactgcatcatagaccaaatcttcacaggtggcctgcagtctgatgtcacctgtcaagcctgccatggcgtctccaccacgatagacccatgctgggacattagtttggacttgcctggctcttgcacctccttctggcccatgagcccagggagggagagcagtgtgaacggggaaagccacataccaggaatcaccaccctcacggactgcttgcggaggtttacgaggccagagcacttaggaagcagtgccaaaatcaaatgtggtagttgccaaagctaccaggaatctaccaaacagctcacaatgaataaattacctgtcgttgcctgttttcatttcaaacggtttgaacattcagcgaaacagaggcgcaagatcactacatacatttcctttcctctggagctggatatgacgccgtttatggcctcaagtaaagagagcagaatgaatggacaattgcagctgccaaccaatagtggaaacaacgaaaataagtattccttgtttgctgtggttaatcatcaaggaaccttggagagtggccactataccagcttcatccggcaccacaaggaccagtggttcaagtgtgatgatgccgtcatcactaaggccagtattaaggacgtactggacagtgaagggtatttactgttctatcacaaacaggtgctagatcatgagtcagaaaaagtgaaagaaatgaacactcaagcctagtgtagttacacacagacctaccttcaatggaagatgacgacaccaatactacaactggcatcgagatctaaaggacctacttgaccatggcccatgggcctgacagagtaagaattgaacagtacccagtgtccaaaaggtcctgattggaagagaaatagaaggggagggagaagaggctctagtctaagcaaatgatgaaagggaaattaaatggtaggaacactgtgggtgaggaaggcagga

SEQ ID NO: 63597 - DNA, 664 bp, Homo Sapiens
  misc_feature (554)..(562): n is a, c, g, or t
tttttttatttaaatgagtacaactctagcattttgaagttccagttgtaaatgtatttgtttaccagtaggtttgtgaaattggttctttgtatgggggatggtcctttttcacacagctaggtcttttcagaagtggtggaaattggcagctggggtactttcagtttggactgatattcatcacacctcagataaaatgcagagtaatatatagttgcactttataaatggtggttaaatggaaatgttcaagccattttatagttgtgatgcacaatatagatttaagtgcttctgtcaaagtattcctccagtacaagtttgtatagtttgctgcccttgatgagcaaaaagtatttatcttgggcttatctgaatgatcaggatgagatttaatgcccatatcttaccagtgtcagttatctccagagccatgtgtcacccttgtagagtgagtcacagtgcagggagtgtgaatgtcagaggtggtgttattatgccagtggtgccttacccttaatgctgttcacagatatttatttactaatgcnnnnnnnnncttaagagttagtgggataggaaaatgaagtgtttgctcttcatttactaaatgattgtaaacttgagtttttcatcaaaataaaattccattgttttaaaa

SEQ ID NO: 63598 - DNA, 505 bp, Homo Sapiens
  misc_feature (394)..(404): n is a, c, g, or t
ggggccttcgacgtggcgttttcttcggtttcacttccggtgggaaggatacgagcaagataaagcagcgagggatttaagtctggcaacagttggactgctggattttcagagaagtgttccccaaagcaaattatagtgctaatttccaatgttccataagcgtggcaagaaaaatgggaagttctcgtggcattggctcagtgatttccatgagcatctctaccagaaaacattgcctcgatgaggtgtggtggaagcccggcagccccttctaatcggctaggcttgagaaagcgtgtacctctgcatttccgaaattaactcagcgtgatcggccagattttcctcagcatctggtgtcaagaccctcgtcactattaattcggaaagnnnnnnnnnnncaaacaccgttttccagcatttctcttggtggagaactaaactaccaggaaaaatgtctattttccctaagatatctttgaacctgagcaagccaggggga

SEQ ID NO: 63599 - DNA, 765 bp, Homo Sapiens
  misc_feature (506)..(630): n is a, c, g, or t
  misc_feature (642)..(655): n is a, c, g, or t
  misc_feature (662)..(681): n is a, c, g, or t
aaactgagctttatatccttttttaatgcctgtgaattttagcatattgaaacattagagcaaatactcaggggatttttcattaaacatccctcagataatttagctatatatcattagaaagggaaagctatcatttttattttaaaactaaacaaggccatcttataaactgtcaccaaagtcttcccttttttattgcatgtgtgccttgaatttcataaaacattaattcacaatgggggtcagaatgtactcttgttgaaacacttcttgtaccattttatgttcatattatgtttgagagggtaaaaatgtatgagcagcttaactgaagtagaactattcatgatgcttttcacacattgtggcataagatgtaaagtttgtaattaatgttaatttctgtgcattttaatattcttttataattattaatgttaatttctgtgcattttaatattcttttataattatgagcattttaataaattcatttttacaannnnnnnnnnnnnnnnnnnnnnnnnnnnnnnnnnnnnnnnnnnnnnnnnnnnnnnnnnnnnnnnnnnnnnnnnnnnnnnnnnnnnnnnnnnnnnnnnnnnnnnnnnnnnnnnnnnnnnnnnnnnnaattttgggggnnnnnnnnnnnnnnaaaaaannnnnnnnnnnnnnnnnnnnggggccgggcccccaaaggaaaggaaacagggcctatgtttttcccaaggaaacccgggacaaaaaaaggggtgggatcccccc

SEQ ID NO: 63600 - DNA, 898 bp, Homo Sapiens
tgaggattcctcacacatgtagtactcagagctctacggaaacccaggcacctcgacctcaagaggatcagcctggccaggtggcacaactcttccttccccgtgcacagcaggaaagctgccatcagctgagcaagtccaccaacagtttctgtgtcccacttcatctttaataaggacaccatcttcttgtattatacaagaaaggagtgtacctatcacacacagggggaaaaatgctcttttgggtgctaggcctcctaatcctctgtggttttctgtggactcgtaaaggaaaactaaagattgaagacatcactgataagtacatttttatcactggatgtgactcgggctttggaaacttggcagccagaacttttgataaaaagggatttcatgtaatcgctgcctgtctgactgaatcaggatcaacagctttaaaggcagaaacctcagagagacttcgtactgtgcttctggatgtgaccgacccagagaatgtcaagaggactgcccagtgggtgaagaaccaagttggggagaaaggtctctggggtctgatcaataatgctggtgttcccggcgtgctggctcccactgactggctgacactagaggactacagagaacctattgaagtgaacctgtttggactcatcagtgtgacactaaatatgcttcctttggtcaaggaaagctcaagggagagttattaatgtctccagtgttggaggtcgccttgcaatcgttggagggggctatactccatccaaatatgcagtggaaggtttcaatgacagcttaagacgggacatgaaagcttttggtgtgcacgtctcatgcattgaaccaggattgttcaaaacaaacttggcagatccagtaaaggtaattg

SEQ ID NO: 63601 - DNA, 555 bp, Homo Sapiens
ggagatattttaacaccccatatttggctctgatttcaaacgtttaactcactactgatgattctcacgctaggcgaatttgtccaaacacatagtgtctgtgttttgtatacactgtatgaccccaccccaaatctttgtattgtccacattctccaactataaagcacagagtggatttaattaagcacacaaatgctaaggcagaattttgagggtgggagagaagaaaagggaaagaagctgaaaatgtaaaaccacaccagggaggaaaaatgacattcagaaccagcgaacactgaatttctcttgttgttttaactctgccacaagaatgcaatttcgttaatggagatgacttaagttggcagcagtaatcttcttttaggagcttgtaccacagtcttgcacataagtgcagatcttggctcaagtaaagagaatttcctcaacactaacttcactgggataactcagcagcgtaactaccctaaaagcatatcactagccaaagagggaaatatctgttcttcttactgcgcctaaatcatagac

SEQ ID NO: 63602 - DNA, 1034 bp, Homo Sapiens
cccgcgccccgccatggaggatctggatgccctgctctctgacctggagactaccacctcgcacatgccaaggtcagggctcccaaagagcgccctgcggagcctctcacccctcccccatcctatggccaccagccacagacagggtctggggagtcttcaggagcctcgggggacaaggaccacctgtacagcacggtatgcaagcctcggtccccaaagcctgcagccccggcggcccctccattctcctcttccagcggtgtcttgggtaccgggctctgtgagctagatcggttgcttcaggaacttaatgccactcagttcaacatcacagatgaaatcatgtctcagttcccatctagcaaggtggcttcaggagagcagaaggaggaccagtctgaagataagaaaagacccagcctcccttccagcccgtctcctggcctcccaaaggcttctgccacctcagccactctggagctggatagactgatggcctcactctctgacttccgcgttcaaaaccatcttccagcctctgggccaactcagccaccggtggtgagctccacaaatgagggctccccatccccaccagagccgactggcaagggcagcctagacaccatgctggggctgctgcagtccgacctcagccgccggggtgttcccacccaggccaaaggcctctgtggctcctgcaataaacctatttgctgggcaagtggtgacggctctgggccgcgcctggcaccccgagcaacttcgtttgcggaggctgttccaccgccctgggaggcagcagcttcttcgacgaagggatggagcccccttctgccccgagtgctacttttgagcgctttctcgccaatgatgtcgctttctgcgaccagcccatccgacacgaggatggtgaccgccttgggcaccactggcccccagagcattctgctgcgtacagtgcgggagccctccgaaactacgggttccctacgcgagggcgcccatatccgcgggatccgatgtccccc

SEQ ID NO: 63603 - DNA, 608 bp, Homo Sapiens
gggtgacatagccatgagtgccctcgtgggtgtgggcgccagtctgtcattgacctcattgtgtcagcaccttccccccaaggaggctgaccctgccctgccagctgagactgggagacggagtgggctctgatcccagggcttccaggaaagctctggctttggagcagaagcgggttctaggacttagtgcccctcactcggtgcctgggttcctgtgtgtgtggaaagggtagggctgcaccctgtggaagagggttcagggagctctgaggacctggctcgtgctagatgctcagtcagtagtgtgttttagcagcagccggaagtgactgctttcagtgtgtagtggtgagtgctagctggcacccctgcgcctggcttcccagacactgttacgcagggcaggggtaggcagcgagggcggggtccccacggtggccctggcagccccgcaatccccggggaggccggtggggatgtcgggtctgcgagagcgccagctatcactgagggatacttcggtagggtaccagctactagatgtgttcgattatctttcgcccctatacccaggtcggacgaccgatcgcacgtcagccggatgt

SEQ ID NO: 63604 - DNA, 570 bp, Homo Sapiens
ggagtgcaatggctaaaggaggaagattgggaggcacaaaggccgggcgaggcagtatacaagccctgaggagatcgacgctgcagctgcaggctgagaagcagaaggccaggcaagaagaggagcaaaaagaaggtggagatggggctgcaggtgaccccaaaaaggagaagaaatctctagactcagatgagagtgaggatgaagaagatgactaccagcaaaagcgcaaaggcgttgaagggctcatcgacatcgagaaccccaaccgggtggcacagacaaccaaaaaggtcacacaactggatctggacgggccaaaggagctttcgaggagagaacgagaagagattgagaagcagaaggcaaaagagcgttacatgaaaatgcacttggccgggaagacagagctatccaaggctgacctggcccggctggccatcatcctgttacagcgggaggaggctgcccggcagaaggatagagtaaaggatagcataagacgatgccacattgtcaggaaaacgaatgcagtcactctccctgaataagtaactgcgacccgtggga

SEQ ID NO: 63605 - DNA, 404 bp, Homo Sapiens
gactttgccttggagagccagagcttccgcattttctttactattctttttaaaaaaagtttcactgtgtagagaacatatatgcataaacataggtcaattatatgtctccattagaaaaataataattggaaaacatgttctagaactagttacaaaaataatttaaggtgaaatctctaatatttataaaagtagcaaaataaatgcataattaaaatatatttggacataacagacttggaagcagatgatacagacttctttttttcataatcaggttagtgtaagaaattgccatttgaaacaatccattttgtaactgaaccttatgaaatatatgtatttcatggtacgtattctctagcacagtctgagcaattaaatagattcataagcataaa

SEQ ID NO: 63606 - DNA, 658 bp, Homo Sapiens
  misc_feature (93)..(93): n is a, c, g, or t
ccggtcaccatcgacagccaggccaggcaagcagacgactcttccgcgcacctcacccagacatgttcaaggagcagcagctgcagatcttcnatctcatgaagtttgatagctacactcgctttctgaagtccccgctgtaccaggaatgcatcctggcggaagtggagggccgtgcactcccggactcgcagcaggtccccagcagcccggcttccaagcacagcctcggttcagaccactccagtgtgtccacgccaaaaaagttaagtggaaaatcaaaatccggccgatccctgaatgaagagctgggggatgaggacagcgagaagaagcggaaaggcgcgtttttctcgtggtcgcggaccaggagcaccgggaggtcccagaaaaagagggagcacggggaccacgcagacgacgccctgcatgccaatggaggcctgtgtcgccgagagtcgcagggctctgtgtcctctgcggggagcctggacctgtcggaggcctgcaggactttggcacccgagaaggacaaggccaccaagcactgctgcattcatctcccggatgggacatcctgcgtggtggctgtcaaggcgggcttctccatcaaagacatcctgtccggactctgtgagcggcatggcatcaacggggc

SEQ ID NO: 63607 - DNA, 481 bp, Homo Sapiens
  misc_feature (37)..(37): n is a, c, g, or t
gagcggggagggaaagggaaaacggggctcggcattntgtgttttagaacagcgctgcacccccttcatgtagctttcgatgcttgtttctttcccgtctttgttgtcactatctttgtctatcagtacgaaagtacaaagtagctgccggcaatgaaataggggtgctgtttgcacctgcaggttaggggtggaggcgtttagaattttggggtgtgattgagccccgtttataattagaatgcccctggacccctaccactctgtgacgtgggggcacgcgcagggatcccatcattttgtgtttggggagctcagagtgcgcccaatcttggaatctttaagggatgagccagacccagacccgcggccttctagagagggtccggcagggagggtcggcgccctggcccggggtgggccggagccctgtgatgctgcatcgcccccaggaggagccagcttcgcctgctgcgcgctc

SEQ ID NO: 63608 - DNA, 488 bp, Homo Sapiens
ccccgccccgccgctgggtcctagcgccggcccctgtttggcagggtccgggctccgtcggtgcgaggagccgacgccgacgccacggagtcagcacaagtctcatcagagaaaccccgttcaccaaggccatggaagtggaggctgcagaggcccggtccccagcccccggctacaagcgctcgggccgccgctacaagtgcctgtcctgtaccaagacatttccaaacgcgcccagggcagcgcgccacgctgccacacatgggccggcagactgctctgaagaggtggccgaggtgaagccaaagccagagacagaagctaaggcagaggaagccagtggggagaaggtgtcaggctccgcggccaagcctaggccctatgcgtgtccgctatgccccaaggcctacaagacggcacccgagctgcgcagccacgggcgcagccacacgggggagaagccctttccgtgccccgagtgcggccgc

SEQ ID NO: 63609 - DNA, 525 bp, Homo Sapiens
cctggcttgccaggtctggagcagtgcagttgtgaaagttttgattcatggattcacccagtcattacttctagatgatgctggctcagttctggccacagccaccagctgggatgagctagaaattcaggaggaggcagagtctggcagcagtgtcacatccaagatccgactccctgcacagccgtcctggtatgtacagtccttcctgtttagtttatgccaggaaattaatcgggttggaggccatgccttgccaaaggtgacattacaggagatgctgaaaagctgtatggttcaagtagtagctgcctatgagaaactctccgaagaaaaacagattaagaaagaaggtgcatttccagtcacccagaaccgggcgctgcagctgctttatgatctgcgttacctcaacattgttctgacagccaagggtgacgaggtgaagagtggccggagcaagcccgactccaggtgtcgtctcctctagggagctatgtcaaggcggccgtccccactgtcata

SEQ ID NO: 63610 - DNA, 414 bp, Homo Sapiens
agacacagctattgagagacttcagcggctccagcaggcccttgagatgggtgtctccagcctaatggcgctggtcactaccgactggcggtgttacggatatatggaaagacacatcaatgaaatacgcacagcagtggacaaggtggagctgttcctgaaggagtacctccactttgtcaagggagctgttgcaaatgctgcctgcctcccggaactcatcctccacaacaagatgaagcgggagctgcaacgagtcgaagactcccaccagagcctgagtcaaaccagccatgacttaaagagtgcagctggttcctgaatatcgttggccatcaacaagccccagaacaagtgtgacgatctggaccggtttgtgaacgtggcaaagacgtccgcgactaacttggagat

SEQ ID NO: 63611 - DNA, 821 bp, Homo Sapiens
tccggaattcccgggatggggccgcagttaagttccaggtgggcagagtttcaatgagttgaggcattttggcattcggctgtcgaaacaaatgggcagcttaaaaccagccacctcttttcataactgccgctttgactccacttttccctgtatcccacagaagttggctcaggagggccgtgctccggtggaatgcccatctctgggcccagtgccccatcgccctccatttgaaccgggcagtgcggtggctacagtgcccccctacctgggtcctgacactccagccttgcgcactctcagtgaatatgcccggcctcatgtcatgtctcctggcaatcgcaaccatccattctacgtgcccctgggggcagtggaccctggggctcctgggttacaatgtccctggccctgtacagcagtgatccagctgccctgggagagggaacgggaagcccgtgaacgagacctccgtgaccgcctcaagcctggctttgaggtgaagcctagtgagctggaacccctacatggggtccctgggccgggcttggatccctttccccgacatggggggcctggctctgcagcctggcccacctggcctgcaccctttcccctttcatccgagcctggggcccctggagcgagaacgtctagcgctggcagctgggccagccctgcggcctgacatgtcctatgctgagcggctggcagctgagagtgcagcacgcagaatgtgtgtggctgtgcctgggcaatgacccactggaccggctgcagatgctcaatgtgactccccatacacaccagcactcaca

SEQ ID NO: 63612 - DNA, 598 bp, Homo Sapiens
attatagagcttattttatgaactataaactataatttaatgcaaaatatccttttatgaatttcatgttaatattgtgaaatattaaaataattccgcaatagttgagaaaaatgagcatttttttccatttttaaaaaatgcatagaaaagacaattttaaaatcctgggaccatatttatttagaagtagctgttagtaaaacattagaaaaggagtcaggccattaggttatttatccaaatctctaagcaattaggttgaagttattaagtcaagcctagaaaagctgcctccttgtaaggctttcatgacaatgtatagtaatccacagtgtccaattcttcacactcctcaggaatatcactacctcaggttacggtacacaggctataattgatgatgatgttcagataactgaagacacaataaatgacattcagacatcaggacaattccctcatgttcttttctatgatggccacctgtaccagcaacgtgggtttcacccacacaacgatgaactgttctcttacttctccagttgattttaaagacttgttaagaggtcttactaataaaatttgggtatgatag

SEQ ID NO: 63613 - DNA, 826 bp, Homo Sapiens
  misc_feature (720)..(753): n is a, c, g, or t
ctgtcctgcagcactggatgctttgtgagttggggattgttgcgtcccatatctggacccagaagggacttccctgctcggctggctctcggtttctctgctttcctccggagaaataacagcgtcttccgcgccgcgcatggagcctcccggccgccgcgagtgtccctttccttcctggcgctttcctgggttgcttctggcggccatggtgttgctgctgtactccttctccgatgcctgtgaggagccaccaacatttgaagctatggagctcattggtaaaccaaaaccctactatgagattggtgaacgagtagattataagtgtaaaaaaggatacttctatatacctcctcttgccacccatactatttgtgatcggaatcatacatggctacctgtctcagatgacgcctgttatagagaaacatgtccatatatacgggatcctttaaatggccaagcagtccctgcaaatgggacttacgagtttggttatcagatgcactttatttgtaatgagggttattacttaattggtgaagaaattctatattgtgaacttaaaggatcagtagcaatttggagcggtacgcccccaatatgtgaaaaggttttgtgtacaccacctccaaaaataaggaatggaaaacacacctttagtgaagtagaagtatttgaaaatattattgaaactgataactttctggtgagacnnnnnnnnnnnnnnnnnnnnnnnnnnnnnnnnnncacactgccgcagatcttagacattgcttataagatgcaaactcaggccaggtctggtctctcggcgtgtgca

SEQ ID NO: 63614 - DNA, 378 bp, Homo Sapiens
ctcggtacccttttttggtggatgtgagaaccgtgagccgcgcacaccctggtgagacaccaattcccacaagcctgcagcagggcctggggctgagcctgggcttcccattcatctcagcgacttcagcctgagaagtgagccctgcctgggcttcacacccagagagtccatacatattctgctccgggaagagtcggggggtctattcaagtttctctgcagacaaaacttcccacaacaggtaccaatctggcctccttcctcagcgaccggtagagaaagcaacagaatgggaagtttcctctgtggttcggagcctcatgagctctgccccgtcaagggtgacacgtgaccgtcccttgttgggcttgggga

SEQ ID NO: 63615 - DNA, 466 bp, Homo Sapiens
tttatttatgttggtacatccaacaaaatagttggagccacaaggcccttgtctttttaaaaaaacaaaatattttgaagatggtgaaagtgactgattttaataatgagataggtcacttaaaataacagtgcctttgaccttaaaacatggcactggcccatgtgacctttgccatttcccagtacttccctttacagtctgcagcctataaacagtggtgtctcaaagcaaaggaaacctccacaagtgctgcaacagtgcattagtttttatgtagcaatttgtttataaaaattcccatcccataatgcatgaccttcctaaaaatacccacagcctccataggcaaggtgagctttttgtgctacccactggttagattccagccacctcagggattttgatccatgtcattaacgaccatcccagggtgtgagggcctgattaaagcttatcgaactag

SEQ ID NO: 63616 - DNA, 495 bp, Homo Sapiens
  misc_feature (462)..(462): n is a, c, g, or t
ggacggggtgggagatgcttgcgacagctgccctgaaatgagcaatcctacccagatgcagacagcgacctggtgggggatgtctgtgatactaatgaagacggcgatggggatgggcatcaggacaccaaggacaactgcccacagctgccaaatagctcccagctggactctgataacgatggacttggagatgagtgtgatggggatgatgacaatgatggcatcccagattatgtgcctcctggtcccgataactgccgcctggtaccccatccccatcagaaggactcagatgtggccagggccttcctgagcacccagcctcactctgcccaggccatggcgttggtgatgtgtgtgaggatgactttgaccctgatgctgtggtcgacccctggatgtgtgtcctgaaagtgcagaggtaacgcttacggattttctgcctatcagaccgtcgtncctgcctgagatgggatcctctagatcacctcc

SEQ ID NO: 63617 - DNA, 952 bp, Homo Sapiens
atcgtcaggacaccagcatcacctcttcatatcctcctgggaaccactggcatggagcagccgccgatgggaaccgtcagagttctagggacatttccaagtcagtctattagagaagagtgagtggcacgtcctggaatgttggccaactcttcctaggtttcttttgcttccccatttgctagtggatggggagatgggttgggggtggggggtctctatgtgccttgcttttgcaggttgacagtctatgccacactggagcagaaaaactgacatgagccagagggaaaagtgtgccacggctatgttctaggcccactgcctcagacatagcattgagacgagtgaaatacacacttggtcatccacggaggcttccaaggccatggccaaatacagttagaagagagccaggcttccgtaccagctctgaatgatgctaaccagattctgtcattctacatccactttgcccagactgtatagacacgacctatgtttcacctcaatacctctcccttcctgggacagggttgttagacactaaatgcttctctctgacttttttgcttaagggagtgggatgagtagtacattttgcccttgtccaggcatgtttaaggagctcctactggacaggttgcagactagcagtgagtcaacagagccctgtttgccagctctgttgccagtgtagatgcagtgatgtggcggctatgtttcccagagacgacagtgggcacagctatagtgtcaccaacatggcagagatagtttcaactgtgcctgttacaggtgtggcactcgaaggaccagaagcagcggtttggaacatgggttactgggagcagaggactggaagaaacagagctgggctccttccctgtcctgacaatgtaggagaggagtcgttgtgaggccagccctgcccgtcgttgttacacattct

SEQ ID NO: 63618 - DNA, 401 bp, Homo Sapiens
ggaacaatgtgaagcacacaacgagttttcaaaagcttcctttgggagtgggcctgcggtggaatggattcccaagtacgctggcgtctcaccaaaggacaggtgcaagctcatctgccaagccaaaggcattggctacttcttcgttttgcagcccaaggttgtagatggtactccatgtagcccagattccacctctgtctgtgtgcaaggacagtgtgtaaaagctggttgtgatcgcatcatagactccaaaaagaagtttgataaatgtggtgtttgcgggggaaatggatctacttgtaaaaaaatgatcaggatcagttactagtgcgaaacctggatatcatgatatcatcacaattccaactggagccaccaacatcgaagtgaaacgcgcc

SEQ ID NO: 63619 - DNA, 519 bp, Homo Sapiens
aaaaaaagtgggcttttgggtccctgaaaacatcagtgcccttcttcctggtctgggtgtctccctgagtctaaggggaagattctcaagtcccctggtgatttccaagtggagctgagcagttttagggaaattgagtgctgggtcattcagaaggtaaatgagatcatctgttacctgtacgctgtattaaaatagaaccaggaaaggctcaggatttcagacatttcgtcagccttttcactttcccagcttcaatggaggtatatatgtcattttcttttcagcttacacatgtgttcaaagtggatttttaaaaagtgttttagcaatactccttaaccaaataaaccttcggagaacgtcactaagcttttccagagagaagaccctagatgaagttggaaaagagctctggctgactccacccactgtccccaagcattaaaggtgtggccatgagtttacagaattacccacatttcagttgccaactgggatgcaaagctatagtgctca

SEQ ID NO: 63620 - DNA, 985 bp, Homo Sapiens
  misc_feature (963)..(963): n is a, c, g, or t
  misc_feature (967)..(967): n is a, c, g, or t
tcatcggcctattcttgtttatgccgccactctctcttatttcattctgaattcagcattctccagtttctcatgtccttctactctcttctccgaatttcatctccctgatcatgggtcatagattctagcttaactcttcgggtggccaaggtaaaatgctatggctttcacttaatgcggattcgggtctgctgggtcattcatcaaagagtacagaagtccgctcctgctgacttggctgggcttagaggatgaggatgtcatcattgaagtgaaatggggtggaatgtggctatgatggaaccctatgagaagttggtggatagaatccagagcagtgggaagatatgtcacacttctagtctgtggaaagaaggcctatgattatttccaagctgaagtaaatccactattgtttcctcctggctgatccacttgacacccctccagattgctaaagaaggaatagtggtggagtcaaaccagtgactcgcacatggcaaaagaacgggcccacagtacagcctcacattcttcttccaattctgaagatacagagatgtgatgaaaacaagtaatagctttggctgtttatttgatagctgtttctgggtatttaataggaatcctttctcaaggaatgagttgtgacctgtttactgtctctttagaagaaaaactccactggaaaccattcaccatgtgtgattgtcttctgttatcatttgtcttacaggcggctattgcagacggctaatttatgcttaacttaggaagagataaggcaagagctagattttgtttcatgtgatcttttccaagcttcaactctaacttaactacatttctctgtatgatgatgtctcttactttgctacaggttccttgagcaccaaagatgattcataactctgtataggtgtcagctgcttataaaagcatctagcaggaattaaacgncgcntactgggaaaacttgtgg

SEQ ID NO: 63621 - DNA, 652 bp, Homo Sapiens
aaagtgaataggcttcataaaatgaaactttctttctaaagaaagatactcacatgagttcttgaagaatagtcataactagattaagatctgtgttttagtttaatagtttgaagtgcctgtttgggataatgataggtaatttagattaatttaggggaaaaaaagttatctgcagaaatgttgagggcccatctctccccccacaccccacagagctaactgggttacagtgttttatccgaaagtttccaattccactgtcttgtgttttcatgttgaaaatacttttgcatttttcctttgagtgccaatttcttactagtactatttcttaatgtaacatgtttacctggaatgtattttaactatttttgtatagtgtaaactgaaacatgcacattttgtacattgtgctttcttttgtgggacatatgcagtgtgatccagttgttttccatcatttggttgcgctgacctaggaatgttggtcatatcaaacattaaaaatgaccactcttttaattgaaattaacttttaaatgtttataggagtatgtgctgtgaagtgatctaaaatttgtaatatttttgtcatgaactgtactactcctaattattgtaatgtaataaaaatagttacagtgacaaa

SEQ ID NO: 63622 - DNA, 429 bp, Homo Sapiens
ggaagccctttagccatattgaaaacaaatatctttttcaacgttatcttagctctactagttgatctttttgttatatgtatcatgatacttaacctctaccttggtttaatcattttaagatagacctaagtatattacctttattgtaagattcttggaagtattatgtaagttattacatgtaaaagctcttagaatggtgccttgaacgtagcataccacaaatattagctaccattttcactagtgttattttagagaatttgcatgagaggagagtacttatgagtataatgaatattgagaaatcttttatcaacacatccaagatgacttggttggggggcactgtatgccataatgaatgtgagaaagctgtcatttaaatctcatccattattgctataagaggaaattcatactgtt

SEQ ID NO: 63623 - DNA, 730 bp, Homo Sapiens
aagttagtcgggaccgtggactcgagggcggacacgaggcgtgatccgactcccgtcacagatacaactttgccatgaacgtgctcggcgggtaaaaggccggaccgggctgagggtggtggtcaaggctgtggaccccacatcggggcagctgtatggcctggccagagaactctcggatgagatccaagtccaggtgtttgagaagctgcagctgctcaaccctgaaatagaagcagaacaaatattaatgtcgcccaactcatatataaagctgcagacaaacagggatggtgcagcctctctgagctaccgcgtcctggatggacccgaaaaggttccagttgtgcatgttgatgagaaaggctttctagtatcagggtctatgatcgggacatccaccatcgaagtgattgcacaagagccctttggggccaacaaaccatcattgttgctgtaaaggtatcccctgtttcctacctgagggtttccatgagccctgtactgcacacccagaacaaggaggccctggtggccgtgcctttgggaatgaccgtgaccttcactgtccacttccacgacaactctggagatgtcttccatgctcacagttcggtcctcaactttgccactaacagagacgactttgtgcagatcgggaagggccccaccaacaacacctgtgttgtccgcacagtcagcgtgggcctgacactgctccgtgtgtggg

SEQ ID NO: 63624 - DNA, 502 bp, Homo Sapiens
gcacgaggacacctggtacctagtcgatagtcgctggttcaaacagtggaaaaaatatgttggctttgacagttgggacaaataccagatgggagatcaaaatgtgtatcctggacccattgataactctggacttctcaaagatggtgatgcccagtcacttaaggaacatcttattgatgaattgggattacatactgttgccaactgaaggttggaataaacttgtcagctggtacacattgatggaaggtcaagagccaatagcacgaaaggtggttgaacagggtatgtttgtaaagcactgcaaagtaggagtatatctcacaggattgaagctatgtgaaaatggaaacatgaataatgttgtaactcgaaggtttagcaaagctgacacaatagatacaattgaaaaggaaataagaaaaatcttcagtattccagatgaaaaggagaccagattgtggaacaaatacatgagtaacacatttgaaccactgaa

SEQ ID NO: 63625 - DNA, 426 bp, Homo Sapiens
tgtggagtatcagtgcacttcgggcacaggggatctcaccaaggaaaagaaagatcttcttggagaactatcaaaagttcttagcatctcaactagaacgccagccgtgcgtgaagttcggagagcagtaaacgatgaacggttaacaacaattgcacataatatgtctggacctaatagctcttcagaatggtccattgaaggtcgtcgattggtaccactgatgccccggctcgttccccaaaccgcctttactgtaacagctaatgctgttgctaatgcagctatccggcataatgcatctcttccagtgcctgcagaaacaggaagcaaggaagtagtggtttgctattcctacacaagtaccacgtcaaccccaagctctacccctgttccaagtggcagcatagcaacggttaagtctcc

SEQ ID NO: 63626 - DNA, 601 bp, Homo Sapiens
gcatcgaatcatcttgggcagaggagcaagcccctcgaacatgatttcaaacaaagcaggtcctcttctctcatctcatgtccttagtctctgttaatgaacatactggatgtggagtttaataaattacctactatcatctggccacttagattattatcacaccactggtggactgttcctggggggagaagaacagaccgatttgaaagattcaagggagaaagattaaggatcaggatttgcatgaaagaagaaaatccttcgatatttaaaatgtttcttactatactcacggagcacttttatggttccatccgagcgttcctgaaatgaactgaccattaacagcgcctctttgataggttaccctgatgctgctaaagtaaagccttaagtgtgtttttgggacaacgtgctgcttattccacctcagccacatatgtgtttgtgtttaggatattgtaaatctttgctaagtagtgttttccttggtgaatgaagtcattgttgtcttcaagtgtaccatcagcctagcaaaaaattgctacatactttctcttatgcaatagttcttggtacttctaatattttggcaaga

SEQ ID NO: 63627 - DNA, 1733 bp, Homo Sapiens
cggtccggaattctcgggatccgctgcagccgcccaagcgcccgccatgcgcgctgcccgcgccgcgccgctgctccagctgctgctcctgctggggccgtggctggaggctgcgggcgttgcggagtcgccgctgcccgccgtggtccttgccatcctggcccgcaatgccgaacactcgctgccccactacctgggcgctctggagcggctggactacccccgggccaggatggccctctggtgtgccacggaccacaatgtggacaacaccacagagatgctgcaggagtggctggcggctgtgggcgatgactatgctgctgtggtctggaggcctgagggcgagcccaggttctacccagatgaagagggtcccaagcactggaccaaagaaaggcaccagtttctgatggagctgaagcaggaagccctcacctttgccaggaactggggggccgactatatcctgtttgcagacacagacaacattctgaccaacaatcagactctgcggcttctcatggggcaggggcttccagtggtggccccaatgctggactcccagacctactactccaacttctggtgtgggatcaccccccagggctactaccgccgcacagccgagtacttccccaccaagaaccgccagcgccggggctgcttccgtgtccccatggtccactccaccttccttgcatccctgcgggctgaaggggcagaccaagcttgctttctacccggcacatcccaactacacttgggcctttcgacgacatcatcgtcttcgcctatgccttgccaggctgctggggtctccgtccacgtgtgcaatgagcaccgttatgggtacatgaatgtgccggtgaaatcccaccaggggctggaaagacgagagggtcaacttcatccccctgatcttagaagcactagttggacggcccccgcatgcaggcctcagcctcatgtgactcggccctctaagaggcccagcaagatagggttgacgaggtcttgtcatcagcctggctcgcaggcctgaccgtcgggaacgcatgctcgcctcgctctgggagatggagatctctgggagggtggtggacgctgtggatggctggatgctcaacagcagtgccatcaggaacctcggcgtagacttgctcccgggctaccaggacccttactcgggccgcactctgaccaagggcgaggtgggctgcttcctcagccattactccatctgggaagaggtggttgccagggcctggcccgggtcctggtgtttgaggatgacgtgcgctttgagagcaacttcagggggcggctggagcggctgatggaggatgtggaggcagagaaactgtcttgggacctgatctacctcggacggaagcaggtgaaccctgagaaggagacggccgtggaggggctgccgggcctggtggtggctgggtactcctactggacgctggcctatgccctgcgtctggcgggtgcccgcaagctgctggcctcacagcctctgcgccgcatgctgcccgtggacgagttcctgcccatcatgttcgaccagcaccccaacgagcagtacaaggcacacttctggccacgggacctggtggccttctccgcccagcccctgctcgctgcccctacccactatgccggggacgccgagtggctcagtgacacggagacatcctctccatgggatgatgacagcggccgct

SEQ ID NO: 63628 - DNA, 1032 bp, Homo Sapiens
cacttttgaaacaatcctgcatttctcaaatgtggacaaatacaatagttttaaagtatgtttttctcagaagggagataaaaatgccgagttagttaaagtgggtcatgtgtaaaatacgaccacttgatcgtgattatagtgggcagtagagatgatgacaagtcaatttccatccagccgtgtatcctcatggagaagctgcctgtctgaatcaggatggcaagctggcagtctgggaggagcatgttttgcacagatgttttgtttggtccacttggtgaggagtgcagacagggctgcctctctctagtcgggagagtctgtgcattccctcgggccctgaccctagcctcattcacatcacttgcccctgtcgacacctaagtttgcaccctttgatagacaccatgttcgatatctgaaaggctcagtgtcaggagacagagactgagggagactgaagacctgattctctgttccctgcttgttttttaacttcaaactcagatgaagccaatggacctgctgaaacacttgtctgtggaaactgggtcaggtcgggagatctactgaaatttggctttttttccatagccacgtgccttctgttgttgacagttcattcattaccaaagcctgtgtgtaactttgccttgttctgtggccatcttcttgctcatgttatttctcctgggaatgagcagtttgacttctgttcccacgttcctcattctatcagctctagatggattttgcctgcatagctggcttaatatgtctttgtgtatgggtagtctgtagcctgagaatatttacctaaaaatgtctaaacagccaccaagaatgtttataggggtataggaatatagttaacagagtgctaatctctccctcaaatgtcctgtttggaatgcttcccccaaaattgggaagttggtaggagcttttctttactttgaatttctttacttggacagaacgattctgccttaaagacactttgcatcgagagacctttgcataccagag

SEQ ID NO: 63629 - DNA, 387 bp, Homo Sapiens
cccttctcattcactgcacagggtcctgggcccagtctgtattgacgcagccgccctcaatatctgcggccccaggacagaaggtcaccatctcctgctctggaagtagctccaatattgggaataattatgtctcctggtatcagcagttcccaggaacagccccctaactcctcctttatgacaattgtagtcgaccctcaggtattcctgaccgattctctggctccaagtctggcacgtcagccaccctggtcgtcaccggactccagactggggacgaggccgattattattgcggaacctgggatagcagcctgagttctaattgggtgttcggcggagggaccaagttgaccgtcctgggtcagcccaaggctgccccct

SEQ ID NO: 63630 - DNA, 532 bp, Homo Sapiens
ttttgctatccaccatttttctcttccccctccttcctagtccttcgtgtttcatttgcggactttgactcttataggggacttgaaccaaagtgttacttaaaacctggaacaagttgaactggaaccatatttactcgacttgggatcaaatctaagtgcttaaaaatgtccttggcaaaccactttcatctgaaacagtatattttctgaaaagttttgagcctggacatctgattctctgactcttatgactgtggattataagttcacatgttgaccatctaatatgaggcaggcatggactaggtgccaggatataatacagaggtgaagaggacatggtacctgccctttagcgcccctcattggtgggggagggagcacacctggacatatcacagtacaaggtgtagcagatttctccactggggtgcaaagtagacaccactgaaatgtcactcagtagatgtcatttcagttgggtttggagatacgcagaagttaagaacatgaaggaatattttcatgt

SEQ ID NO: 63631 - DNA, 422 bp, Homo Sapiens
tgtgctttatctaggggaacttgagggcagtcagcagtctagtggtggggggctggatgggggcacctcatccacttgtaaaatgcatgcagattatatagcaccttcccccagtaacctccacatggcaaccctcgtttcctaagaagctattgttacatgcatctaccatacactggtgctgtatggttcattgagtgtcccttgtgcctagcatgggactcagaggctcctgtcaaaggacagtgaagcagggacctgccacactgagtttatgtctctgagctagttttggagccacagtagtggttaccccttcctagagctccccccagaagctctctctgcctccccatcacactccttcccacctctcagcactggtcacactgtatgggcctcgcgtgtgcggtaccggctca

SEQ ID NO: 63632 - DNA, 581 bp, Homo Sapiens
atccccgatgttatccccaacaccaaccgaggcagtcagcccaatgacctggggcagtgggcctgaagatcctccaagtttctgatctagataattaaacatgatcatattgtacgggatgtgtttactgtgttgggcgataacgtgatgttatccccaacacagaaattgcttttcctcattttctaaaagcattattacattttttgaacatatagtgtaatttcctttaatgaaagtgactctgcttttattcatcaaattgctttgatggtggaaatgttttctgttgggaggttatttattttaaattggaggattaatgacctttgcacaatctgtttcttgattgggtttgttatagttttgagttgggtattttatgttcattggtttttctctgtgaagcaatttttttctcctttattagatctaacttgcagtgtattttctaggctggaaagtggaaaatgaaatatattatgatcttaggttacataaagtttctaaagtttcaaagagtcttgatacaaaatcagtttatattctgaaaatatttataataaagtattctaatttct

SEQ ID NO: 63633 - DNA, 504 bp, Homo Sapiens
ctccaaggctgcagagccttatgggaacagtccagcaggagctgcttcagccgagagggactattacccaagagaggtatcctcagcccctcctgccccaggtcgggagacagcagctttggagacacaaaagagacagagcctcagccagggagagtgagtcccccagaagaggctgggtggttgcacaggccaggtgcacaggttggaaatgcactgaactctgggtgccgagagatgtaaggctttgagacatgctactgaatttggagggcaggcacgaagaacagtgagattgtcaaaaggagacaaccacagatcctacaggactgtctgtctcctgccccatgatgaccctcaggaattgcaaaggctctgctgtcacaaggagagcaggctgagtttggagcagggtccatccggcagtcctgggacggcttccctctgctggtgcccctggtggcagtccctccaggtggggctggagcctgctggcgcccaata

SEQ ID NO: 63634 - DNA, 700 bp, Homo Sapiens
aagtcaagcagagatcagacacacaagcagcgacgtctcagagcccaacccaagttccgagagtggaagcctttcatggcagcgggtacgcagtgtaaggagtgctttatgacatgccacaagcgctgcctgcagactctcttgatcctctgtggacacagctggctcccagcccggacacccctttttggggttgacttcctgcagctacacagggacttcccggaggaggtaccctttgtggtcacgaagtgcacggctgagatagaacaccgtgccctggatgtgcagggcatttaccgggtcagcgggtcccgggtccgtgtggagcggctgtgccaggctttcgagaatggccgagcgttggtggagctgtcggggaactcgcctcatgacgtctcgagtgtcctcaagcgatttcttcaggagctcaccgagcccgtgatccccttccacctctacgacgccttcatctctctggctaagaccttgcatgcagaccctggggacgaccctgggacccccagccccagccctgaggttatccgctcgctgaagaccctcttggtacagctgcctgactctaactacaacaccctgcggcacctggtggcccatctgttcagggtggctgcacgatttatggaaaacaagatgtctgccaacaacctgggcattgtgtttgggccgacactgctgc

SEQ ID NO: 63635 - DNA, 570 bp, Homo Sapiens
aagctttacgctatggaaatactttttttgacggctagggtatcttttgtgtttctgtcggacctagatgtgaaggctggtggaggctgtgtaatgaccattggagaaatgctacgatcttttctcacaaaactggagtggttttctaccttgtttccaagaattccagttccagttcaaaagaatattgatcaacagattaaaacccgacctagaaaaatcaagaaagatgggaaggaaggtgctgaggaaatagacagacatgttgaacgcagacgttcaaggtctccaaggagatctctgagtccacggaggtccccaagaaggtcaagaagtagaagtcatcatcgggagggccatgggtcttctagttttgacagagaattagaaagagagaaagaacgccagcgactagagcgtgaagccaaagaaagggagaaagaacggcgaagatcccgaagtattgaccgggggttagaacgcaggcgcagcagaagtagggaaaggcatagaagtcgcagtcgaagtcgtgataggaaaggggatagaagggacagggatcgagaaaga

SEQ ID NO: 63636 - DNA, 715 bp, Homo Sapiens
agagccgacttgagcaaggtccggcacaagctccgcaagttcctccagagcgggcccacactgcagtcgctgcgggagaagggctacatcaaaggtgttcggctgcgcgctggccgcgctgtgtgagcgcgagaggagccgggtgccacgcttcgtgcagcagtgcatccgcgccgtcgaggcccgcgggctggacatcgacgggctgtaccgcatcagtggaaacctggccaccatccagaagctacgctataaggtggaccacgatgagcgccttgacctggatgacgggcgctgggaggacgtccacgttatcaccggagccctgaagctcttctttcgggagctgcccgagcccctcttccccttctcgcacttccgccagttcattgcggccatcaagttgcaggaccaggcccggcgcagccgctgtgtgcgtgacttggtgcgctcgctgcccgctcccaaccacgacactctgcggatgctcttccagcacctctgccgggtgatcgagcacggcgagcagaaccgcatgtcggtgcagagcgtggccattgtgttcgggcccacgctgctgcggcccgaggtggaagagaccagcatgcccatgaccatggtgttccagaaccaggtggtggagctcatcctgcagcagtgcgcggacatcttcccgccgcactgactgctggcctgtgactggggcggcggccgc

SEQ ID NO: 63637 - DNA, 301 bp, Homo Sapiens
ctccggtaccgccgaatgacaaactagtgtcatcaccaacatacaggggggcacaggctcccagtgcccaggttaaggtgcagtcctcacctggccgtcggtactcggcaagcaggcctggcctcccggggcctggatccctaccggctgggattggcctcctggaagtacctgtttgggccatgtgacctcctttctcacttatgcctcactcccctcctcccgctccaaacccgaacctctcagtgtggaatgaacgctccaaacccgaacctctcagtttggagactcggcgtgtgca

SEQ ID NO: 63638 - DNA, 640 bp, Homo Sapiens
  misc_feature (160)..(209): n is a, c, g, or t
  misc_feature (333)..(333): n is a, c, g, or t
  misc_feature (466)..(474): n is a, c, g, or t
  misc_feature (486)..(533): n is a, c, g, or t
cccccttatacgaagcgctggcaatgtgacatcactacagacagcctggttagagaacaaactgcctcatcccaagtggaccccggcagctgggggaagccaggcaagatctgggaaggctgtgtgtgggtgttttttctacagatctcactcctcgccnnnnnnnnnnnnnnnnnnnnnnnnnnnnnnnnnnnnnnnnnnnnnnnnnnaaaaaaattcttgctgtgtgggaactagcgagtgtggtggagtctctgaagcctcatcagtcacggggacgtgtcaggagtagtggtttaagaggaagctcggccgtggggcactatacccgtntcatcagtcccgtgcctcggagataaagattccagctactgtgggcaaacgccgtgatcagccacaatgtgtacccccagtacacttactactatcctcataatctccaaaccaagtcctagtgcaccagctnnnnnnnnnagggctcctccnnnnnnnnnnnnnnnnnnnnnnnnnnnnnnnnnnnnnnnnnnnnnnnngggggaccagttgagtaaaaccaaccggtacatccgaggcctcccaccaggcaccattgaccaggacctaatcaagctgtgccaaccgtatggaaaactggtttcta

SEQ ID NO: 63639 - DNA, 351 bp, Homo Sapiens
cctaaaatagatattaagctgctgttgtaaagtattgtttgcagctctttccaatatctagagacatttttatttatgaatatttatacaaaaaggaatttctgtcaagatgactgctctatatcccttgagaatggcattatttaattaaagaacaaatagcattttttggtagtgcctgtccatacctattgtcattgtttgccttgtaatctgtttttttgaattcattttgggctgatagttttgtttaaggttttggataaggagccctttaaaacaaactggtgtgttgtttttaagttaatcatatgtttaataaatgcgtggtttttgcattcaaacacaaaa

SEQ ID NO: 63640 - DNA, 1016 bp, Homo Sapiens
gttcctgggttttaatttgccagttcatagttgcttcagacgttgtcaagtttgggctcaaaatgtgggcattcagctgcactgccctggtctccgttctcttcgcgcatagattccattttgtgcattttgtaccaagtcggtcagggaaagggacttgttgcttattggactattcctgggaccctatagagacctactgtaattgatgcactctgtggcccctgatcttccctgtctcacacttcttttctcccatcccggttgctatttcactcagacatcacagtaccaccccatggggtggcagtagactaacaacccagaaatttagacagggatctcttacctgttggaaaataggtgtgttaggcatgaaggtggttgtgattaagaagatggttttcgttattaaatagcattagagactggaattgacaagagtgttgagcatcccgtgtctaacctgctctttctcttttggtgccccttatctcaccccttccttggaactttaactaagttctcaggcactttccaattgtagactaaaaccactcttagcatctcctctagtattttccatgtatcaggaaagaggtgtcttatgtagggagggggcaagtatgaagtaaggtaattatatactactctcattcaggattcttgctcccatgctgctgtcccttcaggctcacatgcacaggaatgctacatgatggccagctgcttccctccttggttatcatccactgcagctgctagttagaaaggtttggagggatgacttttagtaaatcatggggattttattgatttattttcacttttgggattttgtggggtgggagtggggagcaggaattgcactcagacatgacatttcaattcatctctgctaatgaaaagggttctttctcttgggggaaatgtgtgtgtcagttctgtcagctgcaagttcttgtataatgaagtcaatgccatcaggccaaggaaataaaataattgcttacctt

SEQ ID NO: 63641 - DNA, 1046 bp, Homo Sapiens
gcagcaaagctttggggacaacctccctccctcatctggactaccagttcaaatgggggacccccgtcttcctcagggtgctccacagcaattcccctatccaccaaactatggtacaaatccaggaaccccacctgcttctaccagcccgttttcacaactagcagcaaatcctgaagcatccttggccaaccgcaacagcatggtgagcagaggcatgacaggaaacataggaggacagtttggcactggaatcaatcctcagatgcagcagaatgtcttccagtatccaggagcaggaatggttccgcaaggtgaggccaactttgctccatctctaagccctgggagctccatggtgccgatgccaatccctcctcctcagagttctctgctccagcaaactccacctgcctccgggtatcagtcaccagacatgaaggcctggcagcaaggagcgataggaaacaacaatgtgttcagtcaagctgtccagaaccagcccacgcctgcacagccaggagtatacaacaacatgagcatcaccgtttccatggcaggtggaaatacgaatgttcagaacttgaacccaatgatggcccagatgcagatgagctctttgcagatgccaggaatgcacactgtgtgccctgagcagatatatgatcccgcactgagacacacaggcctctactgcaaccagctcttatccactgaccttctctttacagatagcagatggaacccagcaggtgcaacaggttctaggtgtttgctgacgtccagtgtacagtgaatctggtaggcggggacccttacctgaaccagcctggtccactgggaactcaaaagcccacgtcaggaccacagaccccccaggcccagcagaagagcctccttcagcagctactgactgaataaccacttttaaaggaatgtgaaatttaaataatagacatacagagatatacaaatatattatatatttttctgagatttttgatatctcaatctgcagccattcttcaggtcgtagcatttggagc

SEQ ID NO: 63642 - DNA, 505 bp, Homo Sapiens
gatgacacaacttgaatcagtaatgcccaatgttatcccctcgatatgtctgaagctcaaacacaaaggcactgatgagaatagtgcttgtagagaaccccatgccccttacccgccagggtatcaaagacacttcgaggcgcccgctgtcgagagcatgcccatgtctgtgtacgcctccaccgcctcctgctctgacgtgtcagccctgctgcgaagtggagtccgaggtcatgatgagtgactatgagagcggggacgacggtcacttcgaagaggtgacgatcccgcccctggattcccagcagcacacggaagtctgactctcaactccccccaaagtgcctgactttagtgaacctagaggtgatgtgcgtcatccgcgctgttctttgcagcagtgcttccaagcttttttgggtgagccgaatgggcatggctgcgctggatcctgtgcctctggacgtgctagccatttccagtgtcccacctactgtcatcgtga

SEQ ID NO: 63643 - DNA, 470 bp, Homo Sapiens
actctaaggatctcgcggtggttgtgggtagcacacctctgggtggataatgtccccactcccgaaagcctttcctcggtctcccttccgtccatcccccttcttcctcccctcaacagtgagttagactcaagggggtgacagaaccgagaagggggtgacagtcctccatccacgtggcctctctctctctcctcaggaccctcagccctggcctttttctttaaggtcccccgaccaatccccagcctaggacgccaacttctcccaccccttggcccctcacatcctctccaggaagggagtgaggggctgtgacatttttccggagaagatttcagagctgaggctttggtacccccaaacccccaatatttttggactggcagactcaaggggctggaatctcatgattccatgcccgagtccgcccatcctgaccatggttttggctctcctacccacaacca

SEQ ID NO: 63644 - DNA, 308 bp, Homo Sapiens
agcttcaccgatgacaacagaggaagaagggaactgggatttgggtaagttctcctccactgtttgaccaaattctcagtgataaatatgtgtgcagatccctagaagagaaaacgctgactttctttttaagtgtggcacataaggatctgcagaattttccgtagacaaagaaaggatcttgtgtatttttgtccatatccaatgttatatgaactaattgtattgttttatactgtgaccacaaatattatgcaatgcaccatttgttttttatttcattaaaggaagtttaatttaaattgaaa

SEQ ID NO: 63645 - DNA, 567 bp, Homo Sapiens
ttcggcacgagggcaaaagctccctgtccatctttgacagtcagtttcgatgtcagctcctcggcagggtaggcctgatgacagccctgtccctccctgcctctgccttgcccaaggccacggagggcgtctgcagagaggcctgccttccggattccaggcgggcatgccctgcaaaccccgcctgggcctcccttggtctgcccagccctcggttagccctgcctgaatcagtagatacttgaacgagtccccagtctgcgggaggcagtggtggggccatggacccatgcggggggttccagggtcacacgccacataacagacaaaaatacacacacgtgtgtttttctttgcaatacttgaaatattgccactgtgcttggacttagaagaagaaaatccccgtgacttcttcctcatcaccttgatggctttattctcaccttgtggggcatgtttgtatttattgcttcatggccgactggaatcctgagtcctgggaagctggcactgcggggatcttgcccggtgtcctggtcctcttgcctccgtggcgatcgacat

SEQ ID NO: 63646 - DNA, 811 bp, Homo Sapiens
ctcactagtagcctgctttggcagtgtggctttttgcacacttgccctgtcttcctgagactacttcagtaagccatgcttccttcttccccacttttatttggtgtcatgaatagaaacttccaaatgtaaccatggaagctaagtttggcctgctttgctttttagtctccacaccatgggcagaactgctgtctttactacttcatctcacccaagtcccgttcccaggcagccaggggcctgggtttgaataattgcagggccagcctgccatgatctttctcacttactcctctcccattcagcaatcaaccagactaaggagttttgatccctagtgattacagccctgaagaaaattaaatctgaattaattttacatggccttcgtgatctttctgctgttcttactttttcgaatgtagttggggggtgggagggacaggttatggtatttaaagagaataaacattttgcacatacatgtattgtacaacagtaagatcctctgttaaaaccagctgtcctgttctccatctccatttcttcccatgctgtaaccccaggctccaccagctgttccccagtgatgttacctagcttccctctaccgttgtctactgaccatttccactacatgcctttcctaccttcccttcacaaccaatcaagtgaatacttgattattatctcttccttactgtgctttatcttttttgtttggattggttctaattaatgaaaataaaagtttctaaatttacatttttatagggtattgtaaataaaaacaaattgtatacttaaa

SEQ ID NO: 63647 - DNA, 957 bp, Homo Sapiens
atgaaatccaggagtacgtcatatagtgcatgacagaaataagctttatagtggtttaccttcatttagctatggaagttttcttggccttagttctggaagtaaattctagttggtagttctcattggtaatgaacacattaacgactagattaaaatattgccttcaagattgttcttacttacaagacttgctcctacttctatgctgaaaattgaccctggatagaatactataaggttttgagttagctggaaaagtgatcagattaataaatgtatattggtagttgaatttagcaaagaaatagagataatcatgattatacctttatttttacaggaagagatgatgtaactagagtatgtgtctacaggagtaataatggtttcccaagagtattttttaaaggaacaaaacgagcatgaattaactcttcaatataagctatgaagtaatagttggttgtgaattaaagtggcaccagctagcacctctgtgttttaagggtctttcaatgtttctagaataagcccttattttcaagggttcataacaggcataaaatctcttctcctggcaaaagctgctatgaaaagcctcagcttgggaagatagatttttttccccccaattacaaaatctaagtattttggcccttcaatttggaggagggcaaaagttggaagtaagaagttttattttaagtactttcagtgctcaaaaaaatgcaatcactgtgttgtatataatagttcataggttgatcactcataataattgactctaaggcttttattaagaaaacagcagaaagattaaatcttgaattaagtctggggggaaatggccactgcagatggagttttagagtagtaatgaaattctacctagaatgcaaaattgggtatatgaattacatagcatgttgcgtatgagatgttgtagggtaccgg

SEQ ID NO: 63648 - DNA, 930 bp, Homo Sapiens
cagtggaacttgagaagaacaaagcaaatactccttaggttggcattgctgagcaggacctaaatgaagggactacacacacttaccctggcattggtatggcagctgatgagaaggtacacattgaatgtgttatcggatcttggagcgggtgaaaaagtaaatgctgacattctaattaaatgggtcaatcagactcttaaacagtgcaacacaaaaagccttctatttccagcttcaaggataaatctataagcacaagtttacctgtcctagatttaatagatgccattgcaccaaatgcagttcgtcaagaaatgatcaggagagaaaacttatctgatgaggacaagctgaacaatgctaaatacgccatttcagttgctcgaaagatcggtgcccggatatatgcattacctgatgacctcgtagaagtgaaaccaaagatggttatgacggtgtttgcatgcttaatgggaaaaggactgaacagaataaaataatcatttcatatgattttctgccacattaaacatattgtatgcctcacagtttacaggattctgaaatgtagtgggtgtaaaaccagagattatttgtatgctcaaaatagttatatattcattaatgaattcaatatcctgttcatactagttagagctggtcagcctttttgggtaacacagttaatttaccaactgatacagataatagaatatattcataatcaagctgatacttcatgattaaattatttttgttgcttaaaagtcgtattagacaagactaaatcattcttttttatggttcaaaaaagatgaatacaacgtttttgcaggttctgctgtgaaatgtggtttgatttttttggtgtgttaattttgatcataaatgcattcatactcatagttccagatacctttgaacacg

SEQ ID NO: 63649 - DNA, 160 bp, Homo Sapiens
atcggtttttgtttactggctttccttctgtattcataagattttttaaattgtcataattatattttaaatacccatcttcattaaagtatatttaactcataatttttgcagaaaatatgctatatattaggcaagaataaaagctaaaggtttccca

SEQ ID NO: 63650 - DNA, 758 bp, Homo Sapiens
gtggatgaactgccttctctggactccgagttctataaaaccctcacttccatcaagcgctatgatgggacatcactgacctgggcctgacgctgtcttacgacgaggacgtcatgggtcagcttgtttgccatgaactgattcctggagggaagaccattcctgtaacaaatgaaaataaaattagctacatccatctgatggcacattttcgaatgcacactcaaataaaaaaccaaacagctgccctcattagcggattccgttccattatcaaacccgagtggatccgaatgttctcaactcctgaactgcagcgtctcatctctggcgacaatgctgagattgatctggaagatttaaagaagcacacagtctactacggtggtttccatggaagtcacagagtcatcatctggctctgggatattctggcctccgacttcacaccggatgagagagctatgtttctgaagttcgtgaccagctgctccagacccccgctcctgggattcgcctacctcaagcctccattctccatccgctgcgtggaggtgtcggacgatcaggacaccggggacactctgggcagcgtcctccggggcttcttcaccatccgcaagcgggagccaggcggccgcctgcgcacctcctccacctgcttcaacctgctcgtgctgcccaactacagcaagaagagcgtcctccgcgagaagctgcgctacgccatcagcatgaccacgggctttgaactctcc

SEQ ID NO: 63651 - DNA, 464 bp, Homo Sapiens
tgtggctgagaagtgggacagaaagatgattaaggtaatgtgtcctccttgtagcattgtccagggccgttgtgtagatatttgacttcactgacagaaaagaaaccagggagtttgtagagactgtgcatttttagtataacattttcaccatctgatatggtttggctttgtgtccccacccaaattgcatctcaaattgtaatccccatgtgtcaagggagggacctgatgggaggtgatgggatcatgggggtggtttcccctatgttgttatcataatagagagggagttctcacaagatctgctggttttaaagacagcagtttcccctgctgtcactgtctctctcctgctgccttgtgaagaaggtgcttgtttctccctctgccatgattgtaagtttcccgaggcctccccggccatgtggaactgagtcaattaaacttcttgtttataaagt

SEQ ID NO: 63652 - DNA, 1010 bp, Homo Sapiens
ggatctggaacatatgccaagaacgaatggtattatccactgcgcaagataaagaatgttgcctataagaggcatagttacaacaaaagtgatctatgagagaaacaactgacctaggacaatttcatcaccaatacagaaactcctttaaataacggatcaacccccagaattgtgaatgtggacgaacattatattttcaaatggaataataataccatcagtgaaataaatgttaccactttttagggcagagattaatgcccaccagaaagggataatgacacagagatttgtagtaaaatttttaagctataatagtggtaatgaagaagaattatctggaaatccaggttaccaacttggcaagcctgtccgagctctaaatatcaacaggatgaataatgtcacgactttacatctttggcaatcggctggaaggggtctgtgtacatcagcaactttcaaacccattttatttggagaaaatgtactctctggatgcctgttagaagtcgggattaatgaaaattgtactcagctcagggagaatgctgttgaaagacttgattcattaatacaagcgactcacgttgcaatgagaggcaactccgattacgctgatcttagtgatggctggctcgaaataatacgtgtagatgcccctgatccaggtgcagacccgctggctagcagtgtgaacggcatgtgcctggatattcctgctcacctgagcatccgcatcctcatctcggatgctggcgcggtggaagggattactcagcaggagatactcggtgtagagacaaggttctcctcagtgaactggcagtaccagtgtgggcttacctgtgagcacaaggccgaccttctccctatcagtgcatccgtccagtttattaaaattcctgcacagttaccccaccccctgacaagattccaggtctattatacagagtatgactgcaacagaaatgaggtgggtcagaacataaggtggatcgtctaga

SEQ ID NO: 63653 - DNA, 1124 bp, Homo Sapiens
ggaatctgttggcgaattagggatttgggagtctatgtggttaatcaggggtgtctttcttgtgcagtcagggtctgcgcacagtcaatcagggtagagggggtatttctgagtcaatctgaggctaaggacatgtcctttcccatgaggccttggttcagagccccaggaatggaccccccaatcactccccactctgctgggataatggggtcctgtcccaaggagctgggaacttggtgttgccccctcaatttccagcaccagaaagagagattgtgtgggggtagaagctgtctggaggcccggccagagaatttgtggggttgtggaggttgtgggggcgggtggggaggtcccagaggtgggaggctggcatccaggtcttggctctgccctgagaccttggacaaacccttccccctctctgggcacccttctgcccacaccagtttccagtgcggagtctgagaccctttccacctccccctacaagtgccctcgggtctgtcctccccgtctggaccctcccagccactatcccttgcttggaaggctcagctctttggggggtctggggtgacctccccacctcctggaaaactttagggtatttttgcgcaaaactccttcagggttgggggactctgaaggaaacgggacaaaaccttaagctgttttcttagcccctcagccagctgccattagcttggctcttaaagggccaggcctccttttctgccctctagcagggaggttttccaactgttggaggcgcctttggggctgcccctttgtctggagtcactgggggcttccgagggtctccctcgaccctctgtcgttctgggatggctgtcgggagctgtatcacctgggttctgtcccctggctctgtatcaggcactttattaaagctgggcctcagtggggtgtgtttgtctcctgctcttctggagcctggaaggaaagggcttcaggaggaggctgttaggctggagggaccagatggaggaggccagcagctagccattgcacactggggtgatgggtgggggcggtgactgccccagacttggttttgtaatgatttgtacaggaataaacacccctacgctccgaaa

SEQ ID NO: 63654 - DNA, 672 bp, Homo Sapiens
  misc_feature (207)..(207): n is a, c, g, or t
  misc_feature (265)..(265): n is a, c, g, or t
acgccgcccgcacggactgggacccgcgctcgcaggcagcgctgtcactgcgccacctgccccgtgtgcgcaccacctacggcttctgcgcgctgctcgagagcccgcacacgcgccgcaaggagtcgctcctgctcgggggcccgcccgcgcaccggccccgggcccacagctgcggcggcggcggaggcccggacgcccccctgnggaccctgtgcggcccgcgaggtccgggcccggccacccccgcggcccccggcggtcnccgcctgccccaggacgcgctcgctgcggggccccgccgctgccgcctcctgcgcgtccccgacgggctgctgagtcgcgcgctgcgggctggaaggagtcgccgcctggcccgcgtccgctccgtctccagcgggaacgaggacgaggagcgccgcgcgggatccgagtccccggcccgggccccctcctcgagcccgctgtcatccagggccccgcttcctgagcgcctggaggccaagggcaccgtggctctgggccgcgccggcgacgccctgcgcctggctgctgagtactgtccgggaacccggcgtctccgcctccggctgctccgcgcggagagcctggtcggaggcgcccccgggccccgcgccgtccgctgccgcctcagcctcgtcctgcggccgc

SEQ ID NO: 63655 - DNA, 402 bp, Homo Sapiens
ggcacgaggcaggtgactcgtgctgtgctaggggatgatccgcaactgatgaaggttgcactccaggacttgcagacgaactccaagattggggcactcctgccttactttgtttatgtggtcagtggggtgaaatctgtaagccatgacctggagcaactgcaccggctgctgcaggtggcacggagcctatttcgtaatccgcacctgtgcttggggccctatgtccgctgtctggtgggcagtgtcctctactgtgtcctggagccactggctgcctccatcaaccccctgaatgaccactggactctgcgggatggggctgccctcctgctcagccacatcttctggactcatggggaccttgtaagtggcctctatcagcatatcctgctatccctg

SEQ ID NO: 63656 - DNA, 605 bp, Homo Sapiens
tttaattccaattcaccaaatctttattgaacatctgttgtcagatgtagacatcctattaaaaacaagtacctctatttcagttggtttatttctgtaccatctcctacccacagccgtaaagaagacattaaaaaaggcttactgaaattatactatatagtatttttttagataagacacacacacacttcatgtctatgacttgtttacctaagataaaagggacctaattcaacttactttagcaaacatactactgccaattaatcatttcttaacccttttaggccagtgatacatgtcttgatgtgattggtggccgggacacacctggagctaaagtagctctatggactgaacatgggcaattcaggcagaagtggagactgaataaaaatggaactatcagctcttatctcagtgatcaacttgtccttgatgttaaaggtgggcctttgatgatacccaatgttgtgtccctggatattagtttcagttccaaatctcctcattttgggtaaaggacatccttatgtataagagaaatgttaagtcatttaaaattatgcttgaagaaaattaagataggcagttttacaaac

SEQ ID NO: 63657 - DNA, 436 bp, Homo Sapiens
ggccaccccctgacgcccggcagccactatccttaggcacatatgttctggtcgcttccagtgctttggccttacgcccttccccttgaccttgtcttgccccagcctcacggacagcctgcgcagggggctggtcttcagcaaggggcagagcatggagggaagaggatttttataagagaaatttctgcactttgaaactgtcctctaagagaataagcatttcctgttcttccagctccaggtccacctcctgttgggaggcggtggggggccaaagtggggccacacactcgctgtgtcccctctcctcccctgtgccagtgccacctgggtgcctcctcctgtcctgtccgtctcaacctccctcccgtccagcattgagtgtgtacatgtgtgtgtgacacataaatatactcataaggacacctccaaa

SEQ ID NO: 63658 - DNA, 441 bp, Homo Sapiens
  misc_feature (121)..(129): n is a, c, g, or t
aaaatgttttcttaatgagatgatgtaaccttttctatcacttgttaaaagcagaaaacatgtatcaggtacttaattgcatagagttagttttgcagcacaatggtgttgctttaatggnnnnnnnnncagtaaaagtgaaatattactgttttaaggaaaactaatttagggtggcagccaataaaggtggttggtgtctaatttaagtgttaaatcaatttctttcattcagttagctctttacccaagaagaagtgaatgatttggagcttagggtatgttttgtatcccctttctgataaacccattccctaccaattttatgtcataagagatttttttcccccaaatctagaacaatgtataatacattcacatctagtcaagggcataggaacggtgtcatggagtccaaataaagtggatattcctgctcgg

SEQ ID NO: 63659 - DNA, 355 bp, Homo Sapiens
atggaaccagactttttatgttcggcgagtggggctacctactttctgaagacaccgcgggagcttacttgctcaaccgcactctatgggatcggtgcgaggcgccccctcgcgtggtcccctggaatgtgacgctcttctcgctgctggtggccgcctcctgcctggagatagtactgtgtgggatccagctggtgaacgcgaccattggtgtcttctgcggcgattgcaggaaaaaacaggacacacctcactgaggctccactgaccgccgggttacacctgctccttcctggacgcctacctggctcgctcactcccttgctcgctagaataaactgctttgcgctctctt

SEQ ID NO: 63660 - DNA, 412 bp, Homo Sapiens
actgctgtccagggccagtacctgacagtggagcagctcacactagacttcgaatatgttatcaatgaggtcatccgccacgaccgctacctggggccatcagttctgttctttcagcgactatgacatcgtcattctggaggtctgcccagaaaccaaccaggtcctcatcaacattggcctgctgctcctggccttcccgtcccccactgaggagggccagctccgaccaaagacctatcacaccagcctcaaggtggcatgggacctcaacacagggatcttcgagacagtcagtgtaggcgacctgactgaggtcaaagggcagaccagcggcagtgtctggagctcctaccgcaagagctgcgtggacatggtcatgaagtggctggtgccggagagcagcggccgc

SEQ ID NO: 63661 - DNA, 509 bp, Homo Sapiens
ttttggggggggagttttgttgtgtttttttaaagtaagtgcttaagtattaactttgggttgtcccctctgtatgtttcgaaggggttttggttctttttgcttctgttttcttaaacatgttttccactcccacttgggcattttggaagctggtcagctagcaggttttctgggatgtcgggagacctagatgaccttatcgggtgcaatactagctaaggtaaagctagaaacctacactgtcactttactgagatttctgagtatacttttcatattgccttaatgtagcagtaatgtgtttatgcatttgtttctttgcacagacattttgtcaaatattaaaactctacttttttatggcacatattagcatataagcctttattccaagaggtatttattttttcacttgtaaaaaaataatgtttccacgtaaagaactctgttatatcctagaggactctgtcttttatattcgggataataaagactttaaagcaaaa

SEQ ID NO: 63662 - DNA, 525 bp, Homo Sapiens
  misc_feature (364)..(364): n is a, c, g, or t
tggggccattgttcattttattgctttgggaagagctgctgatgaagcagtaatagagatgagcaagataacaggtaaaacacgatccatttattccaggccttcaatagtaatgcataaatgtaaaggctgacagttcaacaacgtctcttgagtttctgccttggaggcactgaagctggggaccagacccaatctctgttctcgtggcacttggagtccagttggctcagattttcaagaaggtgaactaaatattcggtctgcccgtcttcgaataccaggtattgcagaggtaggtctattattttatgttctctaagttttcttaatcaatttctctggaggggtcgtttactgtatncaggagtgcctcctaaatggtaatcattctcgggtgttctcacctggtaaaattgtagacctcgaggctaagtttcagggagatcatattcaactttcatggactgcccctggcaaggtcggctgaaaaggggcatcgaatggggaacagcagctagggct

SEQ ID NO: 63663 - DNA, 733 bp, Homo Sapiens
  misc_feature (82)..(82): n is a, c, g, or t
  misc_feature (191)..(204): n is a, c, g, or t
cggattcgccgggccgcctgtgcggtagatctgcggccgtggcacgctgacggcacttacccttgccaatcacagcgcgggnccatcaggcgaaagtgcacggccggctgcccgaagcctccaagagcccgctggtgctgaagcagcgggtacgcaggcggctggaagccgtgctcggtatcttgagacannnnnnnnnnnnnnaagcctgaccccgtgaaaagcgtgtccagcgtgctcagcagcctgacgcccgccaaggtggcccccgtcatcaacaaacggctcccccaccatcctgggcaagcgcagctacgagcagcacaacggggtggacggcaacatgaagaagcgcctcttgatgcccagtaggggtctggcaaaccacggacagaccaggcacatgggaccaagccggaacctcctgctcaacgggaagtcctaccccaccaaagtgcgcctgatccgggggggctccctgcccccagtcaagcggcggcggatgaactggatcgacgccccggatgacgtgttctacatggccacagaggagaccaggaagatccgcaagctgctctcatcctcggaaaccaagcgtgctgcccgccggccctacaagcccatcgccctgcgccagagccaggccctgccgccgcggccaccgccacctgcgcccgtcaacgacgagcccatcgtcatcgaggactaggggccgcccccacctgcggccgct

SEQ ID NO: 63664 - DNA, 587 bp, Homo Sapiens
ggctagattcagaagcaaaaccgattttgctttcaccattaaggttgcattttaatgcagttattgttttaaattagagaataaaatgtaaaaccaagggaggctttagaaccctttattgaatggcatggcaaacttttaaaactgcttttgctatttcactagaactatctttgataaaggatatagctaaaaaatgtcagcccaaactgtgtgtaattagggttgtttattaaaattttctctaaatgtcatacagaggcttaagatctgtgtatgctgttgggtcggagtgccagtcactgctttggaagtctgtgttctggggctgcagaatgacaaacgtgtcatgggattaaaaccaatcaactgtgaattgtgaaattgaaactactctttcggttttattttctttagcatattgagtatagaaatctgaaacttatttaaaatttatactgcttttgttgatggctcattttggctgtgtatcctcacttatgtactgatttctgataaaggcttgacattattataacacgcattttgtgttccagtttaataaaacggtttctgagtcttgtctg

SEQ ID NO: 63665 - DNA, 1095 bp, Homo Sapiens
  misc_feature (883)..(883): n is a, c, g, or t
  misc_feature (912)..(974): n is a, c, g, or t
  misc_feature (1007)..(1018): n is a, c, g, or t
  misc_feature (1059)..(1059): n is a, c, g, or t
caccgtatgctggatatgttcagactgaaggactcacacttgtttgatactggatcacatctcctgaggttaggaaggtaatctaccaacaggaagccctgtactctgtattccaaggccattggtaaatgtgttggtgccactgatcggactgtatgaccttaaacaagtcaccttagttttcagtgaaatgggaatatcattgtctcctctttcatgaatgctgtgagaatcagatgtgcaacaggtacagacttgccctttgaaatctatacctctggatacattagaggcattttattaacaaaggcccttctaaatgtgctatttatttgacaataactatcagatttgccttaattttgtgtttatagcatttatcaaaacgtatcctcatagactttatgcagattaatatggtcaattgatttggataaaagaaagtaatttcagggtttgtttttaagccaggacaagaagtgcaaatgcctctttgaagcaatttaggctaaactgattttgaaatttcaaaatgttttattttactttgttttattaagccaggacaagaagtgcaaatgcctctttgaagcaattcaggctaggtaaaccgattttgccatttcaaaacgttttattttactttgttttatatcagagtcttataaaacctgctgcaaatatttctgaatgtctttgtaaaagtgtttgttagtgtacctgtgattatagtacttcacttttttcctttggattaattggttaaatgaatgagaaatgtgttatgttttttactaaaaagtataaattaaaattttggaaagaaaaggcaatatttatctggctccccaatttaaagtttgattttattggcccccaaccntacaccattaaaataactacatacaaacnnnnnnnnnnnnnnnnnnnnnnnnnnnnnnnnnnnnnnnnnnnnnnnnnnnnnnnnnnnnnnncactaaaccataaccaccccttaaacatctttnnnnnnnnnnnntaccatgcccacccactgcccgcagtcttcccacataacgnacgaatgctcttcacgagaggttgccacaccccccc

SEQ ID NO: 63666 - DNA, 1214 bp, Homo Sapiens
  misc_feature (644)..(691): n is a, c, g, or t
  misc_feature (766)..(774): n is a, c, g, or t
  misc_feature (870)..(870): n is a, c, g, or t
  misc_feature (874)..(1099): n is a, c, g, or t
actacagccaaatctaaaagaaatatatacatacagtgtatataaacaagattgcaccctgaagatgacagagttttgtcacagcttgtgaattctgttcaccaagtgctggaatctaatctgctgtgcccctaaaatagcatttagaagttttggatatgaaaaacagaagagagaaaaatatacattataaaagcagaacatacatgtaccagtttttggatactaaatgacagccttgtttctcccctttgaatcagcggacaccatggattatattctttttttcccttcagtagtgagcagtttgtatgtacagagaaaatggacttacaaaaacttgcagcagtagtttgttcttgctttaaaatttcgtttttggtttagattatggatgcatgaagtaagggagtgaatcagtttcttgtttatatttttttcaccttttaaacaaaaaattctttaaaatattttaatgcattcttttgaagaggtagatgtttggtacattttatggctcccagagcatatattcagttggtgcatgttgtggaagggggaattggaaattaaatgaaaacctatgactttggtcatgtcaatctgtaagacacatcagtaaaagggtattatgctctgttggnnnnnnnnnnnnnnnnnnnnnnnnnnnnnnnnnnnnnnnnnnnnnnnnggtgatgtggcttaaatgcaatagtttcttttttgggacatatttctgccaattaaagactagaagggcacaacnnnnnnnnnaattaccatagagaagatacattaaaaaaaatcttctgatgttttgtagccataactaaattatggtaaaaatgtgcactattgtgaaaaggaaanaccnnnnnnnnnnnnnnnnnnnnnnnnnnnnnnnnnnnnnnnnnnnnnnnnnnnnnnnnnnnnnnnnnnnnnnnnnnnnnnnnnnnnnnnnnnnnnnnnnnnnnnnnnnnnnnnnnnnnnnnnnnnnnnnnnnnnnnnnnnnnnnnnnnnnnnnnnnnnnnnnnnnnnnnnnnnnnnnnnnnnnnnnnnnnnnnnnnnnnnnnnnnnnnnnnnnnnnnnnnnnnnnnnnaaaaaaacttatcatcatcccgccggttgttgcggcggccgcgggggtcactcctagagagaggcgagccacacctgtcccctccttctgacacaaacaagacaaagagcccgcc

SEQ ID NO: 63667 - DNA, 1144 bp, Homo Sapiens
  misc_feature (231)..(249): n is a, c, g, or t
  misc_feature (281)..(341): n is a, c, g, or t
  misc_feature (395)..(398): n is a, c, g, or t
  misc_feature (401)..(402): n is a, c, g, or t
  misc_feature (404)..(407): n is a, c, g, or t
  misc_feature (1126)..(1126): n is a, c, g, or t
gggcgggccgataaacatgagaggcgcggtggcgtcgacaccctcgcgggcggtgcccccccgcggggccagtcttttttcggtggggtgtggtccggcaggcgcagacgcccgcgccaccggtcctctttgttgggaacagagagggccccccgagccgcgcctgtccggaaggcgcgccggccgcccccaggacgacggtgtggaagaattttatcagtccccgagggnnnnnnnnnnnnnnnnnnntgcgcacacggcccctcgctcctccttccggnnnnnnnnnnnnnnnnnnnnnnnnnnnnnnnnnnnnnnnnnnnnnnnnnnnnnnnnnnnnntgccccgaccctccctgggctcggtcctgttttccgtgctttttcctccccctnnnnttnntnnnngtaatcagagctcacactttattcgacatcatagaattcatagtggagaaaagccctatgaatgtgacaagcatgggaaagccttcagatggagctcagaccttgtgaggcatctggaaattcatattggagataaagttttggaatgtagcgagcgtggaagaattttcaatcagagctcaggtctaatgcagcaccaaagaaaccatacagaatcataacctgaaattcaggctctgtcaatttcatctctgtaacctttattgtttctgagtcttgagttttctcataagggctcactctccacctgcgcaaggactgcaattcccaggggcctccagggcacccggccgctccagtccagtcgtgcaggcggcgcgctctttctcgctccgctcaagtccaggaaccggttcccgggctcccagcctctcggcagcgcccacgcgcctgggccaaagtccgcgaacggaagccggcggcgaggaggattctgggagttggaggccgaggctgcgacctgcgcaggcgcaaacctgcccctggggtgagggctgtaagtggcgcgattcgcggcagcgccccgatggaacctcctggtcctgtgaggtgagtgttggcggcggcttccccgaggtccacctggcggcttggcttttgcccgtcccgcaggcagcggcggctctgcagtgagcaggcctggcaggcagctccgcggntgtgtggagaggggtttg

SEQ ID NO: 63668 - DNA, 1306 bp, Homo Sapiens
aattttcgggatcgcgcgtccggacacccgattccccatccctgcctgcaggactgttcgtgttcagctcgcgtcctgcagctgtccgaggtgctccagttggaggctgaggttcccgggctctgtagctgagtgggcggcggcaccggcggagatgcctgggaagaaggcgcgcaagaacgctcaaccgagccccgcgcgggctccagcagagctggaagtcgagtgtgctactcaactcaggagatttggagacaaactgaacttccggcagaaacttctgaatctgatatccaaactcttctgctcaggaacctgactgcatcaaaaacttgcatgaggggactccttcaaaagagttttctcaggaggtgcacgtttcatcaatttgaagaaagactgcattgtaattgagaggaatgtgaaggtgcattcatgggtgcccttggaaacggaagatggaatacatcaaagtgaatttctgttcaagttttcccagattatcattctttgggatgagagaacattataaaaccactttgtttattttaaagcaagaatggaagacccttgaaaataaagaagtaattattgacacattttcttttttacttagagaatcgttctagtgtttttgccgaagattaccgctggcctactgtgaaggtagatgacctgtgattagactgggcggctggggagaaacagttcagtgcattgttgttgttgctgtttttggtgttttgcttttcagtgccaactcagcacattgtatatgattcggtttatacatattaccttgttataatgaaaaaactcattctgagaacactgaaatgttatactcagtgttgatttcttcggtccctacacaacgtaaaatcctttgtttcttttgactcaaattgtattgcttctgttcagatgatctttcattcaatgtgttcctgttgggcgttactagaaactatggaaaactggaaaataactttgaaaaaattggataaagtataggagggttacttggggccagtaaatcagtagactgaacattcaatataataaaagaacatggggattttgtataaccagggataataaaaagaaaacagaagttgatttttaattgatgtttttgaaacttagtagaacaaatattcagaagtaacttgataagaaatgaatgtttctaaagaagtttctaaagattcggaaaatgctccttgtcacattagtgtgcatcctacaaaaagtgatctcttaatgtaaattaagaatattttcataattggaatatacttttctt

SEQ ID NO: 63669 - DNA, 527 bp, Homo Sapiens
  misc_feature (335)..(375): n is a, c, g, or t
  misc_feature (416)..(441): n is a, c, g, or t
cttattttcccagagatgccttaacctttgttggttttggctttagggttcagagtcacttttgttcccttctccattctggagagggacttcccctacatagagccctgatttttgtggctgtggggattggaggtagcattcaaagatcagatgtgcttttcctcactttggagatgaacactctgggttttacagcattaacctgcctaaccttcatggtgagaaatacaccatctctcttctagtcatgctgtgcatgccgcttactctgttggggtctatataaatttgttgaactcttacctacattccaaagaagtttcaaggaaccnnnnnnnnnnnnnnnnnnnnnnnnnnnnnnnnnnnnnnnnntaaaataaaattatcaggaatactgcctcagttattgaacnnnnnnnnnnnnnnnnnnnnnnnnnnaagctgagaagtatagggatgaaaaagatgttatattgtgtttgactattttccaacttgtattttcatataatttatatttttta

SEQ ID NO: 63670 - DNA, 532 bp, Homo Sapiens
tgcacacgccgagtacccagacctgatggcaagtctgatggacgaagttgttgccacgccgagggaccatacctagcctgatgagatttttaaaaaatattttctctgtacttttcattctcttttaatgaggaccaatgtacagttgaaataactggaacaaattatttttggtgtgtgtgacaattctgtttttaatgctatttgaacaagtgggccattagccagatttgtctttttgttgtaaaacaaaatttgactaattttacatgtttataaatcttatgctctcactgtttgtttttatttaaattacaattttatctgtttcctgacattgtctcctatatatttctattattaattgcaaaaacatagaaatggaaattttgctatctacaataaaatttttttaaagtagtgagtgctattttggagttccaaattttcagtaggaagtatctaaaactttttttaatacgtgccattatctatagaaacatacttcagtggtgagattgagtgcatttct

SEQ ID NO: 63671 - DNA, 458 bp, Homo Sapiens
ttaccgggctgcggtggaggctgtgcatcgacttgacctcatcctttgcaacaaaactgcttatcaagaagtattcaaaccagaaaacattagcctgaggaacaagctgcgtgagctctgcgtcaagcttatgttcctgcacccagtggactatgggagaaaggctgaggagctgctgtggagaaaggtatactatgaagttatccagcttatcaagactaacaaaaagcacatccacagccggagcactttggaatgtgcctacaggacgcacctggttgctggtattggcttctaccagcatctccttctctatatccagtcccactaccagctggaactgcagtgctgcatcgactggacccatgtcactgaccccctcataggatgcaagatgccagtgtctgcctcagggaaggagatggaacgggcacagatggcatgtcaccgatgtctgg

SEQ ID NO: 63672 - DNA, 752 bp, Homo Sapiens
  misc_feature (732)..(732): n is a, c, g, or t
ggatcgcttgggacaggcaggacggccaaggtgtggcctttggcctcaggccggctggggcagtgcttacacaccatccagactgaagaccgagtctggtccattgctatcagcccattactcagctcttttgtgacagggacggcttgttgcgggcacttctcacccctgagaatctgggacctcaacagtgggcagctgatgacacacttgggcagtgactttcccccaggggctggggtgctggatgtcatgtatgagtcccctttcacactgctgtcctgtggctatgacacctatgttcgctactgggacctccgcaccagcgtccggaaatgtgtcatggagtgggaggagccccacgacagcaccctgtactgcctgcagacagatggcaaccacctgctggccacaggttcctcctactacggtgttgtacggctgtgggaccggcgtcaaagggcctgcctgcacgccttcccgctgacgtcgactcccctcagcagccctgtgtcctgcctgcgtctcaccaccaagcatctctatgctgccctgtcttacaacctccacgtcctggattttcaaaccccatgaccgtcaggcgcaccccttgcctctgggccaagggaaaccagctactcagggacttctcttgccttggagggtgcagtgatagttcctcctcactgccccacttgtgctcctgggcctgtgaacccagttgctcaaggnactttgaactaagaggcttt

SEQ ID NO: 63673 - DNA, 607 bp, Homo Sapiens
  misc_feature (509)..(509): n is a, c, g, or t
gagaagtgccaagcagcatcctggttcttggacagcatctttggacgctctgtgaagggcaacgatcctgccagagaccgtctctctacaactgatgacccactagggcctggggttaattgctcaaagggcccagtgttcacaaagccacctctgccctaacccttgccagagctctccaactatgacccacgagaggggtgatggtgggattctaacatcaacagagcaaccagaaagacattgggcctcccacactcaggctgcaggccactttcttggtccttatcagctttaatatttattaatgacgacataggagcccgagtcagctgtaaaggccattaacttgcaatctggacaggaagttgacgctcaccactttgggtaagagctgctctgactgtagggcccccttatttgttgtcctaacccagaagcagctctgggctgccaggatggtggatggaataccagagagttcacactagggaggaagcaatgcctgncccctggagtctcctaggggggcagcagttagaattaagggaagaggatttgctggtcactgtttgctgacatgggtttccatggtgagttcaggctt

SEQ ID NO: 63674 - DNA, 2391 bp, Homo Sapiens
  misc_feature (286)..(295): n is a, c, g, or t
  misc_feature (335)..(349): n is a, c, g, or t
  misc_feature (610)..(618): n is a, c, g, or t
  misc_feature (776)..(797): n is a, c, g, or t
  misc_feature (877)..(886): n is a, c, g, or t
  misc_feature (1167)..(1177): n is a, c, g, or t
  misc_feature (1304)..(1378): n is a, c, g, or t
  misc_feature (1634)..(1642): n is a, c, g, or t
  misc_feature (1837)..(1837): n is a, c, g, or t
  misc_feature (1842)..(1842): n is a, c, g, or t
  misc_feature (1956)..(1956): n is a, c, g, or t
  misc_feature (1986)..(1986): n is a, c, g, or t
  misc_feature (2129)..(2129): n is a, c, g, or t
  misc_feature (2254)..(2254): n is a, c, g, or t
  misc_feature (2268)..(2268): n is a, c, g, or t
  misc_feature (2283)..(2283): n is a, c, g, or t
  misc_feature (2318)..(2318): n is a, c, g, or t
ggatttggagtgggaagggggcttgcgccacggcagtgaatcttcatggatcttcatgcagccatacaaaccctggttccaacagaatggtgaattttcgacagcctttggtatcttggagtatgaccccagtctgttataaactgcttaagtttgtataattttactttttttgtgtgttaatggtgtgtgctccctctccctctcttccctttcctgacctttagtctttcacttccaattttgtggaatgatattttaggaataacggacttttaaagaagcnnnnnnnnnngactgaatttccttgcttactttgcatatacagactggannnnnnnnnnnnnnnacagccatttccccaaaggaatgtcttgcatattactgacatttggtatgtttcattcattggaatatttcttattttctacgtgtttgaaaagcctgtaagaaatacaggatttgataatattttgaaggcaggaaaaacccaaattgtttcttctttgagagtcatgactaccttctggtgtggagaaattgccattggaaaatttgacaattttgattctcactggtatgtttaaaaactgaataaaaggaatagaannnnnnnnngataaaggatcacaaaacaattctaaaacctaactgtttttaccattgaaatttaaattgtgataataggttttaaatgtctagaatgcaactgataggcttttcttgaactgttagtttttttgaagtagttttttcatgtttaatttgtatttgtnnnnnnnnnnnnnnnnnnnnnnttcccaaaacccagattacaaccagagcaaaactgttgtgccttctatttatctttgatttcagtcttggcaattgtttnnnnnnnnnntctagatttgttttattaggttcagagtatgtggggaattatagaatccctctttcatcactttgtgtatgtcttttgttaacatatttgttatgccttattctaaaattgagtctcaaactggaatgcctttgaagacagatgcttctatagaggttctttgacctaaatagttcagcatttgtatttttattctggtatctaatcagattcctaatcatagcccgtaagaaggaatgttactttaatattggactttgctcatgtgctcgtgtccgcannnnnnnnnnncttaaaatcatagccatatggtaaattttctattttgttatggttctcttttattgatgggcatgcagtgggtgttacttggaaatggccaatttttattaaaatatttctggaagaaaatttacgnnnnnnnnnnnnnnnnnnnnnnnnnnnnnnnnnnnnnnnnnnnnnnnnnnnnnnnnnnnnnnnnnnnnnnnnnnngcaagaacgccgaaacaccccccaggaaaaccgaagccccttcccctccccgaaacaggggccaaggcgcccccggagggcggcgcgggcgcgccccccccacggagcgtggacccaaccgcgcgcttgctctactgccggcgcgctctccgaacaacccccatgagccggcgccgagcaagcagcaccgcaaggggccccccgaggcgcgagaccgagcccctcacgcccattccgcaaggcgtagccgagcggnnnnnnnnngcgaacgccccgcccgcgtttccgccgacagctcccaccccgcggagtggacggggagggccgggggtgcgggcggcacggggacagcgggatggctgggggtgataggaggcggcgcgcccgagataggagactctgccgcgggacgacaggagaatggaacaacaggtggtgttaggcgcggccgccgagcgnggccnctacgagagacagagacgcccgcagtgcacggagtgcgctgagcacaacgagagatgttctgctagcgatgacacgcctgccgatgcgacgccaccaccgcctgtgggtgcgangccacgaaccagcgatgatacatcctggtnagtgcagtgcacggcagaagaccagccgcaacataatcaaatacccaccatcgccgccgtccatcataaacacgacgcgtaccgcccgcgccactctctgcatgttctgagacgcgagcggctgctggcgagcgcgggaccgngcagaaccggtgctaagagcagccgcgcgacaggcccgcggcgcagagtctcttgaggcgcgcccgcgctgcagtgatagattactcgtcgagacgcgggtgtcccgcgcgcgcgcgtgttagangcatctccgccgcngagaaccgcgcgcgnagactcgtcagagtctgtccgacggcgtcaccgcnacccgatgcagctcggttgctagcgcgacgggaatggtcggcccgagcgcgcgcgccccgtggcgcatcctcg

SEQ ID NO: 63675 - DNA, 378 bp, Homo Sapiens
ggtacctgttttaccatgtgtaatttttgttctacatcacagttcttaatttgtttagagttttatgaaagatggtatagtttttattgacaaaagcaaagtaatcttacaactatgtgcatacaaaagcaatactattttgtgactaaatattttatattaaaatttacatcagcaactgtcttgagaattcagggacatagaatggaatttaaaacttcaacagttttgttaaatctagaaacatgaaattagtattccaaagagattttgaaatttcttttcttggggaaatggcggtacattaaatcaaaattgaggatggatgatttaaaaacatttgacttttgaataataaaaagaaaagtgaagagtaag

SEQ ID NO: 63676 - DNA, 857 bp, Homo Sapiens
cttacaaataaagtttattgctgaatttccccattaacattatagaaaacactgaaatttcacaaattattgagagcccaacagttaaacatactttatttaaaaaagtacaaaagtgacattagaaatttttttgaagaaatgtgtatcatctaacagcaaagaaatatgaaccagataatgaatggcacaaatatagcactaaaggggtactcactaaaggggtactcagtcaccacccagaaattgtccgagttatgaaatagattcattttgagaagttagttacacattcagtttgtttatgaactagcctgtcttgtttctgcctcttgtaagaaaagagctaggtctttatgctgctaggacaaaatactgtacatggagctctaatccccacgcctgggatgagtgcagaatatgccccgcagggtatttgtaaagatgagcccagcagctacacatgtacaacttgtaaacagccattcaccagtgcatggtttctcttgcaacacgcacagaacactcatggattaagaatctacttagaaagcgaacacggaagtcccctgaccccgcgggttcttcacacacccccattcggcgtagtacccagagagctcaagatgtgtggcagttttcggatggaagctcgagagcccttaagttctgagaaaatttgaagcccccaggggtggggtggacggtgccgcccagtcgacgtcagcgtggtctgtcatcctgctagtttgtgatgttttctgacagtagcctccaagaagccgttgtgcgaagacagagtcctgcagagtccttccagcctaggcctgcagcgccattttatttatattttttaa

SEQ ID NO: 63677 - DNA, 633 bp, Homo Sapiens
  misc_feature (420)..(442): n is a, c, g, or t
aggtgtctcagcactgtctcccagcccatctctataaaagcaagtaccagtgtggatctcaaatggtgtgtacctccagctccacctggtttctgcacgctgttgctgtggtaatatttttgacatgtgatggtgatagtctctggttctccccatccccacaaaggctgttgaaccacagcaccaggaagcctgagaatgaatcctgagggctctagcccaggctttgtcccaggctttctggtgtgtgccctcctggtaacagtgaaattgaagctacttactcatagtggttgtttctctggtcttgagtgactgtgtccacagttcatttttttccggtaggaataactccttttctacatccacgctccatagagtctctccttttcagacatcctgggatgaaagaatttggcnnnnnnnnnnnnnnnnnnnnnnnggacatctgttttcactcttaggcttttaaacaatagttattgcttttatccctctcagattctaataactgagagcgatggggctatattgaatctctgtatgcactgagaactgagctatgaagaggatcttattaaactgctggtctgcctttatggattgacactgttcctttcttttattgggaag

SEQ ID NO: 63678 - DNA, 926 bp, Homo Sapiens
cagcctatatagattcaagattagactatatgatttcacaaagcacattcaaggttttacattctatgattgaagaaattttttgaaactttttatttcattctttcctgtaggattttgctacaaataactttgggaatgaataaagtggaatggtaactttccagtggttcagaattgaattagacttcttgtgactgtgtatgtttggtttccattgaaatatatgaagtgagatgtcatatcctgaatatagtttgtcttccccaattacttgatagcattgtctgtcagcctagtaaagattaagaacagagtttctctaaattcctccgattattccactaaggcacattaaatatacttaattttgggaaacctagacatcacagatttctccatgaagtcctaaatcttctttaaggtcagtataggtatcttagttactgacagtattcaggtttttttctcccttggtgatatgtcattccatcagtgaaaaaatattttctcccagggataagaaaggtattctggtaatacattatcatcaatccttaaacagtaacagtcttggcacttatcacaaaaccgacccatttcttataaccagaaagattatcttagactgtccttcacattatactttacctactgccttgtaagaataagagttgctcactgtgtttacttgctgtcctccatattctccattgcaccattggtgtataacgttaagagtttcattgaatattattttaagtattacaaaaggcagcttgcttcttaatctatgcatctttggggtttttgaagaaatttaattctttgatgtaaaaaggaactgttaaaaaagttggaagctctgcacctgtgtatatatatattttagcaataaagcagcatgggctgagaatgccctgaaa

SEQ ID NO: 63679 - DNA, 766 bp, Homo Sapiens
  misc_feature (232)..(232): n is a, c, g, or t
ccctcattaccgcagccactgagccgagtcacttaagatccctgctggtaagagtatagtgggaaggagaccagtctggtaccttctgccaatccagctggacatacagatcagggagcctgtcttgccgtccattaaaggggacccaactcaccatcacccaggccctcagcagccccttcccaacagggccccctctcctgcctggacagctctgctggtctccccgtcncctggagaagaacaaggccatgggtcggcccctgctgctgcccctgctgctcctgctgcagccgccagcatttctgcagcctggtggctccacaggatctggtccaagctacctttatggggtcactcaaccaaaacacctctcagcctccatgggtggctctgtggaaatccccttctccttctattacccctgggagttagccatagttccctacgtgagaatatcctggagacggggccacttccacgggcagtccttctacagcacaaggccgccttccattcacaaggattatgtgaaccggctctttctgaactggacagagggtcaggagagcggcttcctcaggatctcaaacctgcggaaggaggaccagtctgtgtatttctgccgagtcgagctggacacccggagatcagggaggcagcagttgcagtccatcaaggggaccaaactcaccatcacccaggctgtcacaaccaccaccacctggaaggcccagcagcacaaccaccatagcccggcctcagg

SEQ ID NO: 63680 - DNA, 1267 bp, Homo Sapiens
  misc_feature (340)..(373): n is a, c, g, or t
  misc_feature (1144)..(1144): n is a, c, g, or t
  misc_feature (1226)..(1226): n is a, c, g, or t
  misc_feature (1249)..(1249): n is a, c, g, or t
gagagcatggtgacactatagaccagtgtgtaaaaaaagctggctggtacggtccggatattccgggatatcgtcgaccacgcgtcgcagctgaccccggaacaccagactgtagtctaccagatgatccagcagatccagcagaaacgggagctgcagcgcctgcagatggctgggcggctcccagctgcccatggccagcctgtctggcaggaagctccaccccgctgctgtctgcgggtacccctggcctgctgcccacagcgtctgctccaaccctgctgcccgctggagccctagtggctcccgtcgcttggcaacaacacaagtctcatggccnnnnnnnnnnnnnnnnnnnnnnnnnnnnnnnnnngcggacctccagtcctcactgcccagaccaaccccttcctcagcctgtcgggagcagagggcagtggcggtggccccaaaggagggaccgctgacaaaggagcctcagccaaccaggacaaaggctaaatccagccttaccccgtcctgacccccccaagtggagggaacagatcctggcctgaggggtcctagcctggagcaggcgcctgcgcccagaccctggcgagctttgacccagagcctgtgctgaggtccagggagtgtggcgagctcctggtgtcgacggactgagactgagaggggcgccccctccatctggaccccacttccctttccgcactgtccgctttgtgaggctcagaggaaggacagtctgcaagcccgcctaggaggtccatccccagcaaatgttttggaggtccccccagagagcagagtgggccatggcagaagtagggggttggttggacctgtcacatgaaatggatcagcacttgaatggggagaagtggagggagaggccctgggcttgtccctgcggggaaatcttttatggaagaagggctggacccactttacctgcagtttcttcccagctcgggcagatggcagaagggaccccttggactttttctcgccatccctccccccagcgcaggggcacaagctgagcttgtaaaagcccacagatgttgggggctggagaaggggcaggagagcatcacactcagccccagcctcgtcaacctcttggggcccccgtgatgtngaaggagagggcaggtgcggggaaggctctggctttcctttggtgccccgccctttgttttgcactattggacttaggagtnccgaaggggtggggagattggancttgccgactcaagtgtt

SEQ ID NO: 63681 - DNA, 340 bp, Homo Sapiens
tggaccaggctgtggaccattgactggccacagccagctctgtcagcatgttgtgctcggacaagctgtttccttcttctgaccaacccaggtgtgacctggggatgcagagctttctgttttgggtgttgggagaagcagcaggaaggagtcgccagatgatcaagctccccctttgcctgtcatctgtgaatgagcttcgccaggtggtgggcacctgggagccatgcagaggcctgtggtgctgagttagactccaggtactttgtggtcaaaggaaatcgcctagctccaggctgtgttaggacagtattagcatgaaggctgtgcgaccatcatg

SEQ ID NO: 63682 - DNA, 598 bp, Homo Sapiens
  misc_feature (65)..(141): n is a, c, g, or t
  misc_feature (146)..(320): n is a, c, g, or t
  misc_feature (542)..(550): n is a, c, g, or t
aaaaaagcagaacatgataatagatattagttagtaagtaagcatatagtatgttattaaatagnnnnnnnnnnnnnnnnnnnnnnnnnnnnnnnnnnnnnnnnnnnnnnnnnnnnnnnnnnnnnnnnnnnnnnnnnnnnngtatnnnnnnnnnnnnnnnnnnnnnnnnnnnnnnnnnnnnnnnnnnnnnnnnnnnnnnnnnnnnnnnnnnnnnnnnnnnnnnnnnnnnnnnnnnnnnnnnnnnnnnnnnnnnnnnnnnnnnnnnnnnnnnnnnnnnnnnnnnnnnnnnnnnnnnnnnnnnnnnnnnnnnnnnnnnnnnnctgggtgggtgtgagccattgcgcccagccttgaagtcatgttctaaattgtatttgaatttgtgcctctttgtttttccccaaaccaaagccctcaaattgtagtctctgtcggcttctgcagaattctggaaaatgccagttttcctcccccgcccttgttttccataaaacatatttatatattgtgatgaggagtactttctgaagagtacttcgtannnnnnnnnaattgccttgtttgccttcaacttccttgattttcatagtttacatgg

SEQ ID NO: 63683 - DNA, 1636 bp, Homo Sapiens
  misc_feature (1404)..(1440): n is a, c, g, or t
  misc_feature (1531)..(1540): n is a, c, g, or t
gagagcacctgatagcgcggggcgggggccctaccatggcgattcgcaagaaaagcaccaagagccccccagtgctgagccacgaattcgtcctgcagaatcacgcggacatcgtctcctgtgtggcgatggtcttcctgctggggctcatgtttgagataacggcaaaagcttctatcatttttgttactcttcagttcaatgtccccctcccagcaacagaagaacaagctactgaatcagtgtccctttattactatggcatcaaagatttggctactgttttcttctacatgctggtggcgataattattcatgccgtaattcaagagtatatgttggataaaattaacaggcgaatgcaccttctccaaaacaaaacacagcaagtttaatgaatctggtcagcttagtgcgttctacctttttgcctgtgtttggggcacattcattctcatctctgaaaactacatctcagacccaactatcttatggagggcttatccccataacctgatgacatttcaaatgaagtttttctacatatcacagctggcttactggcttcatgcttttcctgaactctacttccagaaaaccaaaaaagaagatattcctcgtcagcttgtctacattggtctttacctcttccacattgctggagcttaccttttgaacttgaatcatctaggacttgttcttctggtgctacattattttgttgaatttcttttccacatttcccgcctgttttattttagcaatgaaaagtatcagaaaggattttctctgtgggcagttctttttgttttgggaagacttctgactttaattctttcagtactgactgttggttttggccttgcaagagcagaaaatcagaagctggatttcagtactggaaacttcaatgtgttagctgttagaatcgctgttctggcatccatttgcgttactcaggcatttatgatgtggaagttcattaattttcagcttcgaaggtggagggaacattctgcttttcaggcaccagctgtgaagaagaaaccaacagtaactaaaggcagatcttctaaaaaaggaacagaaaatggtgtgaatggaacattaacttcaaatgtagcagactctccccggaataaaaaagagaaatcttcataatgaattataaactaattgattaatgtccccaaagaaatctgctttctactatatctttcagcattagagatttttctgttcttgaaaatacagtctgtgctctttgatttttgctattgtacggtttcatgcatttttttaaagggcatttgaggggaggattattgctatgaatgaaaaaaatattttagcttagactaagctacctgcctttcaaaatagtttaagggaccaccccccaannnnnnnnnnnnnnnnnnnnnnnnnnnnnnnnnnnnnccaaagggatttgggaaagaaaaacttatttttcaaaaaatttccccccttacaccgggaataacaattttcctgggcgggccccccaaannnnnnnnnnaaaaccccccaaaagggggcccggggttcccaaaaaaagggcccatatttcttttttaaaggtatatcctttttccgggggggaaaccaggggaac

SEQ ID NO: 63684 - DNA, 664 bp, Homo Sapiens
ggggccttaaagatttggacctaaatatggccgaaatttgggagcagaagaggtgatgtcatcctggaaaactgggtagttcatctgaccatgggatgtgtttgttatgaagaaaatctggatgcctgtgattcgagaattgaacctgaaacccaaagtgaactggggtgggggaagggaaaaaggaaagtatcaagtgttgggaaactggattcagtgggatctacaaggaatgtcatttttgtgcatcctacagtgaggagtaactgatcaggtgtctataacatttttcattctctctggaaacagactcaggtttctttggaccaaatccaaaagaacacatagctgtaacacagctgtagttgactagaatgctctgtatactttatattaaaaaatgctttgcatttcttccagtgcaatgaaattcatatggtgtcccaccttatttaatgatggtaccaatttaaaatcttagtccacttctgtagaaagttttctctatgaaagtaaagctgtttgaaaaattattatttttttacagatctttctataaaaaataaacatcttttgattgcttggatttaggaattcaatttttgtttcagtgaccaatgtcaagttgcaggctttgtgtgtgcatatttaatatttctactac

SEQ ID NO: 63685 - DNA, 463 bp, Homo Sapiens
tagttcttacagtggtaatcacatcagtttggcaatctaagatgtctttatcaagggtcagccccttttctatttgggagctggaatcttttctttcatgtagaaatctacatgtataatacaagaaatgtatttttatctgcaggataatattgtttcaaataattttattaagagttaactttttaggtattttcccttttaatgtggttttgaaatgttaattgcatttttacacatgatgcattcagtggacactcttttttcctaattataactcatctctgaatgcattgtgccaatcaagagtaagataggattcagtgcgcaaaatttgcttttgatgcttattaagagtaaacccatgaatttgaatttttatattatgcttggtacttggaattgatatataccttattaaagcttgaaaacatttagcatttgaatagtaagtttcatcacg

SEQ ID NO: 63686 - DNA, 425 bp, Homo Sapiens
ttacaactttaacaggttctttaatgttttatagccagaacatttgttgaacacaagtgataatgttacagtgcagtgtcacacaccaagagtcatcattcagactgttgccacagaggacatcacttcttccatatcccaagcagaactgacagtcgatagtgatattcagtcatctgattttcctgagcctccagacgccctagaagcagacactttcccagatgaaattcatcaccctaagatgactgtggagccatcatttaatgatgctcatgtatccaaattcagtgagcaaaatagcacagaactgatgaatagtgttttggtcagaacagaagaagaattctttgacacggaccttaaacaagaggaatcaccctctgatttagcccgtgcttatgttactgagggtttagagtctc

SEQ ID NO: 63687 - DNA, 1454 bp, Homo Sapiens
aaatacattaggacctggaattcagttgtcgagccaggacggtgacagcgtttaacaaagcttagagaaacctccaggagactgctatcatggcagagaagcccaagctccactacttcaatgcacggggcagaatggagtccacccggtggctcctggctgcagctggagtagagtttgaagagaaatttataaaatctgcagaagatttggacaagttaagaaatgatggatatttgatgttccagcaagtgccaatggttgagattgatgggatgaagctggtgcagaccagagccattctcaactacattgccagcaaatacaacctctatgggaaagacataaaggagagagccctgattgatatgtatatagaaggtatagcagatttgggtgaaatgatcctccttctgcccgtatgtccacctgaggaaaaagatgccaagcttgccttgatcaaagagaaaataaaaaatcgctacttccctgcctttgaacaaagtcttaaagagccatggacaagactaccttgtttggcaacaagctgagccgggctgacattcatctggtggaacttctctactacgtggaggagcttgactctagtcttatttccagcttccctctgctgaaggccctgaaaaccagaatcagtaacctgcccacagtgaagaagtttctacagcctggcagcccaaggaagcctcccatggatgagaaatctttagcaagaatcacaggaagattttcaggttttaataacgcagtcatggaggtcaagaacttgcaataccagtgttctaaagttttgcaacaattaagtgctttacctaagtgttgattgtgcctgttgtgaagctaatgaactctttcaaattatatgctaattaaataatacaactcctattcacccacttagttaaaattgatttcttctcattaggatctgatgtgaattcagttttccaatctcctcctagccaacaattttcttggaattacaaattcagtaaaaatggaaactataaattatgtggtctgtttgacttttccaagaattgccctgtaacatacaatttgtcatacaatctattaaaatgccaatgtacaaaatgcacctctgacattttcaggtatgcacaggagaagagttaccatcctggataatggcctaaagacattttcttcttttcctgagcaccgcggccccccccgcgcgctctcgactgtggtagctcgccccctcatgctgcgtgctgcggtgccgtgctcgacccgctcggccctcgaccgccgtctgacacaggaggcggctgtccctgccctgtgtcgccggcgccgggcggcgcctgtcctccgtcgtagcccgcgttggcagcagcgcgggggcgtccatggggtggcgcgcgtttgtctgggtggggcggcggcagcgctgtcgtcgtgcgcgt

SEQ ID NO: 63688 - DNA, 216 bp, Homo Sapiens
ttaaaatcgtagcttgtacagatcaagagaatatactgggcagaatgaagtatgtttgtttatttttctttaaaaataaaggattttggaactctggagagtaagaatatagtatagagtttgcctcaacacatgtgagggccaaataacctgctagctaggcagtaataaactctgttacagaagagaaaaagggccgggcacagtggcttattc

SEQ ID NO: 63689 - DNA, 374 bp, Homo Sapiens
tggaatcagtgctcctcggttcagtgttttgagaccaggtctttagcttctagctgggcatatttttctgctttgtaatttaacctgtatcttttttttcccatgttcctgcctcatcagggaattgtaagatttagggggaggtgtgggaaatcttactctttgccctaaagtattcagcgatcagaattctggataccctgcaaaacacctccaacctccctgcctttgaaccctgtgttaacaatgagaagcttgtttatttgaaggctgggttctcattggcccacaggggtaaggttgtaattgtgtgtctaaaaaattgccttttgcattccccaatagcatgacaactggaatagtaatttgactta

SEQ ID NO: 63690 - DNA, 657 bp, Homo Sapiens
tccctatccgtgtccggggttggcaaggccatcatcatctacccgctgtgtgagaacaatgtctacatgctgtctcccaatgccaggttatgtctttactccccgctggccgagcagttctcccaccagttcccatctcatgacctgccgtcggttcttgccacgttctccttgccggtctccttgtcagaatttaggaatcccctggcccctgctgtgcaggagacccagctcatccagatggtggtgtggatgctgcagcgccggcttctcatccagctgcacacctatgtctgcctgatggcctcacccagcgaggaggagccccgtccgcgagaggacgacgtccccttcactgcccgggtcggcggtcgcagcctcagcacgcccaacgccctcagctttggctccccaaccagcagcgatgacatgaccctcaccagccccagcatggacaactccagcgcagagctacttcccagcggggactcgccactgaaccagaggatgacggagaacctgctggccagcctgtcggagcatgaacgcgcagccatcctcagtgtacccgcagcccagaaccctgaggacctccgcatgtttgccaggctccttcactacttccgcggccgccaccacctggaggagatttatgta

SEQ ID NO: 63691 - DNA, 425 bp, Homo Sapiens
  misc_feature (219)..(223): n is a, c, g, or t
  misc_feature (229)..(230): n is a, c, g, or t
  misc_feature (236)..(262): n is a, c, g, or t
gtctggtccaatctgcatcttgttgtgtcccaagaccctatctcctccccaacattcttattgcctttggtcccagtaaggaacgaattgggggccagggaggagaacaggggggatcaagaagggaaacccaattccccctttgaaagtgggttctttgaactatgtgtttgggggaagttcctctggatactaatttgaatttatatacctcatgtnnnnnccaaanntgacgnnnnnnnnnnnnnnnnnnnnnnnnnnnttcataatatttggaaggtttttgatgctagaaaaatggaaacaagagaaccttcaaaaatgggtacttaagatgggaactggaggccaatctttcataaagccaagccccatagctgcttgctgttaggccctccaagccattttgacattggggtggatag

SEQ ID NO: 63692 - DNA, 517 bp, Homo Sapiens
gctcccggccgccgccaccttccccgtgcaagactcctgccagcggcgccgctctgggcatggtgggcgtttgtggggtgcgagaggcccgcgccgccgtgcgcgctgcctacgaggctttctgccgctggagggaggtctccgccaaggagaggagttcattacttcggaagtggtacaatttaatgatacaaaataaggatgaccttgccagaataatcacagctgaaagtggaaagccactgaaggaggcacatggagaaattctctattccgcctttttcctagagtggttctctgaggaagcccgccgtgtttacggagacattatctacaccccggcaaaggacaggcgggccctggtcctcaagcagcccataggcgtgggctgcagtcatcaccccgtggaatttccccagtgccatgatcacccggaaggtgggggccgccctggcagccggctgtactgtcgtggtgaagcttgccgaagacacgcccttttcgggccttggccctg

SEQ ID NO: 63693 - DNA, 367 bp, Homo Sapiens
atatactccatttgccatcggtcccagtgacacaccagaggaaatcctatctcggatcggcagtgggaagtttaccctcagtgggggaaattggaacacagtttcagagacagccaaggacctggtgtccaagatgctacacgtggatccccgccagcgcctcacagctaagcaggttctgcagcatccatgggtcacccagaaagacaagcttccccaaagccagctgtccctccaggacctacagcttgtgaagggagccatggctgtcacgtactccgcactcatcagctccaagcccaccccccagcttgaagcccatcgaagtcatccatcctgggcccagcggcgagtgaggaagttgcca

SEQ ID NO: 63694 - DNA, 1442 bp, Homo Sapiens
ggtgactaattttttcaatcttacatagatctttcacccattagcattacttacgtagataattctttatgcctagttattatacatattaatttttaaggtatacatttaaattacacaattgttcattgtggtttgtatcccagaatgtgttgtgttttttaaaagatgcataatagctgaatgtatgcatgactttgaaagaagttaaaatggtgattttttttcacctcttgtacattttaaaaccaggccaaatctatttgccaagcagtgtatcactaataagaaaagcagtttttccttttattgcagtttttgtttatctgccatagaatttccttatactgtggcttggtattattcaagattagctatttcgctggtattacatctttttaaaagcctattataacatggttagcctataaggcagtgttggtccccttctaatattggcctcataaaggggttccactgtactttccgcatattactgtgttgttgttttcctttgtggatatataagcaaattgagcttgggtgatttttatggagacaataattagacaatactgtataattagttttacttaatagattatcatcttgtgagaagagatgtttaaacgtggtaaatcacttcatattacaaaacagttttacacttaatatgttaacattgggtgcaataatttagtagcattagctttagttacaaatataactggatctttctgctgacaacttaggttgtatgagttatgcttaaaagctttaaatctgatgtttcctgtacctgccacactatgttagaatgtgtccttcaaacatatcctcctgcaacttctcaaactgtactaaattgatatttcttgaagtctaactctgtgctaacagatctccattttaaatagaatacggttttaatttttgataagctgctgaattttaaagagagttttttggggccaccaaatattttggatcatgcagagaatatatattgtactgtagtaattttgtatttacatttgtatgatgtgacataatagatgtgaatgttaatcactgcttgactatgttaataaagttgtttacctcacgaccgcagccgcccctcgcaggaattcatttctgccggccgccctcggcccttccaaaagttttccaacacatttcattttggggcgcgcggcccccgcagggaaatggatcttggcgccaaccccgggttcacccaccccccctccgtgttgactccccgcactgcttcactttcctcccccctacacaaaccccagcattgggcggccattcgccatcgacaccataagacaccgtgagccccgcgcgctctccaccgcggtagctcccgttcgccttcgtactactgccccataacacccacgcccagatgtgcgttcgtcaatagacacgtc

SEQ ID NO: 63695 - DNA, 1127 bp, Homo Sapiens
aggctatgccgtgagctctggatcgacgagaaggagcagtggctcaacaacatgcagatcccagagaagctggaggatcgtggaggtacatccagcacagattgagagccgtagaaccagaaatgaacaaccaggcttcccgggttgcagtggtgaaccagatggcacgccagctgatgcacagcggccacccaagtgagaaggaaatcaaagcccagcaggacaaactcaacacaaggtggagccagttcagagaactggttgacaggaagaaggatgccctcctgtctgccctgagcatccagaactaccacctcgagtgcaatgaaaccaaatcctggattcgggaaaagaccaaggtcatcgagtccacccaggacctgggcaatgacctggctggcgtcatggccctgcagcgcatgctgaccggcatggagcgggacttggtggccattgaggcacagctgagtgacctgcagaaggaggcggagaagctggagtccgagcaccccgaccaggcccaggccatcctgtctcggctggccgagatcagcgccgtgtgggaggagatgaagaccaccctgaaaaaccgagaggcctccctgggagaggccagcaagctgcagcagttcctacgggacttggacgacttccagtcctggctctctaggacccagacagcgatcgcctcggaggacatgccaaacaccctgaccgaggctgagaagctgctcacgcagcacgagaacatcaagaacgagatcgacaactacgaggaggactaccagaagatgagggacatgggcgagatggtcacccaggggcagaccgatgcccagtacatgtttctgcggcagcggctgcaggctctggacactggatggaacgagctccacaagatgtgggagaacagacaaaatctcctatcccagtcacatgcctaccagcagttcctcagagacacgaagcaagccgaagcctttcttaacaaccaggtaaggtttgttcctgcctttgcttcctttcggtgaaagcagcgctggctgccttttgaaatgttttggctggggcagctggtttaaaccacaccctgtatggaatatatggataatttagagaccgcgatg

SEQ ID NO: 63696 - DNA, 496 bp, Homo Sapiens
atctcccctgcccatgtccacaactggaaggcgcgatggttcatccttcggcagaacacgctggtgtactacaagcttgaggggggtcggagagtgacccctcccaagggccggatcctcctggatggctgcaccatcacctgcccctgcctggagtatgaaaaccgaccgctcctcattaagctgaagactcaaacatccacggagtacttcctggaggcctgttctcgagaggaagcgggatgcctgggcctttgagatcaccggggctattcatgcagggcagcccggggaaggtccagcagctgcacagcctgagaaactccttcaagcttgcccccgcacatcaagcctggcatcgcatttgtgggacaaagattgcacgatagcaacaccggaatccgtttcaagccccaacatggagcaaggaagcacctattaaaaagaactttctcggctcctccctggttggacttggcttatcttcaaaaagctt

SEQ ID NO: 63697 - DNA, 393 bp, Homo Sapiens
cataacagatgtgagctccttgaagtccatggcggaacgggcagccatcagctctggcattgaggaccctgtgccaacgctgcacctgaccgagcgagacatcatcctgagcagtacatcagcacctccggcctcagcccagccgcccctgcagctgtcagaggtgaacataccgctgtcgctgggtgtctgtccactgggccctgtgcccctcaccaaggagcagctctatcagcaggccatggaagaggccgcctggcaccacatgcctcacccctctgactctgagcgtattcggcagtacctcccccggaacccctgcccgacgcccccctaccaccaccagatgccacccccacactcggacactgtggaattctaccagcgcctgtc

SEQ ID NO: 63698 - DNA, 382 bp, Homo Sapiens
gggagttttgagaagtatatttctggaaacttaaatggattatattcttattatatagttgggtacgaatgtatctattttcattgtggtaaaagttcttccttttctctttcccaggtcatgttcttcctcaaattttttccatattgtaaaatcaaacttaaatcattagaatacaagtttatgtattctaatgcatgttagaaaattgaataatataggaaacacaaggctgcatgatgaaaagtgcattgttactgtgcagttaaattttggcttctggctttctttagtttgaacaaacgttcttgtctaccccagtagtcacagatgccatctttgcaacagaaagagtggtggtggcaaaatttctagaatgtta

SEQ ID NO: 63699 - DNA, 678 bp, Homo Sapiens
  misc_feature (252)..(264): n is a, c, g, or t
gagcgtccccctggacccctcggcctcctcgtcctccctgccactgcccgacagacactcaggacacaaggccgagaacggccccggccctggggtgctggtcctccgcgccagcttcgacgagagacagccttacgcccacatgaacgggggccgcaagaacgagcgggccttgccgctgccccagtcttcgacctgctgatccttggatcctgaatctgtgcaaacagtaacgtgtgcgcacgcgcagcnnnnnnnnnnnnnagagagagttttaacaatccattcacaagcctcctgtacctcagtggatcttcagaactgcccttgctgcccgcgggagacagcttctctgcagtaaaacacatttgggatgttccttttttcaatatgcaagcagctttttattccctgcccaaacccttaactgacatgggcctttaagaaccttaatgacaacacttaatagcaacagagcacttgagaaccagtctcctcactctgtccctgtccttccctgttctccctttctctctcctctctgcttcataacggaaaaataattgccacaagtccagctgggaagccctttttatcagtttgaggaagtggctgtccctgtggccccatccaaccactgtacacacccgcctgacaccgtgggtcattacaaaaaaa

SEQ ID NO: 63700 - DNA, 426 bp, Homo Sapiens
  misc_feature (167)..(167): n is a, c, g, or t
  misc_feature (407)..(407): n is a, c, g, or t
ccacagcgtctcaagtagctgggattacaggtcttcagcaatatcctccagcactgtggtttgcaaggggacggggccaataccacaccccagaagcttgaggagaggggccgattgacccccagtgacatgcctctcctggaattcaaggacattgttctctaccntttgtgatacctgcaccacactttgggcctttctggatatcttcctttggcttgcaagacctttccagaagcacgacttttgttacaggcttcttggtgacctgtggcagaggctcctcccattccaaggaagaaagctaatggaagattttccacatcatccctgaaccagattctgcctccttcccaatccctaagaaaagcagcttgtgacaacattcaaggggcttatcgaagagntccttcagatctttcaagc

SEQ ID NO: 63701 - DNA, 490 bp, Homo Sapiens
gcattgtctgtttccatcatgctgatacctacctcctaaaaaagtgcctgcgacagggttggtgctcagtaaatatccgtcgactaaacaaatgaaggcatgactcaaagcactggctttcagcaccagacgaggttttcctgggctgctgtcaccgcggccctgcaggggcaccctggcactttctcctgccatgacaaactcccactgaattggactgtattcccaccacacatggatgacattctccaacacatgtgccccatgtgccattacctctttccagccctgccccccagagcccagcgccctctcctgaggggacctcgacgagcccggccccagtgatctccagtgccgctgtccccgaagcaccctctgtgacccccaccgccccaccagaggatgaggatccagccctgtccccacacctcctgctccccgacagcctcagccagctggaggagtctctggccggcagaggaagtgg

SEQ ID NO: 63702 - DNA, 877 bp, Homo Sapiens
tcccactcatttttgaagtaactctggaacatcaggagagcattctgggtaataccatgcaaagtgtgattgcattactcagcaatctagttgcctgcaaagattcgaatatggaactactttatgaacaaggacttgtcagtcacatctgtaacctgctcactgaaactgccacactgtgcttggatgtggacaataaaaacaacaatgagatggcagctccactgctcttttccctgcttgatattttgcacagcatgctgacctatacctccggtattgtacggctggctttgcaggcccagaagtctggctcaggagaggacccttcaggctgcagaaagacctgctgctgctcaacaagacctcttgacagacctgattaagcctgctcatttccacttgctttcctaatgaagattcctgaagatttttgatggtttcatccaagtgcctgtcctatactgggttcagctgtatggaagggaaaacccggacagcctctctcctgaaaatgtggaaatttttgctcatttactgacatccaaggaggacccaaaggagcagaagcttctgttaaggattctcagaagaatgatcacctccaatgagaagcacttggagagcctcaagaatgcaggcagcctctgcgggctctggagcggctggcccctgggagtggttcatttgccgacagtgcggtggctcccttggccctggaaatcctccaagccgttgggcactaggcaagaaggtgcttagcacaagcccgccctgtgccccagccctcggatgcataagcaaggtcagctcccagacacctttgccacatcccctcacagctgtctttggacctaataaagtcagcttaacccag

SEQ ID NO: 63703 - DNA, 825 bp, Homo Sapiens
  misc_feature (726)..(726): n is a, c, g, or t
  misc_feature (813)..(813): n is a, c, g, or t
ggataagcaaagtgatattcaaaatttaaatgaagagagaatcttagctttacagcttgtgggtggataaagaaaggaacggatgtagacgtggggccatttttgaactcccttgtacaagaaggggaatgggaaagagctgctgctgtggcattgttcaacttggatattcgccgagcaatccaaatcctgaatgaaggggcatcttctgaaaaaggagatctgaatctcaatgtggtagcaatggctttatcgggttatacggatgagaagaactccctttggagagaaatgtgtagcacactgcgattacagctaaataacccgtatttgtgtgtcatgtttgcatttctgacaagtgaaacaggatcttacgatggagttttgtatgaaaacaaagttgcagtacgtgacagagtggcatttgcttgtaaattccttagtgatactcagttaaatagatacatcgaaaagttgaccaatgaaatgaaagaggctggaaatttggaaggaattttgcttacaggccttactaaagatggagtggacttaatggagagttatgttgatagaactggagatgttcaaacagcaagttactgtatgttacagggttcacctttagatgttcttaaagatgaaagggttcagtactggattgagaattatagaaatttattagatgcctggaaggttttggcataaacgagctgaatttgatattcncaggagtaagttggatccagttccaagcctttagcacagtttttgtgagttgcaattctgtggcaagtcatccctacagctgtcacngtgcctcatcag

SEQ ID NO: 63704 - DNA, 562 bp, Homo Sapiens
  misc_feature (294)..(309): n is a, c, g, or t
ctcaggctgggcatgctttaattatgtgacagggacacagttttccagcaaaaggaaaccaagcttgtgaagggaaagtgtgtgcccctgttccctatccatctccctggacttcctgctcatcatagtacccagtgagcccagagatcctactagactgggtcagcaattctagagaacttccggaatagtctgggaacatggtcaaggtggaaggggctcccctagagagggtgggggtgtagttacttcccagttggccagaaaactgggccttgcagacccccttagcannnnnnnnnnnnnnnnccttccctgctttctacttctttggggagccccttgtgttttggagtctgactggagtctcgcatcctggggcctgctccatccatccctcctgggcgccagaccctccatccaagccctgtgtctttccatagtcagggtcaggccctgcatctattccaaggggcactcagtacacattccataaattagctgggtgtccctgcacgcccaccccatgaaactcgagcaggtctctggaagccatttgtta

SEQ ID NO: 63705 - DNA, 1427 bp, Homo Sapiens
ggcggcggccaggtgttggaggcctttgctacgcggtccgaggctttcattgcacaccgcggctaatgccgccgccacggctacagaaacgacctcccaagacgtcgcggcgacccccgtcgcgcggtacccgccgatgtggcctccatgacagccgacagcaaagctgcacggctgcggcggatcgagcgctggcaggcgacggtgcacgctgcggagtcggtagacgagaagctgcgaatcctcaccaagatgcagtttatgaagtacatggtttacccgcagaccttcgcgctgaatgccgaccgctggtaccagtacttcaccaagaccgtgttcctgtcgggtctgccgccgcccccagcggagcccgagcccgagcccgaacccgaacctgaacctgcgctggacctcgcggcgctgcgtgcggtcgcctgcgactgcctgctgcaggagcacttctacctgcggcgcaggcggcgcgtgcaccgttacgaggagagcgaggtcatatctttgcccttcctggatcagctggtgtcaaccctcgtgggcctcctcagcccacacaacccggccctggccgctgccgccctcgattatagatgcccagttcatttttactgggtgcgtggtgaagaaattattcctcgtggtcatcgaagaggtcgaattgatgacttgcgataccagatagatgataaaccaaacaaccagattcgaatatccaagcaactcgcagagtttgtgccattggattattctgttcctatagaaatccccactataaaatgtaaaccagacaaacttccattattcaaacggcagtatgaaaaccacatatttgttggctcaaaaactgcagatccttgctgttacggtcacacccagtttcatctgttacctgacaaattaagaagggaaaggcttttgagacaaaactgtgctgatcagatagaagttgtttttagagctaatgctattgcaagcctttttgcttggactggagcacaagctatgtatcaaggattctggagtgaagcagatgttactcgaccttttgtctcccaggctgtgatcacagatggaaaatacttttcctttttctgctaccagctaaatactttggcactgactacacaagctgatcaaaataaccctcgtaaaaatatatgttggggtacacaaagtaagcctctttatgaaacaattgaggataatgatgtgaaaggttttaatgatgatgttctacttcagatagttcactttctactgaatagaccaaaagaagaaaaatcacagctgttggaaaactgaaaaagcatatttgattgagaactgtgggaatatttaaattttactgaaggaacaataatgatgagatttgtaactgtcaactattaaatacattgatttttgagacaaat

SEQ ID NO: 63706 - DNA, 411 bp, Homo Sapiens
atatctctctcatcctctctggagaagtgggcgctgcaggactgtggagacgtaaatgtaaactgtgactctacctcgaccctgtttcttatttttcttctctggctaaaaatttttaattggatgtgtttgggggcggggggatggaagtgacttggagaatgtgtttgggatgaaataactatctccccttcctctgttccccaactggggagtctccccaggctgcttttctaggaataccagtcacatagtttttatttttgtgtctgtgaaagtgccaagaacccctccccacatttgtagatccatgaccctttttataagctgtgtgtgtcctctgtattattgttattaactattttttagcatttgcctgtaagttattaaagactgataactgtagctctt

SEQ ID NO: 63707 - DNA, 706 bp, Homo Sapiens
  misc_feature (392)..(400): n is a, c, g, or t
agtgacctataatgagccgttgtgctccagcctgggcgacagaagtcttgtctcaagaagaaaacgaactgggaaaatttcttcgatcccaaggtttccaagataaaaccagagcaggaaagatgatgcaagcgacaggaaaggccctctgcttttcttcccagcaagggttggccttacgaaatcctttgtgtcgatttcaccaagaagtggagacttttcggcatcgggccatctcagatacttggctgacggtgaaccgcatggaacagtgcaggacggaatatagaggagcactattatggatgaaggacgtgtctcaggagcttgatccagacctctacaagcaaatggagaagttcaggaaggtacaaacacaagtgcgccttgcnnnnnnnnnctttgacaaattgaagatggatgtttgtcaaaaagtggatcttcttggagcgagcagatgcaatctcttgtctcacatgctagcaacataccaggtaacaaaataatgtttgttgcaatgaaccaaggatggcacaaggtttaaataacatcaaaatggtgtttgagctaaaagtaagctttggccattgtgaggttctgaatgcctttccgtaatttcacttcccacatctctgccttctagggccctacgtttaaccgaccaaagtagtagttatttcatgtatatacagatgggccgagctcg

SEQ ID NO: 63708 - DNA, 622 bp, Homo Sapiens
  misc_feature (594)..(594): n is a, c, g, or t
tggctgtacttttgatgatggtccaggggcctgtgattaccaccaggatctgtatgatgactttgaatgggtgcatgttagtgctcaagagcctcattatctaccacccgagatgccccaaggttcctatatgatagtggactcttcagatcacgaccctggagaaaaagccagacttcagctgcctacaatgaaggagaacgacactcactgcattgatttcagttacctattatatagccagaaaggactgaatcctggcactttgaacatattagttagggtgaataaaggacctcttgccaatccaatttggaatgtgactggattcacgggtagagattggcttcgggctgagctagcagtgagcaccttttggcccaatgaatatcaggtaatatttgaagctgaagtctcaggagggagaagtggttatattgccattgatgacatccaagtactgagttatccttgtgataaatctcctcatttcctcccgtctaggggatgtagaggtgaatgcagggcaaaacgctacatttcagtgcattgccacagggagagatgctgtgcataaccaagtttatggctccngaagacgaaaatggagaagatttttcca

SEQ ID NO: 63709 - DNA, 952 bp, Homo Sapiens
  misc_feature (621)..(621): n is a, c, g, or t
  misc_feature (705)..(705): n is a, c, g, or t
  misc_feature (906)..(906): n is a, c, g, or t
  misc_feature (916)..(916): n is a, c, g, or t
ataggctaggtacgaggccgggtgtgtaatcggcacgaggaaggaacgaaactgttaaaccaggctgatccctgtgtccagattttaattcaggaaacgggagagcacgttttagtcacagcaggagaagtccaccttcagcgatgcctggatgacttaaaagaaaggtttgcaaagattcatatcagtgtatctgaacctattattccattcagagaaacaatcacaaaacccccaaaagttgacatggtcaatgaagaaataggcaaacagcaaaaagttgcagtcatacaccaaatgaaagaagatcaaagcaaaatccctgaaggaatccaagttgactctgacgggctaatcaccataacaactcccaataaacttgccacgctcagtgttcgagccatgccccttccagaagaagtcacccagattctggaagaaaatagtgatttgattcgttctatggagcagttgacatcctctttgaatgagggcgaaaatactcacatgattcatcagaagacccaagagaaaatttgggaattcaaaggaaaactggagcaacacctaacagggagaagatggaggaacattgttgaccaaatctggtcatttggcccnagaaaatgtgggcccaacatactagtcaataaaagtgaagattttcagaactcagtatggacaggtccagctgacaaagctttnaaaagaagccgtagtaccgagatttgggcaatagcattgtgaagtggcttccaactagcaaccctctctgggccccatgtgtgaggagcctctcatgggtgtctgttttgttctggaaaaatgggacctaagtaaatttgaggaacaaggagcaatgattctggcaaagagggacaggaggaaaatgaaacctgttctggnggaatgaaanccagagctcaagatggctgctctaaggctttggaag

SEQ ID NO: 63710 - DNA, 565 bp, Homo Sapiens
agcatcagcccgcgaggggacctgatgttcctgctggacagctcagccagcgtctctcactacgagttctcccgggttcgggagtttgtggggcagctggtggctccactgcccctgggcaccggggccctgcgtgccagtctggtgcacgtgggcagtcggccatacaccgagttccccttcggccagcacagctcgggtgaggctgcccaggatgcggtgcgtgcttctgcccagcgcatgggtgacacccacactggcctggcgctggtctatgccaaggaacagctgtttgctgaagcatcaggtgcccggccaggggtgcccaaagtgctggtgtgggtgacagatggcggctccagcgaccctgtgggcccccccatgcaggagctcaaggacctgggcgtcaccgtgttcattgtcagcaccggccgaggcaacttcctggagctgtcagccgctgcctcagcccctgccgagaagcacctgcactttgtggacgtggatgacctgcacatcattgtccaagagctgaggggctccattctcgacgcgatgcggccgc

SEQ ID NO: 63711 - DNA, 813 bp, Homo Sapiens
  misc_feature (356)..(616): n is a, c, g, or t
ggggccggaagttggtctcgacacctggactagccgggttgtatttggaaacgcggagtgagtttttccgtgctgtgtaggggctaacaatggacacccagaaggacgttcaacctccaaagcagcaaccaatgatatatatctgtggagagtgtcacacagaaaatgaaataaaatctagggatccaatcagatgcagagaatgtggatacagaataatgtacaagaaaaggactaaaagattggtcgtttttgatgctcgatgaatgctgggaattcagaggaatgtcttcacttatacttggatttgctctcttcccatttctgattgttgtatagctttcgattttgcttannnnnnnnnnnnnnnnnnnnnnnnnnnnnnnnnnnnnnnnnnnnnnnnnnnnnnnnnnnnnnnnnnnnnnnnnnnnnnnnnnnnnnnnnnnnnnnnnnnnnnnnnnnnnnnnnnnnnnnnnnnnnnnnnnnnnnnnnnnnnnnnnnnnnnnnnnnnnnnnnnnnnnnnnnnnnnnnnnnnnnnnnnnnnnnnnnnnnnnnnnnnnnnnnnnnnnnnnnnnnnnnnnnnnnnnnnnnnnnnnnnnnnnnnnnnnnnnnnnnnaaaatgtgggtgactaccaggtacccaaaaaccccgaaagggaaaactttggattagggggggcaccactgttacttaggaaataccactatatccatatgaatttaattttttaggaccataattataatttggggcatctacctaatattttggaataacgcaaatttttttgcttccattaccgtgaccttttt

SEQ ID NO: 63712 - DNA, 1072 bp, Homo Sapiens
ggactgtccagtgggagcaggcgccccggccagcgcagacctggaggcgcacgggcgccgcaccggacgattcggctcggggtagagcggagccgcagccccacgcgcagcccaggacccactcgccaccgccgcttcctcagcacccatggggaccaggagactttaaaggagtttggggtttcgggagcagggaaatcacggatccccgctcctggccctcgcctcgccacctcattgatgggcaaccaactggaccgcatcacccacctcaactacagcgagttgcccacaggggacccgtcggggattgaaaaggacgaactgcgggtcggggttgcctacttcttctcggatgatgaggaagacctggacgaacgcgggcagcccgacaagtttggcgtgaaggtccccccgggttgcaccccctgcccggagagccccagccgccaccagcaccacctgctgcaccagctggtcctcaacgagactcagttttccgcctttcggggccaggaatgcatcttttccaaagtgagcggtggccctcagggcgccgacctaagcgtctacgcggtcaccgcgctgccagcgctctgcgaacccggcgacctgctggagctgctgtggctgcagcccgcgccggagccgcccgcgcccgccccgcactgggccgtctacgtgggcggcgggcagatcatccacctgcaccaaggcgagatccgccaggacagcctgtatgaggcgggcgcggccaacgtgggccgggtggtgaatagctggtaccgctaccgcccgctggtggccgagctggtggtgcagaacgcctgcggccacctgggcctcaagagcgaggagatctgctggacgaactcggagagcttcgccgcctggtgccgctttggcaagcgggagttcaaggcgggaggggaggtgccggcaggcacgcagcccccgcagcagcagtactatctcaaggtgcacctgggagagaacaaggtccacaccgccaggtttcacagcctggaagacctcatccgcgagaagcgccgtatcgacgccagcggccgct

SEQ ID NO: 63713 - DNA, 573 bp, Homo Sapiens
  misc_feature (54)..(54): n is a, c, g, or t
  misc_feature (61)..(61): n is a, c, g, or t
  misc_feature (81)..(81): n is a, c, g, or t
  misc_feature (92)..(92): n is a, c, g, or t
  misc_feature (148)..(148): n is a, c, g, or t
  misc_feature (156)..(156): n is a, c, g, or t
  misc_feature (165)..(165): n is a, c, g, or t
  misc_feature (197)..(197): n is a, c, g, or t
tgaattgcctttttgcgcaaattcccttagggctctaaatgggggcctttaaangactccnatttaaaactgtttggtccngagcctttgtngtggactgtgtcccatgaggactggaaaaataatggcaaaacccagagtttcgccnatcttgcngaatgagtngcaaagtttttctcagatgtagtgcgtattgntcagggcaaacatgcagagcccttggcagaacccactttaatgcattttcttcatatccctaaagttccttaaaaatatgtgacaatgcatcaggaagaggagaactgaagagtagaagttcccttgcagatttttttatcagtgacatgtaatgagcaattcacagatgagcgcaggcagagctctgtgtgccgtgtacatatggcccgtgctatgatgtgtctcacattggatgatattccactttgggaattttagtatttgtatatagaaaatgggtttaataactccccatggttttgatttgtcttatattcgttatttcttaaaactcttgtatgtgtttttataataaaaaataaaagtaagccatgg

SEQ ID NO: 63714 - DNA, 479 bp, Homo Sapiens
aaatacaaaaaagtaagtgaattttaatgttttgcattaactaaagaaatctgaagattaatgttgaggaaattgtatggacatgcctttgtgaaaccaggaagtattttaagttaaaaatgaaaaagcttttaattgctttgtgtgtgttttaatggagccccattttagagttattttttcccgtctcccctttaccaacaaaagggaacaatgccaccgtgaatggaatagtttggggaaagctttgccaaacacaaccctgatttcagagcaggaacatggtttggatagatcttcagttccgcttgaattattctgttactgcggctgtcattttcagaagatttccattcctttgcagatgctgttgggagttcgggattatgttcatttcttctgttttaatggcattcagtactaattttataagtgcatcttgtgtgaatctcaataaattcagttttgtaatctttttt

SEQ ID NO: 63715 - DNA, 435 bp, Homo Sapiens
ttccgaacaaaactggggctccttttttggtgctcgacttttccaccctttttccctccctcctgtgctgctgctttttgatctcttcgactaaaatttttttatccggagtgtatttaatcggttctgttctgtcctctccaccacccccaccccccttcctccggtgtgctgtaggctgccgctgttggccgccgctgctgctgctgctcgccccgtcgttacaccaacccgaggctctttgtttcccctcttggatctgttgagtttctttgttgaagaagccagcatgggtgcccagttctccaagaccgcagcgaagggagaagccgccgcggagaggcctggggaggcggctgtggcctcgtcgccttccaaagcgaacggacaggagaatggccacgtgaaggtaaacggcgacgtcgcccgcggcgc

SEQ ID NO: 63716 - DNA, 1266 bp, Homo Sapiens
accgaggattagagacgtcagttcatcgcgttggataatgagcgcctctgcgatttgcgggtgagatttgtggatttaaaattcacgggcagaatgtcccctttgatgcagtggtagtggataaatccactggtgagggagtcattcgctccaaagaggaactggactgtgagctgcagaaagactattcattcaccatccaggcctatgattgtgggaagggacctgatggcaccaacgtgaaaaagtctcataaagcaactgttcatattcaggtgaacgacgtgaatgagtacgcgcccgtgttcaaggagaagtcctacaaagccacggtcatcgaggggaagcagtacgacagcattttgagggtggaggccgtggatgccgactgctcccctcagttcagccagatttgcagctacgaaatcatcactccagacgtgccctttactgttgacaaagatggttatataaaacacacagagaaattaaactacgggaaagaacatcaatataagctgaccgtcactgcctatgactgtgggaagaaaagagccacagaagatgttttggtgaagatcagcattaagcccacctgcacccctgggtggcaaggatggaacaacaggattgagtatgagccgggcaccggcgcgttggccgtctttccaaatatccacctggagacatgtgacgagccagtcgcctcagtacaggccacagtggagctagaaaccagccacatagggaaaggctgcgaccgagacacctactcagagaagtccctccaccggctctgtggtgcggccgcgggcactgccgagctgctgccatccccgagtggatccctcaactggaccatgggcctgcccaccgacaatggccacgacagcgaccaggtgtttgagttcaacggcacccaggcagtgaggatcccggatggcgtcgtgtcggtcagccccaaagagccgttcaccatctcggtgtggatgagacatgggccattcggcaggaagaaggagacaattctttgcagttctgataaaacagatatgaatcggcaccactactccctctatgtccacgggtgccggctgatcttcctcttccgtcaggatccttctgaggagaagaaatacagacctgcagagttccactggaagttgaatcaggtctgtgatgaggaatggcaccactacgtcctcaatgtagaattcccgagtgtgactctctatgtggattttgaatgttaggggacctcagagt

SEQ ID NO: 63717 - DNA, 396 bp, Homo Sapiens
  misc_feature (126)..(165): n is a, c, g, or t
gatcagtttgattctgtaatgagcacagcacctaatattttgaggagctctgttttgaggaccaatgcttaaggtggactttgttcgtaaacaatatcccaatagatttgttgacttgaggtctgnnnnnnnnnnnnnnnnnnnnnnnnnnnnnnnnnnnnnnnnccaatagaattaagaattctaatgttgaaaaactgcacaaatttttatgggacaaagcctagaaaagagaaatgtagtttgaatcataatctaaatcatcgtatgatagaagagggaaagttttggtgccataatttctcctttcactggtgttggacttaaatcagttgaaatgtatttctgtaccacaatttacgcttcaatccaagtttaattgtctagtgacattca

SEQ ID NO: 63718 - DNA, 504 bp, Homo Sapiens
cgtgttccaggacctcgagggtgtcgagaaggtgtttggggtctccctggtgctggtcctcatcggctcccaccccgacctctccttcctgcctggggcaggggctgactttgcagtggatcctgaccagccgctgagcgccaagaggaaccccattgacgtggaccccttcacctaccagagcacccgccaggagggcctgtacgccatggggccgctggccggggacaacttcgtgaggtttgtgcaggggggcgccttggctgtggccagctccctgctaaggaaggagaccaggaagccaccctaacactcggccagacccgctggctcccaggccctgagaggacagagatgaccacatccctgctggatgcaggacccgtccaaagatgccccggggaggggtgtcagcccacgttgctggcctttggggtcaagaggagtagggatcccaggctgccctggacttagaccagtgtttgaggtggtaacagcggccgc

SEQ ID NO: 63719 - DNA, 1241 bp, Homo Sapiens
gctgcacaaaggatgctgactcacccaagttcaagacgacggtggggagcgttaagtgggtccccgaggacagcgagatcgtgtggtccatcaagttccttcccgggcggcaaggagtacctgatgcgggcccacttcggcctgcctagtgtggaggccgaagacaaggagggcaagcccccgatcagtgtcaagttcgagatcccttacttcactacctccggcatccaggtgcgctacctgaagatcattgagaagagtgggtaccaggccctgccctgggtgcgttatatcacgcagaatggagattaccagctccggacccagtgaggggctgtcgcagccaacaccccggcctcggggctcctggtggcagcaccaggggacacacctgccaaacccaccagatggaggggccctccctggtctctggccaccctcccagcctctgcccagggacccctgccttccccaggccatctgctctgccgtcgacactcgtctcagaagcccctttcccagaagaggctggtcttcaagaagtctcgtttctttgcccctgaagtcagtttcaggggaaggatgtgaaatttttccgtgtagaggttacagccttttatgctgttgagctcccaggtaccaaaaagcttggccaacgcttgccagccagccagctgcaggtggcatctgccacgaaggaagcgccagcctcgccaggccagcaggggcgtcgttttgttgccattttgttgaacgttatgggtttatgggtgttcctggaacttgtctttgtgcattcgttgctgtttcgtgttaccctcactgtccccatgtcccacccacgtcctacggcactcaggaagcacttggtgaggacgagccctcacccttcttgtcttccttcccagcagcgcccgcagcgggccatttacacgtcgaggctggcacctggcgcgctcgggggccactgtagcgtctgcctgctccctggactcgcaggcctcgcctgtggcgccttcccagggccagcctgggtcacgagatgctgtcactcagccagatcagtattgacccaccaggggaggtggggtttggtgagagacgccagcctcagactttttcccactgagggtccagagagcggggccacgtgtcacccacgtctgcgcttggtcacccgtcctccccaccctgtgtgtgtttatgtcatagttacattaaattccattcattgaatactc

SEQ ID NO: 63720 - DNA, 789 bp, Homo Sapiens
tttgagtcaggactatggagccgagtagttgatcttttaatatagccgtgtttacttgtattaacttacagttaacataggaaaaatacaagtaaggatgtgagaatttgcattttaatgggaaattttcaacccgttaatcctgaaaacagaagacagtcttaatataaatgtactgtgaagaatgctattgatgtttatggtttctgattacttttcaaattttgatgtttttttgccagttggcttttcttaaatgaaaacactgttccatttaaagtacatttatgttttattcagtaagagaatagaattttcatttgtttttctttaaatcctttactaattatataatttgaaagcaaaaagaagggcctatattaaatgctgaaagtgaaaagtgatgacattattagcagacactgcttaaaggagaccatttgtagcagttggcttaacctcaacttctaaaactacattggaaatgtaaatacatagcttagttttttgtaatatatggtgacttcagatttttttgtacagtattttgaatgtgagatgattgtcaggactaactgtctttttaacaaaacattttcagtattttaaataaaattttgtaaagtaatgtgaattaaaaattttggaacaattagaattcattcactattgtatagaagatgctgttaaaacataggaagggtatttttcttgatccaaagtttgtgaatttggctttgctacctcaattgcaggtgtttgtttgcctttataaactgttgcaaatag

SEQ ID NO: 63721 - DNA, 408 bp, Homo Sapiens
ctcaatcttgtatttagtttggggaaagagaagagaatttcctgtggattattttttcctcaagtgcacctctctggttaacccaaactctgcaagaaagcactgtgactaaaccatccataacgcctgcataaatattccatggtttcagttaaatttcagtttttagcctttacacatgaggtcaaaggagtgacgaaaattacaaagcaagggaaaaaatgaaatatctgggtttttgctgaatgcttaatttattttttactgtgccactccaatatttatcaaatccaaatagcatgaatgcttctctgtagtaatactaattttgtgccttttgtctgctttcttaagaccagttgttcacactttgtagatattagacaaatatatttcgattgaatacaa

SEQ ID NO: 63722 - DNA, 271 bp, Homo Sapiens
ttttttgcctttttgtctgtctttatttacagcaaagtacataatatgtggtcactttgtaaccactaacaataaaggtagggtggtaaaaagaaaagggagaggagcaagcatcttaaaaggggggaaaaaaagcctaagtctgtatttagctactcaccctgctcctgaggcaggactgggtaggcactccctgcctctaagaccacagccaagctgacctggaatgccagtccccggtatgaggaaggcagcagaacgcccagagaca

SEQ ID NO: 63723 - DNA, 582 bp, Homo Sapiens
tcagcaagtatccagacatcagggatgaccacatcggtgcgctgctggctgtgcgtgggaacgccagccgtgacatgaagcagaccatcatggagaccctggagcagggcccagcacaggccagccccagctacgtgcccctcttcaaggacattgtggtgcccagcctgaacgtggccaagctgctcaagtagcctccgccggcctgccctgctcgcccctccacagcgtcggtccctgcctttagaaacgcgggacagctgattgctctccttggccacacgtgctccttttagctgcacggcctgtctttaggtgccagtgtgatgcaccgggtgtgcgtcgagtgagcgtcccgaggccacgtgcggaggcccctcactgtgctgtcaaaggcctgtgggtgcaggctctgccgcacagcctctcttgggtgcttgtttgttgcagtggttgaaagtgtgtggggcacagaggacgtgcacctccctgccctcctcctccctgggccttcaccgcaccccatctgcttaagtgctcggaaccccgtcacctaattaaagtttctcggcttcctcagag

SEQ ID NO: 63724 - DNA, 526 bp, Homo Sapiens
ggtgactagagttcccgactagtccaacatatagtccctacatacactaaaataatgctgatctagagatagagaaataggggtggttatttttccagcatggagagttgaaagtccctgactgatttcagccattttcctagtgcttgtcggatgcagagacaatgttgaaatcccctaaacacagttctcagtggcaaaacctaggaaggctcatgttcccagagaagggaccacatgagccttctcccatgcaaagcttcccccagcttaaatagttgataaggactaattgtttaatgagtttatttatctacagtaggttagggatcctgggttctgtttatatgaagttcttcccagtttgtgaattctagtacagcagccatgcagccaccttatttcatagatgccatctgtgtgtcctcttgactaccttctatttagaggaagaatgagagctttgtgtgtttaactgacgcttatagtagacttcttgcatatgtatgttggactctcggggacc

SEQ ID NO: 63725 - DNA, 1017 bp, Homo Sapiens
gaggttcccgcgcgtgttgttacacattgaagctaactgattctagtggaacaaatgaaaaagaaacagtcaagcacacaatagtgcaaagaacgttcctttgtagatccgcaacttaaggattttgttcctcataaatggcatagttgaaagagcttatacactgcttacccagccaaatgctttgctttgaagtattgggttctgtgaaaatattgagcattgtacttaccttatctaggctgtgaaactgtcctacatactagagaatcataaaaacaaaaacctcactggcagcaagctgccgaataacaacagagtctagaggacatatttgtgggctgcacagatattttaggaatttcagaaattagaacaggagccaaaatgatttacattggcgttggcactgattcctttaaatggtctgggaaagggggttgggaagaggatggagctcaactggccagaagaggagcagctgcagtcctgatagcttctctagcctcggtcttttgagtgataagtagtcatgttgttttcatccagttggtttcttgtcattcccaagaagaatctcccaggccacatctttggggatacctgacatactggattagccttttcaaaagcaaagtcatcctatttggtcttatggggtgtgagttttgtggtgtacacacacagatacatgtaaggtggtttgggtcatgtttttaaccacctggcaatacagtccactttctggtttcttttattgtgggaagtaaatggtcaagctgctcaggcagtgaaaagatgtggagaatgtccgttgtcattcttgccactgtattccatttgctaccgagatataacattaaggtggacacattttctaactgtattaattaaaagtcaatggatacagagagtggattttctccccaagtcccatccctgctgaagaccgcttggatgactccccaacccactgtgcccctcccgcaacactaccagtaacaacaacgcgcggga

SEQ ID NO: 63726 - DNA, 759 bp, Homo Sapiens
  misc_feature (383)..(478): n is a, c, g, or t
gactctagtaggatcccggcgtagtgtttacttacacttttttcaagcattgcctactgcttacgatgagtgctctgtcactcctttaagtagccccagacaggctaccagagacttaaacaagaatttgtaagttctgctcagcttcctctagaaatggggatcagggtccaagacagaatgcagttgctgatttcaagactgctgcaacaccagggagcttgtgggggaagggcaagcagaaatgtcacaaagctttcttgccattttaaagttgcctgttcttgactcagcatttgcttcattgctataaactttttactgtttttcagagttctgataaaattggctatgcctgttcctgctttaaaaaatatatatannnnnnnnnnnnnnnnnnnnnnnnnnnnnnnnnnnnnnnnnnnnnnnnnnnnnnnnnnnnnnnnnnnnnnnnnnnnnnnnnnnnnnnnnnnnnnnncaaattacacgcgtgaaccaccagacccagcccctgcttgtttttcaatgtgcctactccaccatgttgctcaagtatgtatattttctaaagtaccttgtagtgttgtgatgggaaataaatccctgagttttttgaataactcagagagatcaaaaacttagtttatcctattcgaaggattagaaaaatgatatatctttcactttttcagggataggctcctcattagaaggctcctatgtgccgatgctggtacaagacatttcatttctcttaat

SEQ ID NO: 63727 - DNA, 575 bp, Homo Sapiens
aggtgatctagaggattaggcgtgttgttaccagctctgttagttatagttaaattgatctcagtagcttcaagtatttataaagtggttgaagtccaaatacatgtgataattacaatacactttgaattaatggagggtgggaggctagttgaaatgcattttatttacccaaggagtatgttaaaatgatagttataaatgttggaagtttaaagcaagatactcagtttagttctttacaaatcataagaagaacaaaattagatgttgacattgctattttaggctgtgtgttttccatatgcttcttgctttccctgtcacaggtggtggcagcaatattggtgtgattgaggttatgctggcaccactcgcacacaggcgcacaatggtgttagctgggcagaaagagtggcatctctggctaccgggctgggggcgacctttaccataggatgaagtaaccttgcattcggctgcaaggtgtactgtacgtacacaggtgctggtcgatgtccactttctgcttatctttctttctttgtttctattttaaagtaatttccaccaca

SEQ ID NO: 63728 - DNA, 698 bp, Homo Sapiens
taggtgcctagatttcccggcgtgttgttaccagcaggtgaccctgtttgtctatgtcaagaacaaagaccaggcaaaagaaatgtcaagccgcatttacaaatgcaaaaatggacttgtttttgatatgcttttcccaacaataagggacatgagtcattggggcatgttacagagagtttcagtaaaattcagaaaaaaataataaatatgaacagccacagcatgcccagaagcctttttatggagccaggcatggttgacctgctttccatgtctcaaaacattagtccctacaagaaccctatgaggtttatcttcttttcacccattttgagagaagaaaagttcagctcagagagctgcaggaacattggggacatctccaagtcacagccaataggtggcagtcatcagtgtgtcttggaagggacaaacattgagcttctgaacagctactccagaaactatggtgctgtggtgaagtcctggttaggagcctatgaaaatggtgaaggaaaagatggtcccagcctgcaaagctgaagtcaggaacccaccaggatctcccttctccctagcctggtggtccacatcatgcagatttactctagattcagcttagactcatttttatactactcggggacaggaggaaaacagtcggtaaacacacgccggaactctaggtagcctta

SEQ ID NO: 63729 - DNA, 326 bp, Homo Sapiens
aggactcccaggcatttccagaggcggcagaaggggactggactgtctcccttgaacatattttagcttcacttctgactgaacagtcattagtcaacttttttgaaaagccactggacatgaaatccaaacttgaaaatgccaagatcaatcagtacaatctcaaaacttttgaaatgagccaccaatcacaatctgaacttaagctgagtaacttgtagcaagacagcagctgctatgcacactggagtccaccataccaaagcacgaaccagactgtttcttggggtcagccctaaaccgagatttcagtctaccttaccaat

SEQ ID NO: 63730 - DNA, 437 bp, Homo Sapiens
ttttgttatcttttttaatgtccaaaagtgggggaaagtgctatttcctattttcaccaaaattggggaaggagtgccactttccagctccacttcaaattccttaaaatataactgagattgctgtggggaggggggagggcagaggctgcggtttgactttttaatttttcttttgttatttgtatttgctagtctctgatttcctcaaaacgaagtggaatttactactgttgtcagtatcggtgttttgaattggtgcctgcctatagagatatattcacagttcaaaagtcaggtgctgagagatggtttaaagacaaattcatgaaggtatattttgtgttatagttgttgatgggttctttggttttctgtatttttccccctctctttaaaacatcactgaaatttcaataaatttttattgaaatgtc

SEQ ID NO: 63731 - DNA, 567 bp, Homo Sapiens
gcggccgctccaacatcctgctgctggctttggagcagctgtatgctctgggagccctcaaccaccttggggagctcaccacgtctggtcgaaagatggcagagctgccggtggaccccatgctgtccaaaatgatcttagcctctgagaagtacagctgttcagaggagatcctgacagtggctgccatgctctctgtcaacaactccatcttctaccgaccaaaggacaaggtcgtccatgctgacaatgcccgtgtcaacttctttctccctggcggtgaccacctggttctgctaaatgtttacacacagtgggctgagagtggttactcttcccagtggtgctatgagaactttgtacagttcagatcgatgcgccgagcccgggatgtgcgggaacagctggaagggctcttggaacgtgtggaagttggtctcagttcctgccagggggactatatccgtgtacgcaaggccatcactgctggttacttttaccacacggcacggttgactcggagtggctaccgcacagtgaaacagcagcagacagtcttcattcatc

SEQ ID NO: 63732 - DNA, 738 bp, Homo Sapiens
aatctaaatcacactattttcgagatcatgtataaacagaaacaaaaagaagtcatgctgtgtggccaattataatttttttcaaagactttgtcacaaaactgtctatattagacattttggagggaccaggaaatgtaagacaccaaatcctccatctcttcagtgtgcctgatgtcacctcatgatttgctgttacttttataactcctgcgccaaggacagtgggttatgtgtccacatttgtgctttgcgagccgagcccaggcatctgttcgcttgccaacggctgaccagagaaggtgcttcaggagctctgccttagacgacgtgttacacgtatgaacacacagcagaggcaccctcgtatgttttgaaagttgccttctgaaagggcacagttttaaggaaaagaaaaagaatgtaaaactatactgacccgttttcagttttaaagggtcgtgagaaactggctggtccaatgggatttacagcaacattttccattgctgacgtgaggtagcagctctcttctgtcagctgaatgttacggactggggaaaaagaatgcctttaagtttgctcttaatcgtatggaagcttgagctatgtgttggaagtgccctggttttaatccatacacaaagacggtacataatcctacaggtttaactgtacatcaaaatatagtctggaatactctgctctactgtttacattgcagattgctatcatttc

SEQ ID NO: 63733 - DNA, 836 bp, Homo Sapiens
agcgatccccgcaccactgcaatccccccatcttgctgttactttgcctttttcttcctataagggggacaacagtgctgtccctgactactgcaaaaccagggagaccaggaggttccttcccctgcccgcttcctggattcagagttaatttccctgaagtctcctggtggtagaggggagggggctcattttatgtcagcaggtacgaagggaagggttggagtgctgagaactgccccccacttgctgttctttttattgcagtggagttcacagggcccccacagaagcccccgaggctgggcgcacagtccatccagcccacagttaacttggaccggaccgatgacctggtgtacctcaatgtcatggagctggtgcgggccgtgctggagctcaagaatgagctctgtcagctgccccccgagggctacgtggtggtggtgaagaatgtggggctgaccctgcggaagctcatcgggagcgtggatgatctcctgccttccttgccgtcatcttcacggacagagatcgagggcacccagaaactgctcaacaaagacctggcagagctcatcaacaagatgcggctggcgcagcagaacgccgtgacctccctgagtgaggagtgcaagaggcagatgctgacggcttcacacaccctggctgtggacgccaagaacctgctcgacgctgtggaccaggccaaggttctggccaatctggcccacccacctgcagagtgacggagggtgggggccacccccctgcgtcttccgcccctgcctgccaagtacctcccctgccttgcagtggtgcctggggatcgtcta

SEQ ID NO: 63734 - DNA, 498 bp, Homo Sapiens
tggtctccggcgatggacgccccaaaagcaggatacgcctttgagtaccttattgaaacattaaatgacagttcacataagaagttcttcgatgtatctaaacttggcaccaagtatgatgttctgccttactcaatacgggtcttgttggaagctgctgtacgaaattgtgatggctttttaatgaagaaggaagatgttatgaacattttagactggaaaaccaaacaaagcaatgttgaagtgccctttttccctgcccgtgttcttcttcaagattttactggaataccagcaatggtggattttgctgctatgagggaggcagtgaaaactcttggaggtgatcctgagaaagtccatcctgcttgtccgacagatcttacagttgaccattctttacaaattgacttcagtaaatgtgcaatacagaatgcaccaaattctggaggtggtgacctgcagaaagcaggaaagctctcttcacttaaagtgcag

SEQ ID NO: 63735 - DNA, 658 bp, Homo Sapiens
cttgacaattgtttgatcttaaaattgtgtcttggtaacaaaagatttggacaggcatatctttagctttcaagttaattgattgcaatatttttttcttcaggattttagctgctgaacaactttcagtttggagctaaaagagacctgtctcatggtctgcccttccctggggcaatagctagggtctttcctgatttttatggaattttaggggatattttgaacttgggttctcagtagtgaattgagacttggaggtgacttttcatgtttggagtatcatctctgtctgggatctgggctgaccaagtttaaacctagagtagtgcttatgctgaaatgatacttttcattttttgcttgataattttgccttcccttcgattttaaactgaagcattttaatgtgggtagaaactctacaccaaatacactaaacattttggtgcttagtggatttctttttaggtaactggtacttacttccaaagactgaatacaagccacactccatctatatcccttaaacttcatgaaaaaccattcaagatccccttgctgcaacactgttctcttcttctctactaaattctatttcccaaattggtaatagagccagaaggatccccgtacccatccccgatcctctagagca

SEQ ID NO: 63736 - DNA, 456 bp, Homo Sapiens
cagtccacggtggcagtggtggtcctggcgcggctgcaatggtcgtccaccgagttggcctacttctcgctcagcgcctgccctgataaggggattgtgctctgtggggatgaggagggcaacgtgtggctctacgacgtcagcaacatcctgaagcagccacccctgctgccggcagccctgcaggcccccacacagatcctgaagtggccccagccctgggcccttggccaggtggtgaccaagaccatggtgaacacagtggtggccaatgcctccttcacctacctcaccgccctgacggactccaacatcgtagccatctgggggaggatgtagcctcacaccatcgcaaaggaccagggacacagctaactaacttattcagctttgggccgatgggggtgcgggggggtctttcagtgaatatttttattaaactctactgtggacaag

SEQ ID NO: 63737 - DNA, 658 bp, Homo Sapiens
aaacgtgccaccagtcactccacggagaatgtgaatggagacacacagacaacagttgagaaagatggtttgtcaacagtgaccctggttggaatcatagttggggtcttactcaccatcggcttcattggtggaatcatcgttgtggttatgcgaaaaatgtcgggaaggtactcgccctaaagagctgaagggttacgccctgctgccaacgtgcttaaaaaaagaccgtttctgactctgtgccctgtccctgagctcgtgggagaagatgacccgtggaacacttgcctggcccactcagaatccacggtgacctctccgcttgccaaaataaccgaaggaaagaccgttcaccagacttggctcctctaaacatttgctgttcaaacatgtttttgaatatacattctataacagattatttgaaagacaaaattcatagaaaatggagcaaaactgtataaactgatttgtaactaacactggaccattggatcgatattatatgctgtaaccatgtgtctccgtctgaccattcttgttattgttaaaatgcagaggaatctggaaatatttatatccacggagtccttggatccagtgctacgtcagtaaatagcaccagcattttgcaattgctgatctgctgaaatgt

SEQ ID NO: 63738 - DNA, 473 bp, Homo Sapiens
attctgtgtattgaaaaaaattttctgttaccaaattttacaacttctaataagactactataactttatgtaaactgatgaagatgtgctgattaacatattctgtgatatggtttacaacttttaatcataattgtccatgattttggaatgctgttatttatcagtaaatgtaaaatatttgaggcatttagccatacacacactagaactttttaaaactttgtcctatagtgtaattataaactgatgactattatcttcatacattgagtcttcatgcatcaatgaaatgaaaaatataggattatttatttactttttgtaactaagtgggaaataagaaaaaaagttagaaagtacttaaggggaaaatcgttcttactaagtcatgtattttcaacttgtcttccctggtatatcataaataccgacatattacataccccatgtaaaattttgcttaaactct

SEQ ID NO: 63739 - DNA, 758 bp, Homo Sapiens
agctgggtaagccttacctttagactactctgtgactacagaaataaagccagcacttttggaactaataagccttcgcttgtcagtatcataaagagtattgcccaactgaactttgctcccactggtttaatagttacttatttctgcctaagcgctcaccttccgattttacccaagtatatatataggatagaaaaaaatgcattatatttgagagctacttcgcccaaattacaaaatgagtgtttttagattcaagtgacagtaaaaggatcttgttcccttcagtgacttgagtgttttagttatgcataagtatttctagcaaaggaagggtagaaaggaattgaaaattaatttacactagttgctacttgggaataaagggctttttgaggggggtatggatattaaatgttttcgttatatacttatccctattaaaacaggcagttgtttctttgaatatgcctaaatcacagtattcttaaaatctgacagacaagtaacatgtcaattacttgatattccttgtctccagtatcacaggccactcttgacatcccatgtttgcctggataaagttcctcatttcaaacagtatacatacttctttgcagttcattatagtaaggcttaacctgtaaacagtatctgatggcccacctataaataaaattcagcattctatttttaataatttgtatgccaccaatttgtattatttgtctcaataaatacttagtcatcaatgc

SEQ ID NO: 63740 - DNA, 243 bp, Homo Sapiens
ccccaagacgacagcactagtaatcccacttaataagagcttatttaattggatgtcagcctcttaactgctaagacactttgatgggtctcagcgtattttcataaaacgaacttttgtatttaatactcagtttgctttgagacttttcagcatatgatcttttttccatagacttgtacagtgcatacgacattttgaataccatgatcgatgagtatccatgctgcgagaaagtacggt

SEQ ID NO: 63741 - DNA, 379 bp, Homo Sapiens
ggagctcggtaccaagcttttaccgcctgatgacaacagttttttctttgtctcctggaacaaaagcaaactatacccgtctgtgggctaacagtacttcttcctgggattcagttattcaaaacaagacaggcagaaaccaaaatgaaaacattaacacaaaccctataactcctgaagtagattataaaggtaattctacaaacatgcctgaaacatctcacatcgtagctttaacttctaaatctgaacaggagctttatataccttctgtcgtcagcaacagtccttcaacagtacagagcattgaaaacacaagcaaaagtcatggtgaaattttcaaaaaggatgtctgtgcggtaaaacttgggccggctag

SEQ ID NO: 63742 - DNA, 489 bp, Homo Sapiens
caccatggcctaggtctgggctggctgcaggccctgcctcatggcctctgagccctccactgccccagggccttgggccctctgcagatctcatccaggatttattggtgtccagtggggtgagggaggcctgtctgaaggccgagcctccctgcctgcacccaagttagaaatgggggtaccagcacttagcttctctctgagtgctggctcccaaggaagggacctgggacctgggccacagtgggggcttgcccttacctcttcagaaggaagcatcttccacagcccccacccaactttcttaggagtgatctggtggccagaacaggattttgcacggccccttttatcctgcgcatgtggcctagggtcatccccagcccatccctgtgtcagccctgagtgctggacactgcgttccagaaatgaggaagaggagagagaagagatggacagacctcagatccattaaagtgttctcacttc

SEQ ID NO: 63743 - DNA, 593 bp, Homo Sapiens
cggtacccaagcttttaccgcacacacacacagacataaaataaccaaacatctcatttctaggaaagagataacactaaaggcatcataggtttaactgaaatacgttatatgaagttttacaaaaaggtcaacagaaagctcatttgtgaaaacatactctcatgggagcttctttaacattagttcagaggttaatatatttcctggaggtgttttcctagaattgattgcactattgcatggtaataacatttaattgttaaggaaacattatatataggttcaaattatcccttaatgttgatttctccccttttccatggattttgatactaagaaacaaaatgctttgagattttggtaactattttgattttgataaaacatgttaaaatagaaggacatgatatttttctatagtttccatcaggaagagtacatcagaaacttctccataaggaaagaaaactgactctctcttgaactagtgttgataaaatacactaatgtctttcttaattttattttattaggagaaaaatcagaatattaaatttgcaaacttttgaacagcggtaaaagcttgggta

SEQ ID NO: 63744 - DNA, 378 bp, Homo Sapiens
cccaatcttttaccgcacagtaacaccaactcgaaagagaccttatgaatgcaaggtgtgcgggaaagcctttaattctcccaatttatttcaaatccatcaaagaactcacactggaaagaggtcctataaatgtagggaaatagtgagagccttcacagtttccagtttctttcgaaaacatggaaaaatgcatactggagaaaaacgctatgaatgtaaatactgtggaaaacctatcgattatcccagtttatttcaaattcatgttagaactcacactggagaaaaaccttacaaatgtaaacaatgcggtaaaagctaggccgtgagcgcggtgtctcactgatttgcctatccgcggggttaccgagctcg

SEQ ID NO: 63745 - DNA, 681 bp, Homo Sapiens
cttattacgccgctgttagcaagcccccgcaaggatgagctgtgtctctcctccccacttctgagggtgccgatgagccccagcggctgcagtttccactgcccacagcccagcgctcgctggagcctgggactcctcggtgggccaactatgtcaagggagtgattcagtactacccagctgcccccctccctggcttcagtgcagtggtggtcagctcagtgcccctgggggggtggcctgtccagctcagcatccttggaagtggccacgtacaccttcctccagcagctctgtccagactcgggcacaatagctgcccgcgcccaggtgtgtcagcaggccgagcacagcttcgcagggatgccctgtggcatcatggaccagttcatctcacttatgggacagaaaggccacgcgctgctcattgactgcaggtccttggagaccagcctggtgccactctcggaccccaagctggccgtgctcatcaccaactctaatgtccgccactccctggcctccagcgagtaccctgtgcggcggcgccaatgtgaagaagtggcccgggcgctgggcaaggaaagcctccgggaggtacaactggaagagctagaggctgccagggacctggtgagcaaagagggcttccggcgggcccggcacgtgatagggggagat

SEQ ID NO: 63746 - DNA, 473 bp, Homo Sapiens
tttgaggtgggtgttatttattactctcattttacaaatgaggaaacagagtaagaggagggcgggaatcacatgatccaggttggtctgactctagaggccaggctgtgtatccagttccctatatgggtaaatgaatgcaaacatgaatgggcatgaatgaatgaatctatatgggaatgtccctacccatggactggttggtttcttttgcaggagtgcaatcccagacacagatggcccaagtgcaagggctggaggccagacagacccagaacaggaggaagggcctttggatcctgaagaggacctctctgtgaagcaactgctagaagaagagctgtcaagtctgctggaccccagcacaggtagggaccccctggagttaccttgaccctgcttctgccccatggtgtccaagcttcagagttctgctccaatccactgcagggaaaagccattctgtttcttag

SEQ ID NO: 63747 - DNA, 541 bp, Homo Sapiens
  misc_feature (233)..(302): n is a, c, g, or t
actttctgacgcagatgaacaattaaggggaaaagcttcccttttccctctgtggcagttacgattttgacttcagtcctgagaaaaacttcaggttttgaaaatcagatgatgtcttctccttttccaaacaccacacgttgaaagcatttataaatccaagtctgaaactctgcgctctagtactgctgttaagatacacaacttgtttcttagttcatataatctcgggnnnnnnnnnnnnnnnnnnnnnnnnnnnnnnnnnnnnnnnnnnnnnnnnnnnnnnnnnnnnnnnnnnnnnnctgatgccagatttttttcataaatattctgcctactgtaaatatgggttcctctgagttgttttagaaaattagcgcaatgtattaaaatcaagtgttaggaaatttcatggtcttacctacaataacttttattttggaattgaactattattaaattgtatctaatcctggattacagtttaattaattattcttagtgcttaaggcttcataaagtaatttttccaaccttaaaa

SEQ ID NO: 63748 - DNA, 422 bp, Homo Sapiens
tgccacaaacaagtgcacactgtcctggtgtcctgcactgcatcctgcctccttgctgaggggcccctgtgagaggcctctggatgggcatgggaagatgggctccctggcccccagcccatgcctccctgggatgaagagtccccctcctggcagaatgtctgggctttgcagagcaggccccgggggtgaagtcgcagcttcacttacaccagctgctctgtgagcaaggcttggtgccctggacaaggcccttcccctttagggaggtccagcctcgcaagctgaaacctcccctcggctcagccctataccaggcggccacagcaggactggccacacccacgccgcacctcatccgtgcacgcgtcggagcacggccagccttccgccacgagccagctgggaagggccgcggccgc

SEQ ID NO: 63749 - DNA, 472 bp, Homo Sapiens
caaggaggtgaaggacaagctcctacaaggcaggcagtattgggtgcaggcttacctatttctactccatgtaccaccataaacaaagtttgtgcttcaggaatgaaagccatcatgatggcctctcaaagtcttatgtgtggacatcaggatgtgatggtggcaggtgggatggagagcatgtccaatgttccatatgtaatgaacagaggatcaacaccatatggtggggtaaagcttgaagatttgattgtaaaagacgggctaactgatgtctacaataaaattcatatgggcagctgtgctgagaatacagcaaagaagctgaatattgcacgaaatgaacaggacgcttatgctattaattcttataccagaagtaaagcagcatgggaagctgggaaatttggaaatgaagttattcctgtcacagttacagtaaaaggtcaactagatgtagcggtaaaagctt

SEQ ID NO: 63750 - DNA, 671 bp, Homo Sapiens
gtcgtggtgcggcgcgcatgcggagatggccgctgcatccggagcgagctcccacagctcgccagctgacatgaagacagcaaccagttccacgccacctgccctcgacaccttcccggcccatctcttacctcaatgccatctcctggcgcatcatccacctggtgcaccgcttcaacgcccaccacggggaccccaaggtggcgtacacctttgacgcgggccccaatgccgtgatcttcaccctggacgacactgtggctgagtttgtggctgctgtgtggcacggctttcccccaggctcgaatggagacacgtttctgaaggggctgcaggtgaggccggcccctctctcagctgagcttcaggctgcgctggccatggagccgacccccggtggggtcaaatacatcattgtcactcaggtggggccagggcctcaaatcctggatgacccctgcgcccacctcctgggtcctgacggcctgccgaagccagctgcctgactgcctcagcagggaccgcatgccgcttggagaaggggtggcctcgccggagctagggagcggatgtggtgggctggccggactcctgggacatgtgggtggtggcttgaccccgggcccatgggcagcttgctgtggggcagtgcagggagtcctgcggccgct

SEQ ID NO: 63751 - DNA, 464 bp, Homo Sapiens
  misc_feature (125)..(138): n is a, c, g, or t
cctggccagcctgttctgtaggttaagtccattgatcatgtactgggatatcacagcaacattggaaatgctaaaaagtttttaaacactctcaatttctaattcaccatgtcacagactggtgnnnnnnnnnnnnnnggtgttcactgaccagcacaagtctgcagatcatctttgagtagcactgttttggggccctcggtctctctgaagaccctagcagaactgatacctacctgtatctcttgttctctcctatttgagtttcacttccagagaacttgttcttcagcaagaatgtgtcactagtaaggacatctctagcatttctctagccttccttttctgctgctcaaaaataatcgttacaaagcttaggtttaagctgtatatgaaatatttatgcgactctcaaactttaaaggagttgctcctttgttccaaaattaaatgtgttagataaa

SEQ ID NO: 63752 - DNA, 1117 bp, Homo Sapiens
  misc_feature (1001)..(1019): n is a, c, g, or t
accatcccacttcctttccccctgccgataaaccgcgctggtaccggtccggaattcccgggatggcggaagtggaggccggagcctgggacaccgccggcggggagagaagcggatcccgtccgagccccggccccaagtaacgccgccgccccggagccgccttggaggtccccctccccactaagtgcctctttgcatagcaccagtccccacccgcacgctctctggaccactacagctggacgggcaatggcgggtcggggaggcgcagcacgacccaatggaccagctgctgggaacaagatctgtcaatttaagctggttctgctgggggagtctgcggtaggcaaatccagcctcgtcctccgctttgtcaagggacagtttcacgagtaccaggagagcacaattggagcggccttcctcacacagactgtctgcctggatgacacaacagtcaagtttgagatctgggacacagctggacaggagcggtatcacagcctggcccccatgtactatcggggggcccaggctgccatcgtggtctatgacatcaccaacacagatacatttgcacgggccaagaactgggtgaaggagctacagaggcaggccagccccaacatcgtcattgcactcgcgggtaacaaggcagacctggccagcaagagagccgtggaattccaggaagcacaagcctatgcagacgacaacagtttgctgttcatggagacatcagcaaagactgcaatgaacgtgaacgaaatcttcatggcaatagctaagaagcttcccaagaacgagccccagaatgcaactggtgctccaggccgaaaccgaggtgtggacctccaggagaacaacccagccagccggagccagtgctgcagcaactgagccccccttgcctgcccgctgcccccgcctcctccgcctgaatgacccgactggaatccactctaaccaatcgcacttaacgactcgggccaccactnnnnnnnnnnnnnnnnnnntccaccatgatttctccatataattttgatcgtaggccggagtgagtcattccacctgcacctttctgtacaaatactaattcaattttaagtcttaa

SEQ ID NO: 63753 - DNA, 565 bp, Homo Sapiens
  misc_feature (97)..(150): n is a, c, g, or t
acgcgcctcacatgtctctctgaggaggagggcgagcaggaccgacctcgggcacccgggccctgggaccccctcgcgtccgcagcaggattgaaannnnnnnnnnnnnnnnnnnnnnnnnnnnnnnnnnnnnnnnnnnnnnnnnnnnnntcgaccaaaggcaatcactagaccggacttgaggcacgcggtgcacccccagacgctggcgctccaccgtgctcggcatgcggtcgtgcacacgcgctaggtagcagcgtcggtcaggactgtctcgaggccacactcgctcggcaggattattcgatcacggatcagtcagagcagggtcaggagacggggctgacggcacgggtggcggggacagacgtttgggacttggccgcgactctctgcttctctccagctctcaatctgctgcattttcctctagtgcttccggatcctcttcattcttttcggcatactcaaccactccgcatgctgctggaatatttctggctttagaagtacaggaggcgcagatggctaactgagtaacattcatgcaatgagcactcagtgg

SEQ ID NO: 63754 - DNA, 472 bp, Homo Sapiens
tcaggtaattttgttgttactcacttaagactggaattagaatgtttctggtatttctcatttttttccctggctatgatagaatctcatctaatcttgacatctctcctaggggaagaatatcacaggctaatagcgtggttgggggtgaagatgatagcagttattaaatcaggaatctcttttatgtgtgtccttgttacattgaggttaagagacaaaatcattggcagtgcaatctctttccaggatttcgtttgctgtggcattggttatatcagagcactttaatctgaaggatgatactgtaacttgatttatctaattagcttttaattatctacagctattttattttatttaattctctcctacagtactgggaccactgtaaacttctcagatgacttgtatttttgtagtgctatgaaatttatttacatacttataaagaaaactgtatgttcacttg

SEQ ID NO: 63755 - DNA, 420 bp, Homo Sapiens
  misc_feature (255)..(255): n is a, c, g, or t
  misc_feature (341)..(341): n is a, c, g, or t
  misc_feature (381)..(381): n is a, c, g, or t
  misc_feature (393)..(393): n is a, c, g, or t
  misc_feature (401)..(401): n is a, c, g, or t
gacccaataccagagtcagtaattcagaactataacaaagcactacagcagctggagaaatataaaccctatgaagaagcactgttgcaggcagaggcaccaaggctggcagaatatcaagcatatatcgattttgagatgaaaattggcgatcctgctcgcattcagttgatctttgagcgcgcctggtcgagaactgccttgtcccagacttatggatccgttacagtcagtacctagatcgacaacttgaanagtaaaggatttgggttttatctgtacataaaccgcgcctattagaaacttgccccctggacagttggccttaatggagtcggtanctcttgggccatggagaagaccttggaagttgatcatcangtaatttctgtnaccttcgngaaagctttgaaatgccgg

SEQ ID NO: 63756 - DNA, 1034 bp, Homo Sapiens
gctcctccgtgatctacttcctggaacctgctgctgctgtggccccgagtcctggctgtggccctgttctcagccctcttccccagctatgtggccctgcacttcctgggcctgtggctggtactgctgctctgggtctggcttcagggcacagacttcatgccggaccccagctccgagtggctgtaccgggtgacggtggccaccatcctctatttctcctggttcaacgtggctgagggccgcacccgaggccgggccatcatccacttcgccttcctcctgagtgacagcattctcctggtggccacctgggtgactcatagctcctggctgcccagcgggattccactgcagctgtggctgcctgtgggatgcggctgcttctttctgggcctggctctgcggcttgtgtactaccactggctgcaccctagctgctgctggaagcccgaccctgaccaggtagacggggcccggagtctgctttctccagaggggtatcagctgcctcagaacaggcgcatgacccatttagcacagaagtttttccccaaggctaaggatgaggctgcttcgccagtgaagggataggtgaacggcgtcctttgaagcaggatcagacccagccagcagagatggagagtgactctgttggcagaaggcaggcgaggataagctaacgatgctgctgtggcctctatgcactcagcaagagcgggacgcctgtgctgggccgggcaccaggatggtgctgagtcgggcagaggcctcctttcaaggagttcacagtgaacaagatgagaagggctgggccctggagggtcaagagccccaattatgtacaagacacttgggaggaaagaagactaccttttccccctgccattggtatagctggttgccccaaaacttccacctccctccctggcacctctaaaatgactggtataggtgctgcccacccttagctcccctatcctgggctaggaggccacaggggctgtcctctagaattcttcccttccctcccc

SEQ ID NO: 63757 - DNA, 370 bp, Homo Sapiens
agtgaccttgagggctaaagattgttcttctgggtaagagctcttgggctggtttttcagagcagagttcttgttgtgggtagactgtgactaggttcacagcctttgtggaacattccgtataacggcattgtggaagcaataactagttcctatgaaagaaccagagctgggaagatggctgggaagccaggccaaagtgggggcaacagcttgcttctctttctcttctcaccctcagtttgtatgggaaaatggagatgtcctctccactttatcccacgatatctaaatgaaaaagaaagaaaacccacacacaaagcaaaaactcaagtattaagagcacatatttttgacccagtggaggctt

SEQ ID NO: 63758 - DNA, 470 bp, Homo Sapiens
  misc_feature (221)..(221): n is a, c, g, or t
gcgcacacacatgtacaagcacgcgcagcaccacgaccgcgtggacaacctggtgctggacgacttcaagcgcttcaaggcctcactcagctgccacttcgccgactgccctttctcgggcaccagcacgcacttccactgttctgcgctgacttccgctgcaccgacagcattaaggtcacggcgcatcgcaagcaccacggcaaacaggacgtgatcangcgccgcgggcttctgccagttcagctccagggccgactgcgccgtgcccgactgcaagtacaagctcaagtgctcgcacttccactgcaccttgcgcggtgccgccacacggtggtgggcatgtcgcagatggactcgcacaagcgcaagcacgagaagcaggatggcggcgagcccgcggcagaggccccgcgcccgggcctcccatcagtctggacggctccctgtcgctgggcgcggagccgggc

SEQ ID NO: 63759 - DNA, 527 bp, Homo Sapiens
gaggaggagacggcggcggccggatctcccggccgcaagcagcagtttggcgacgaaggagagttggaagccgggagggggagccgcggcggcgtggccgtgcgcgcgccctcccccgaggagatggaggaggaggcgatcgccagcctcccgggggaagagacggaggatatggactttctgtctgggctggaactggcggatctcctggaccccaggcaaccggactggcacctggaccccgggcttagctcgccggggcctctctcctcgtctggcggaggctcggatagcggcggcctgtggagaggggacgatgacgatgaggccgcggctgctgaaatgcagcgcttctctgacctgctgcaaaggctgttaaacggtatcggaggctgcagcagcagcagtgacagtggcagcgccgaaaagaggcggagaaagtccccaggaggaggcggcggtggcggcagcggtaacgacaacaaccaggcggcgacaaagagtccccggaaggcggcggcggccgc

SEQ ID NO: 63760 - DNA, 695 bp, Homo Sapiens
  misc_feature (663)..(663): n is a, c, g, or t
tttcctaatcgtgttccggggttggaggatgcggagagctggtttggaaaaatgactcatttagttcagcgcgcccgctccggccggccctgcgcctcccgccgcgcccgggatgtattcgtccccgctctgcctcacccaggatgagttccacccgttcatcgaggccctgctgcctcacgtccgcgccttcgcctacacctggttcaacctgcaggcgcggaagcgcaagtacttcaagaagcacgagaagcggatgtcgaaggacgaggagcgtgcggtcaaggacgagctgctgggcgagaagcccgaggtcaagcagaagtgggcgtcgcggctgctggccaagctgcgcaaggacatccggcccgagtgccgcgaggacttcgtgctgagcatcaccggcaagaaggcgccgggctgcgtgctctccaaccccgaccagaagggcaagatgcggcgcatcgactgtctccggcaggcggacaaggtgtggcggctggacctggtcatggtcatcctgttcaagggcatcccgctggagagcaccgacggcgagcgctggtcaaggctgcgcagtgcggtcacccggtcctgttgcgttgaagccgcaacacatttggcgttgccgtcaaaggaacttggacctctaacttggcctantttcgtgccttacgaagaattcaaaacaaaag

SEQ ID NO: 63761 - DNA, 411 bp, Homo Sapiens
atgattgaaaccacgcaccattacatcatcattacattaattacatcaacataaattatttcttcccccttcccttttccagcactcaaccaaggagcaaagctcatcccaccccacacccctcccaggtctgctcactgccaggctcctctcccctttgttcagtggagctggcttttctcccagcccctttccatgcctttcactccatttggcaagctctgagggggagcctggggacgggtttgggtccccaggaggagagccttgggtataatctatttttctaggagcctcttgccttgtcacttgcagtttcgccctctgctttgatggctgaggtgaactcatgttctttgggaaaagggaaggcgtgctgtggaaataaaatgtttatttgcttctcttaaa

SEQ ID NO: 63762 - DNA, 367 bp, Homo Sapiens
aggggcatttttacaaaaagccccctcccgtcccctccccttggatattaggggtaacgaccgcttgtctttggtctctaaccctaatctctgggcttgccctttgcctcctgcagaactttgaaaagctgggttgagtgaggctatcagcacagccttccttggggactctgaaggtgtccccacgaaggccagaaagggggaaagggacctgggcgaggagaggatttgtggtgcttggaagagccggccttgggtgggccctccaccgcctctaccctcactgggtgggactgccagacggagagtccgcgggaggtggcttgggtgtgcgacgtcacggaagaataaagacgtttactactgg

SEQ ID NO: 63763 - DNA, 566 bp, Homo Sapiens
atccattccagcgtaacggatggtctttaacacgtgctgaggctttcaaagatgtgtcagaagccattgtatttctgcaacagatgcaggagtttagagagaaaatcacagtaatcaaggaaactccttgacctccctctaatttggctgcaagccctttaatgaagaactttgataccagtcagtgggaaggacataaaacttagtcggatgtggataaactttctttgcctcaagacactggcacattcattagcaagattccctggagcttttataagttatttttgctaatccttctgcttggccttgtcattgtctttggtcctaccatgttcctagaatggtcattatttgatgacctggcaacttggaaaggctgtctttcaaacttcagttcctatctgactaaaacagccgatttcatagaacaatcagttttttactgggaacaggtgacagatgggtttttcattttcaatgaaagattcaagaattttactttggtggtactgaacaatgtggcagaatttgtgtgcaaatataaactattataaaatctgtaa

SEQ ID NO: 63764 - DNA, 1393 bp, Homo Sapiens
  misc_feature (750)..(797): n is a, c, g, or t
  misc_feature (846)..(863): n is a, c, g, or t
  misc_feature (1120)..(1129): n is a, c, g, or t
atgagcaccacaactggcctgaaattcttaaaggatgggagtgtcgatgacagcaccttggcatcgttgtgcctaacctgggagacggaagaagcacgccatgggaagtgtttacacttggggacaagtgctaagtattgtggagcccatagccccttgagatagatggctactttgcctttcttcttgaactgtcttgcagaatgtggatttggggtaagtggtcttgaaggattcatttagtcaccctcaaattaagatttttacttcatctttcttgggcctgcacctccaagataacaaagaagaagcaatggtcgtgccaaagaggtccacaaccaggtgtgcactggtcactgcagcccatttgctgtatgaactgtggttgttgtgtgcccaatgacaaggctactaagaaattcatcatttgaaacgtagaggccgcagcagtcagcgatgtttctgaaatgagcatccttgacgcctgtgtacttcccaggctggatgtgaagctaccttaccatgtgagttgtgccattcacagcacagtggtgaggaattgagctcatgaagcaggcaaggaccgaacacctccaccccaacgtatacctgcaggtgctgccccatgacctccaccaaagcccatataaggagcggcaccgttaaggactgaagaaacaacttctccggagaaaaacaaaattgcaattctactcaaaaacgacaccccccttctaggcgaactcaacnnnnnnnnnnnnnnnnnnnnnnnnnnnnnnnnnnnnnnnnnnnnnnnnaccgcctacccgtatagtggaacaaaaccaaccaatcgcgcttgtgctnnnnnnnnnnnnnnnnnnaaaaattcttttcttaaccccttttgtctggggggccggccggccccccgggcgcggtaatttacacccttgcggtaccaaccccttgtgtttccctaacgacaaaacccttctgcccccgcgagaacaagggggcccctggtgtccccctctcccccttgtaaaataaacaactcgcccgcgcgttgtggttaccccccgcagtttcttctttttacaccccatctttctacacacgcctattcctctttaggggnnnnnnnnnngcggggccccccttcccgcacgggggcgggcccgcagaaccgggaggccccgcggacccgtcaaaaattacaaccgcccccggccgctggtgtcccacaccagcgaagatttatgctttgtgcgccccgtctcttcataacattttctcgctcgcacacatatctgtggaaccattctctccccacccaccggggggtttggcgcagaatcaccccccacgatttccgccccgcggtcgatcaccaccccacacttctctcgcc

SEQ ID NO: 63765 - DNA, 535 bp, Homo Sapiens
ttttaatcagttgcctctttttaaaagaaatttttatgggaaacacattcaactatcattaaaaaaaatgaagttaagctgttgggaccatttctttaagatttaaccaaagttcagccttttaggtagttgaagggaagtacactccgtattcagcacatgttgagttttctacaccaggcattttcaatatgtatattgatgtaaacaagctcaattcaaactggacagttttaagataatgttaaaatcagcacttttagagacaacgaaggccaagaatcagtacagtagtattccaaaatgattttctctagaaatttgaaagtagatcgcacagaatgttgtcaaccgcctaccagtacaatcttttgtggaagatactttgaaatcactttctactttgttagtaaagttctgtctttccagagctgcaagttttaaagtgttacttatacagaccaaccaagaatagtgctgaattaagtggcatttagtatctagaagccattttgatccaacaaatatcagcaga

SEQ ID NO: 63766 - DNA, 1326 bp, Homo Sapiens
tcagtaactataacggttctttggtagcgaggacctgggtggcgaattcggcacgagggagtgccatccacctgcccaagaaaatgcaggaggtggtgaaagactggtagccaggatgccgaccactagccagtggagatgctgagcccggccatgagaggcgagacctgcccatccagtggtcaaatgccatgtgagtgccctggcgagcgggagggcaccgccatgggtgccctggtcgtacactcgcatgtcacagggccagtggctaatacagacgaggcaatggcgcctagactgacgaaacgagagctctgaagacaaaagcatgctccctggacattgacgagggacctgttgacatcagccatcaatggacttgtcaaggtccaatgctgaaatgctcacagaagcagtgtgcagtggatgcccagtggctgcgtgcaggaagaacggtcaggttcatgccacagcccaagacgcacttcttggagcagctgggcgggcctccggagagactggaaagacaggggcccgccagtgctgaacgagctgcctctcctaagtccaagagacgacagtggcgaggtgtcctgtggaagaaaccccccagtgtctttggcatagcacggcagagaggatgaggcaggagggtgccgcgagccaggacgcggccctggccttccgggtgaggagacccgcctccgcctctgcctccgaagggaatccattccccagggagtcccagggcccagctcccagccccggctccctgtctgatgacagcagttcagtggacagcaacgacagcatcgaactggagattaggaagtttttggcggaaaaggccaaggagtcagtgagcagttcagaagttcaggcagagggccccaccgctcttgggacagggggcccagccaggccagaggtgctgtgcaggaaggagccggccccaccgcctggcgtgtgcacacgcagccagagggccagggggtcccacatctggccgaagggcttcgaggcacagagagcgcaggagcacagggcacagctggtctgttcagccaggcgggaaggggctccctgctgctcctgcccgaggggatccggtgccgcccaggagcaccagcggcggtgtctccgccaaggggctctcaagtgagcaggagaaatgtttacgttcaccaatgaccagagcccacgagggggctgggcctgctgccaaaaagtgcttttggtcgctgccagtgtgcacagcgggcccgggcggaggcgctgaggaacttttccatggctggggagcccggttctgacccccgccggacg

SEQ ID NO: 63767 - DNA, 792 bp, Homo Sapiens
acctacggctagtgtcgaggctgcgtgttaatcggccgaggagcggttgggcggcgggccgggcccggggccgcttggaatggcgcctcctccgccttcgccccaactgcttctcctggcagccctcgcgaggctcctgggtcccagcgaggtgatggctggaccggcggaggaggcgggatgcccattgtcccgagagcctgtggcctctgcctccgcaggtgtcaccaagagtgacctacacacgagtgagcccagggcaggctgaggatgtcaccttcctctaccacccctgtgcccatccctggctgaagctccagcttgccctcctggcctatgcttgtatggctaacccttccctcacccctgacttcagcctcacgcaggatcggcccctgtgtgctgactgcatgggggctggctgctggagatggcctgggtagagccagcctgggctgcccactggctgatgaggaggcggatggaggaagcagaggaagaagaaggcatggatctactgtgaaagcctttcagggcctgctccctcctgagccaactcccggtagagggaggctgtgccgaagagggtgtgtgcaggccctgagctctggcctttgctctgcggagctggcggcccctggcacagaggtgacatctcaagggcccaggcagcctctctagtggtgcaagaggcggagctggggctgccttggtcccagccatcgtcagcctgatgttcctctgtcccatgagttgagcaacagcatgcggacctgttggagatgcccctga

SEQ ID NO: 63768 - DNA, 395 bp, Homo Sapiens
tggagcaatcttttcatgtgacctccttaacagatatttactgaaggaatctaggttgtattttcagtggacaatgggaataaagcatttctaaagcaccgactggagaggaaggcaacagagacaaggagagaagccgagagacatgtctgcgtgctgccacgcatctgagcgattgctctgtgaagagttgtacactgaacattttcaggggaggctgtttacccaggcaatgtcctcaaacgagcctgtgccggggcgtcctggaatctgtgccaggactgtgttttagcccttcacctctcagctttagcaggacatgaaccagttataacaagatggccctgcagctggttacaagaatgtgacatggcagcaatcatactgctggcaag

SEQ ID NO: 63769 - DNA, 224 bp, Homo Sapiens
cttcttttgcatatagtagagtgaggtgagggtcgtggctaaaaccccacaataactttacattcctagctttacagtcttgctgtgaattctctggtgttcattaaagtgtgagctgtgttaaaaggcattcttagattcattttaaccacatttttaaaaactcacagtgggttaacatgatggtttcagatggcttgcctcttttctctttctaccttaca

SEQ ID NO: 63770 - DNA, 1055 bp, Homo Sapiens
  misc_feature (561)..(624): n is a, c, g, or t
  misc_feature (644)..(666): n is a, c, g, or t
  misc_feature (769)..(777): n is a, c, g, or t
  misc_feature (997)..(997): n is a, c, g, or t
  misc_feature (1001)..(1001): n is a, c, g, or t
gcaaggacttacgctttttgcaaagcctttgagaagttactggatcataggaagcttataacaagaatggaagattcttaaataactcactttctttggtatccagtaacagtagatgttcaaaatatgtagctgattaataccagcattgtgaacgctgtacaaccttgtggttattactaagcaagttactactagcttctgaaaagtagcttcataattaatgttatttatacactgccttccatgacttttactttgccctaagctaatctccaaaatctgaaatgctactccaatatcagaaaaaaagggggaggtggaattatatttcctgtgattttaagagtacagagaatcatgcacatctctgattagttcatatatgtctagtgtgtaataaaagtcaagatgaactctcaaaaacccaataaaacgacgtaaaatggccctggcgtgccgcattgcccctccagaagctgtcgacactcttcctcttggcttcctccccccacctctgtcgcgtccccgcctctatctccccgccttcgcgccgcccannnnnnnnnnnnnnnnnnnnnnnnnnnnnnnnnnnnnnnnnnnnnnnnnnnnnnnnnnnnnnnncgttcctactccctagctannnnnnnnnnnnnnnnnnnnnnngtattaccctaaacctgttccgcagcggacgatagacgcccgcccctacgaacgcggcggcttcctagacccaaccactgcgcatattaaccccgccgcgccnnnnnnnnnctctcattcgccgcctttttttcgccgtcccccgttactagtatttccccctgttccccccgcccctctctctcgcattcgccttttcccgtgattcctattactcccctatgttcgccgcccgctaacacctccctgtgtgacgctacgcctccccatattctccccaccctatttctctcccgccccgcgcccgcactctcttcatatcgccgcgccntgtnttgtctgcggatattattcgtgctgccgactcgtgacatcccaccagcggcgcc

SEQ ID NO: 63771 - DNA, 446 bp, Homo Sapiens
  misc_feature (428)..(428): n is a, c, g, or t
acagctccagttacaacagctccagtacaacagctgtggcacttaccggcaaggctacgatgtcagcgttcctgtctatagtccactgtcagctgaggtggatcttccagagaaaggaccaggtccacggcaatacttcctcctgtcatctcaggtgggtctccatcctgagtacagagaggacctagaagccctccaggtcaaacatggagagtcagtgttagtactcgataaatgcaccaacctctcagagggtgtcctttctgtccgtaagcgctgccacaagcaccaggtcttcgattacccacaggtgcttcaggaggctactttctgtgtggttcttcgtggagctcggctgtgccaggcagtattgagcgatgtgttacaagctggcttgtgtcccgggtgtcattgcagactcctatatnttgcctttctctgaagtt

SEQ ID NO: 63772 - DNA, 985 bp, Homo Sapiens
ttttctctctttcctccgcatcctgttccatctcttccttgtgactcctcaaccctcaaatcatcagactgctttttgcggtctggtcctagaccattgccctgtgatgcatcgacctccgactgtcgtttttgacgtttgtagtgccttctctgcgctcctgaaggtcgactggggcttctagatataccagtctcgctcatcatgtgccgccttcgcttagggagaagatagctccgtacttctactgatctgccttcctctgcacgccttgacccagcagtgagaggcggccagtacctgcggtgtgcgtggtaggttttaaagtaaaagggtatgtttctctgctgagtgtttcctttgtccattgggcttgctcgagctggacagtagggtaaccactgtttttcaaggaccagcccaatttctctggcttggttcggagttcgtttcatcctctagctgtgagtgccttttggtctggaaagttggcttgtctcataatacccacagctaggacattctctctgtaattatgaattgtccttgttttacattaaaagagaatgtctttgatcactagagtctgtcggtgttggattatttccactgtgagattcttcaaacttttttgcttcataataataaaacaactcatgtgtagagaccctttcaacatgaaaggtttgtagttgagacattacatatattttattgtttataataaaaatcatctatacaaaagacgtcctgggtgttcactattttgcacaagatctgttttccatgatgtgttgacatctacaatttcactaagctgttgacgttattttctattcgagattctggagcctagggagctatgtgttctttttgttcatttcgttcttacttccttgaagcaagagactataatggccttccagtgcaaagacttcagaccaattctttgtatacacttggttgcctcttggaatataacttc

SEQ ID NO: 63773 - DNA, 741 bp, Homo Sapiens
accagtacgaggctgcgtgcgtcaatcggccgaggcacctcagcaccagcctcctgcaccggactttgtggagaagggggcctgaattgcagttcctgtgccctggcactaagactggcacctcctgcggcccatgcccttcgcctgcattgcccactgagtcccactcgactgtcttcagcgcggttcacactgagacccagccctctcccgctggccccgagcaggcccacctttaggagggcgtgatggaaaggcccctggagaatggggatgagtccccagactctcagggccatgccaccgactggagatttgctgtgtgcagtttcagggatgcctgggaagaggaggaacctgcttcccagatgcacgttaaggacccagggactcgggatgtccaaggccgggcagtgctgcttctgtgtgcccacagcccagcctggcttcagtctgagtgcagcagccaggaactcatccgcctcctgctgtacctgcgaagcatccccaggcccgaagtacaggcactgggactgacagtgctagttgatgcccgaatttgtgctccaagttcttccctcttctctgggtctccgctgtcccctgtatcccagcttcccagaggaagcagcactggaggctgaggcagagctgggctggcagccctctttgactgctgaggactcagagatctcgtcccattgcccatcagccagtggctccagtggctctgacagcagc

SEQ ID NO: 63774 - DNA, 832 bp, Homo Sapiens
ttacgaaccatgttcaagtcaaaactgcagctgctaccatggtgtcatagaagaggatctaactcctttccgaggaggcatctccaggaagatgatggcagaggtagtcagacggaagctagggacccactatcagatcactaagaacagactgtaccgggaaaatgactgcatgttcccctcaaggtgtagtggtgttgagcactttattttggaagtgatcgggcgtctccctgacatggagatggtgatcaatgtacgagattatcctcaggttcctaaatggatggagcctgccatcccagtcttctccttcagtaagacatcagagtaccatgatatcatgtatcctgcttggacattttgggaagggggacctgctgtttggccaatttatcctacaggtcttggacggtgggacctcttcagagaagatctggtaaggtcagcagcacagtggccatggaaaaagaaaaactctacagcatatttccgaggatcaaggacaagtccagaacgagatcctctcattcttctgtctcggaaaaacccaaaacttgttgatgcagaatacaccaaaaaccaggcctggaaatctatgaaagataccttaggaaagccagctgctaaggatgtccatcttgtggatcactgcaaatacaagtatctgtttaatttttcgaggcgtagctgcaagtttccggtttaaacacctcttcctgtgtggctcacttgttttccatgttggtgatgagtggctagaattcttctatccacagctgaagccatggttcctatatcccagtcaaacagatctctccatgtccaagag

SEQ ID NO: 63775 - DNA, 1164 bp, Homo Sapiens
  misc_feature (37)..(37): n is a, c, g, or t
ccacttgtttttctgtttgttgattgaatttaaatcnccaacgtctcgaaaacagttctctgtgattcccccttgtaaacccctggtgttgttttgtgacaatccagcgctctcaattttatttttctgcgcgctcctctctcatttttgaagcccccaatgagggggcccaagtgtgtggttttcccatattccttcctttatctctttggataggccctaaatacctttcccgaaccccattccaagagaatagcccaaattggccctggaacaggggtgatttcggtgttaacccaaaacgaatgtcccaagtgtttcctcgccccccaaccttgcaaaaaaactcgccatttgccaaccgttcccgcggtatatttaacggcccgagttcagattgcaatccccggcccctcctgggggtcttttcccaacttctttctgcctgggagttcgttaatcccttcctcctgacttccctggaagttcccttctctgcacttctgcccaagaactcaaggctggagggggccagccaggaacctggagtgcagcattacccagagatccgggaccccccacccccaaattcacgagtgcagctgaagcttgctcccccttgttcggaaggctgacgtttcacttggtgactggtgcctctgcactgacggaggactctggggttccttcttaccggctctgacctctctcttcgtgcctggtctgggactgggtcagccctgggggatcagaaggggccatctgggcccagctgtgtacagcgagggtgggcagccccctccactccactctgcttccacaaagtcggctcccgagagctcgaggctgcttctgtttatatgtgcagggcccgggcgggtgaagggtcagagagacggacacaaggagccggcaggagggcggagcgaggatgtcctttcccgggagacaagtcgggaaagcctggctggactgcctcagccccgcgcgcctcctggactcagggttccccgtcctgagctcgggagatgttcagagtcacactgccgcccggtctgccacgcagaggtccaacttgccacccgcgtccctggtacctgagaccaccgacatcctcaggttcctgaccgtggcgcccttctacccagcccagtgtgcggccgc

SEQ ID NO: 63776 - DNA, 572 bp, Homo Sapiens
ctagttttgaataggtgcaactgtgacttgggtctggttggttgttgtttgttgttttgagtcagctgattttcacttcccactgaggttgtcataacatgcaaattgcttcaattttctctgtggcccaaacttgtgggtcacaaaccctgttgagataaagctggctgttatctcaacatcttcatcagctccagactgagactcagtgtctaagtcttacaacaattcatcattttataccttcaatgggaacttaaactgttacatgtatcacattccagctacaatacttccatttattagaagcacattaaccatttctatagcatgatttcttcaagtaaaaggcaaaagatataaattttataattgacttgagtactttaagccttgtttaaaacatttcttacttaacttttgcaaattaaacccattgtagcttacctgtaatatacatagtagtttacctttaaaagttgtaaaaatattgctttaaccaacactgtaaatatttcagataaacattatattcttgtatataaactttacatcctgttttaccttaaaaa

SEQ ID NO: 63777 - DNA, 688 bp, Homo Sapiens
aaaggctgggtgttgaatcggcacgagggagcgcttgtgcgtggtgaacatgcaggagccaggcgagaggaagctgagctttttgccacgcaagttcccgagcctgcgggccgtgcctgcctacggacgcttcatccaggaacgcttcgagcgctgccttgacctgtacctgtgcccacggcagcgcaagatgagggtgaatgtagaccctgagtgacctcatccccaagctgcctcgtgcctgaggtgacctgcagcccttccccactgtgtccagtagccctgttgtctacatgtggtgccacatgtgaccttgtcctggtgcctcagtgtctctcctgtgtggtgccatgtggctggtttcaggctctgacgacggctccctgcggctctgggaggtggccactgcccgctgtgtgaggacttgttccctgtgggtgggctgtggtgaagagtgtggcctggaaccccagccccgctgtctgcctggtggctgcagcctgtggaggactcggtgctgctgctgaacccagctctgggggacctggctggtggctgggcagcacatgatcagctgttgagcgccttcgtccctgcctgaggagccccccttgcagccggcccgctggctggatggcctcagaggaggagcgccaagtgggcctgcggctgcgcatctgccacggga

SEQ ID NO: 63778 - DNA, 589 bp, Homo Sapiens
tgcagcacacagcacaccagttgatatgccaagcagaggacagaatgaagacagggacagtggcattgctcgatcagcctcactaagcagtcttttgatcacacctttcccatctccaagctcctctacatcttcttccagcagttaccagcgccgctggcttcgaagtcagacaacaagtttggaaaatggcatcatcccaagaaggtcaactgatgagacattcagcttggctgaagaaacctgtagctctaatccagctatggttaggaggaagaaaattgccataagcatcatcttttccctatgtgagaaagaagaagcacaaaggaatttccaggacttcttcttttctcattttcccctgtttgaatctcacatgaaccggctgaagagtgcaattgaaaaggctatgatctcctgtaggaaaatagcagaatcaagtctccgagtccagttttatgtcagccgtttgatggaagctctgggagaattcagaggaactatctggaacttatattctgttccaaggatagctgaacctgtatggcttactatgatatccggcaggcgaggggcatcatctaga

SEQ ID NO: 63779 - DNA, 1113 bp, Homo Sapiens
gccgcaactatttttttaagccactttttcctctctccaattttgcaacgacgggcgcggaggaggaggttcccggaagccacgcgcagctggagcagcggcgaccgcagctggaggcccggagcgcctgcggggctggcagaggcgagggaggttgcgggtaggaagggcggactgcgcgcgccccctgcgtcccgcgcacctcggggccggtccatgctcccgacggctgcgggcttcagcatctggggccaggttggggcggcggggtccagggcgcaggtggtgcggccgatgcgccgggccggaggctgaggccgcgctgcggggctgggacagcactggcatctccagagcaggcccggggcagcaagggaggcgccgcgatgccagacgaaaatatcttcctgttcgtgcccaacctcatcggttatgcccggattgtcttcgccatcatttctttctacttcatgccctgctgccccctcacggcctcctccttctacctgctcagcggcctgctggacgctttcgatggacacgctgctcgcgctcttaatcaaggaacccggtttggggccatgctggacatgctgacggaccgctgctccaccatgtgcctgttggtcaacctggccctgctgtaccctggagccacgctgttcttccaaatcagcatgagtttggatgtggccagtcactggctgcacctccacagttctgtggtccgaggcagtgagagtcacaagatgatcgacttgtccgggaatccggtgcttcggatctactacacctcgaggcctgctctgttcaccttgtgtgctgggaatgagctcttctactgcctcctctacctgttccatttctctgagggacctttagttggctctgtgggactgttccggatgggcctctgggtcactggccccatcgccttgctgaagtcgctcatcagcgtcatccacctgatcacggccgcccgcaacatggctgccctggacgcagcagaccgcgccaagaagaagtgacgctggagccccgggtcctggctgcccacctgccctgggagtcttgcttgtgccacacagatccccaacccctgctaggaggtcc

SEQ ID NO: 63780 - DNA, 794 bp, Homo Sapiens
cagtactactacggtttaaggtagcgaggctgggtggcgaattcggcacgaggcaggatgtgtcggttggtcgagtcttgtgtaatgtgcgcagaccagttaccaaactaggataatgttggtctcatttgtggtggttttgttccctatacaagtcagctaagtaaagactcttttaacgagcttccccttaacacatggcagaagtttccaggtgcaggaatgcgagctggcgggaaggggcagaggccgtgagctctcagctgggccggcctgcctgtgtcccctttcctgggtctgtcggcagactggcatcatgacgttccctggtggctgaagagctagctttggagtgttgtttttctcactctcaggcaggggccttagctggaatcctccaacctgccactgaacacgtcagtgctgtgtgctgcctcttggacacctgcccttgaaagcctcaggcccctgggagaagcactctgtccagtcctgtccccgggggggaggcagggccactgagccctcctcagatggttagtggcttccaacagccatcaggagtgtttcttgaatgccccaggtgtggaggacttggtcttgtggacccctcagaacccccagagctgaacaggaagccgtccctggagcaaacaagagggctggaggcgggactgcggccacccttcggttctccccattgttgggcgggtcgccggtgctgtttgggaaatcccttaggtcccgtggccctcttttggttgtttgggcgccccggggggccttaaccgttt

SEQ ID NO: 63781 - DNA, 1071 bp, Homo Sapiens
cgttcgtccccggacgttgctctctaccccgggaacgtcgagactggagcgcccgaactgagccaccttcgcggaccccgagagcggcggcgcgactcaccgcggaggcgcccggacgcgtcaatgtcccccagggcaaggcctgaaccaggtcgcgagggtctgtctcccgtctggggagctgaactgcccgagacactgtcgcagtcgcggggacttgtctggagcggcggggtctgagcccaagtcggaagccgccgccgccgccagcgtcccgtgcgcctgccgccccgggaccagccgcgaaacttcttctcgggacggagacagcgctcgccgcccgggccgaggcccagcccaataagaagcacctgatccacactctttctagccccagggatgctcaggaaagcagcctttctttagggctgtcatctgttctggggatctgttgctgtttcttgggcccacagaatacactccacacctcgggactccataatattggacaaggctggaaggcccatttggctcctgcagcctcttatgcaggaggacctcctgaggcttcgggcaggagctggtgcacacctggaggagagtgctggtgaatggcaggtgtgtgcctcagtgtccttgctgccagggtgtcagccctgcttcaccactggccgtttgtctctgtcccctccactggcctcttgaagcacagagaccctccgggtacttttccttcctctgggcttcccactcatgctattccctgctccctttttctacctggagaccccccattcctcgtcctcctctgctgccctcacctccacctgggccctcccagctcccgggagatggctgaaccccactccccacccgctagtcatcctcttcagcggtcctcccagagctgtcctcagcatggcagcctccacagcccctgggtgtcacccccggtttcgtgtctgcctcggactccagacctgcccctcccaggctggcccagatggatcctctacagtgactaacccaaaccagcaccaggcagggacccaataaacctttgtgaatgga

SEQ ID NO: 63782 - DNA, 363 bp, Homo Sapiens
tgccaccacaatgaagatcttctgcatgggggaggctggcctggcctggtataagctggtggatttgaaatccaagtagagagcaaacagtttgtggcgagatatggtaaagtgtcagctggtgagatagctgtcacgggagcagggaggcttccctgcaaacagatcatccatgctgttgggcctcggtggatggaatgggataaacagggatgtactggaaagctgcagagggccattgtaagtattctgaattatgtcatctataaaaatactcacattaagacagtagcaattccagccttgagctctgggatttttcagttccctctgaatttgtgtacaaagactattgtagagact

SEQ ID NO: 63783 - DNA, 1068 bp, Homo Sapiens
  misc_feature (612)..(628): n is a, c, g, or t
  misc_feature (640)..(648): n is a, c, g, or t
  misc_feature (686)..(698): n is a, c, g, or t
  misc_feature (795)..(805): n is a, c, g, or t
ctgcggctttaaactgacagtacccgactgtttattggatctattgatttgaaaagaatttgttaggatagatcttaagcagtaatctgtcagtgtttgtatttgtattctctgcaattttactgtgaaaaaaaatttgttttcaacaattggtgtcattttcttgatgtcactatttgttggagagttaaatggtctcttccctttgtgtatcttacctagtgtttactcctgggcacccttaatcttcagaggtgctaaattgtctgccattacaccagaaggatgcctctgataggaggacaaccatgcaaattgtgaaatagtcctgaagttcttggattactttacacctcagtattgatttgtcccagaattttctggcctttcatggcaatgaaaattttaagaagaaagatttaaagtattttaattttaaagagtgtgttataaaataatgtactgaattctttatcccattttatcatcctttcagtttttattaatctactgtatcaataaaattctgtaatttgaatgagaacaaccacccctgaagccggagggggggcaaaccgccacccacacacgacctggtcgatcgctaggggnnnnnnnnnnnnnnnnncacttgtccggnnnnnnnnnggccctgaaaaaaagtttttcaaaaacctattccatannnnnnnnnnnnnccccccaaaaagaaaaagtgggccacgggggcccctaactcgggtcccccccaaagaaaacacccgcggccccaggaacaagggcctctgggaaatnnnnnnnnnnnaaaataaaaaacacgccgcggggcggagaaacaccggggcggggttccccacaccctgtccccccaaaaggggggacctactgagggggccccatgtccccgggagacttctcataccacggggggtgatctcacctgaccggaactcccccatataaccaagaatttctaccggccgcccgcgcctcctgaccaaataataatttttgaaaagaaaggtggtacagaaacacctcccaatttacaggatttacactacccct

SEQ ID NO: 63784 - DNA, 339 bp, Homo Sapiens
gaactctcagttggttaccacagagaagcgcttcctcaaagacagtttgtacaatgaaggaatcctaattgtatgggacccatctgtataccactcagatatcccaaagtggtaccagaatccggattataatttctttaacaactacaagacttatcgtaagctgcaccccaatcagcccttttacatcctcaagccccagatgccttgggagctatgggacattcttcaagaaatctccccagaagagattcagccaaaccccccatcctctgggatgcttggtatcatcatcatgatgacgctgtgtgaccaggtggatatttatgagttcctccc

SEQ ID NO: 63785 - DNA, 174 bp, Homo Sapiens
cttcatggggacataaagggcgagccccgaatcactagctcctatagccaaactgttcctttctcacggttccgcaccagcctggctgtgtacagctcatcaagccactgagctaatcggggtggggtgcttgtccatcaaagcagtcagcacatagcccagcgaggagccatc

SEQ ID NO: 63786 - DNA, 406 bp, Homo Sapiens
ttttcaaaccaccaatgtttattttcattcagttattaagaaataaaaaggggtagataattttcactccctgcctgtgcctgtccggcaggactcggcagcaggtcgatccggcgcagactcatctgagtgcgacgtagcggcagccagtcacatcgtgtcctccggaggccgcctgctgctgcgcggagccagcgtccaggacctggggccgggggaccagagctgggacaggcccagcccctgggcggcatagctatgtggccccgggaacactggctctccaaggcacaaggtctgtgagtgtgtcaggtggggagcccaacctgctgggggaacccccagccccacaagtaggtgccggccactggcaggaggccctacactaggcctcacagtcctgcct

SEQ ID NO: 63787 - DNA, 395 bp, Homo Sapiens
attgcccaagacatcgagcatatgaaatttccaagtgggtactcagaccaatccagcccgaacttgtaaagacctgcaactcagccatcctgacttcccagatggtgaatattggattgatcctaaccaaggttgctcaggagattccttcaaagtttactgtaatttcacatctggtggtgagacttgcatttatccagacaaaaaatctgagggagtaagaatttcatcatggccaaaggagaaaccaggaagttggtttagtgaatttaagaggggaaaactgctttcatacttagatgttgaaggaaattccatcaatatggtgcaaatgacattcctgaaacttctgattgccgagcagaggcagtcagaagtttcaggaatttccttgg

SEQ ID NO: 63788 - DNA, 428 bp, Homo Sapiens
attgccaccagaaaatagtcccaacttccctaacttcagagtcattgccacaaagtcaagtgaacagtcaagatctgtaaatattgcttcaaaactttctctccaagagagtgaatccaaaagaagatgcagaaaaagacaatctccagagccatcgcctgtgacactgggtcgaaggagttctggccgacagggaggagttcatgaattgtctgcttttgaacaacttgttgtagaattggtacgacatgatgacagctggccttttttgaaacttgtttctaaaatccaggtcccagactactatgacatcatcaaaaagcccattgccttaaatatatttcgtgaaaaagtgaataagtgtgaatataaattagcatctgagtttattgatgacattgagttaatgttttcgaactgctttgact

SEQ ID NO: 63789 - DNA, 539 bp, Homo Sapiens
gctcggtacccaagcttgattgccaattcagaggcctcaggtaatgacgacatcattttaaggcatggagctgagaagtctgggagtgaggagatcccagtccggctaagcttggtggagcattttcccattgagagccttccatgggaactcaatgttcccattgtaagtacaggaaacaagccccgtacttaccaaggagaaagaggagagacagcagtgctgggagattctcaaatagaaacccgtggacgctccaatgggcttgtcatgatatcaggctaggctttcctgctcatttttcaaagacgctccagatttgagggtactctgactgcaacatctatcaccccattgatcgccaggattgatttggttgatctggctgagcaggcgggtgtccccgtcctccctcactgccccgtatgtgtccctcctaaagctgcatgctcagttgaagaggacgagaggacgaccttctctgatagaggaggaacacgcttcagtcaaagcaaatcaagcttgaatcctctggatca

SEQ ID NO: 63790 - DNA, 294 bp, Homo Sapiens
gcagatggagaccaagggtgggatccagaatggagtcttttctgttattgtatttaaaagggtaatgtggccttggcatttcttcttagaaaaaaactaatttttggtgctgattggcatgtctggttcacagtttagcattgttatagaccattccattcgaaaagcactttgaaaaattgttcccgagcgatagatgggatggtttatgcaagtcatgctgaatactcctcccctcttctcttttgccccctcccttcctgcccccagtctgggttactcttcgcttctggt

SEQ ID NO: 63791 - DNA, 658 bp, Homo Sapiens
caaaatttcattggtgataaacaagcaagggtccactatcaagaagtaattcctggagaggggattttacctgatggtgggagaatactaacccccttctgattctttgaaaagcagagactattacacggagttcctgattacactggctgtgccctcggcagtggcaactggtccttttgtctaatacttgctttatatcatgtgctgccgacgggaaggcgtggaaaagagattacatgcatacaccagacatccaactggtccatcacagtgctattcagatatcttacctaggagcttcgagacatgtccaagaatagagagatagcatggcccctgtcaacgcttcctgtgttccaccctgtgactggggaaatcattacctcctttacacactagacaactatgatagcactaacatgccattgatgcaaacgcagcagaacttgccacatcagactcagattccccaacagcagacttacaggtaaatggtatccctgaagaaagaaaactgactgaagcaatgaatttataatcagactcatatagcagttacatcacatttcttttctcttcctataatgcatgagcttttctgtcatatgttatgcatgttgcagtattaagtgtataccctataatcgacattctc

SEQ ID NO: 63792 - DNA, 544 bp, Homo Sapiens
  misc_feature (24)..(24): n is a, c, g, or t
  misc_feature (26)..(26): n is a, c, g, or t
  misc_feature (60)..(60): n is a, c, g, or t
  misc_feature (86)..(86): n is a, c, g, or t
  misc_feature (139)..(140): n is a, c, g, or t
  misc_feature (428)..(428): n is a, c, g, or t
ggaggtctcggtgtgacacccagngncaacattggagccaatgggttgcaattttggagncggttcatgggacggctccagacatngcggcagggacatggcgaatcccacagccctcctgctcagtgccgtgatgaanngcgccacatgggactttttgaccatgctgccaagaattgaggctgcgtgttttggctacaattaaggacggaaagagcttgacaaaagatttgggaggcaatgcaaaatgctcagacttcacagaggaaatctgtcgccgagtaaaagatttagattaacacttctacaactggcatttacatcagtcactctaaatggacaccacatgaacctctgtttagaatacctacgtatgtatgcattggtttgcttgtttcttgacagtacatttttagatctggcctttncttaacaaaatctgtgcaaaagatgcaggtggatgtccctaggtctgttttcaaagaactttttccaagtgcttgttttatttattaagtgtctacctggtaaatgttttttttgt

SEQ ID NO: 63793 - DNA, 207 bp, Homo Sapiens
atctcgggttctgtgtactccaaaaccccagtcctttgagaaacaaggttttcattccggtactcctgctgcttccttcaacttgccttcagccctaggaagtgggggccccatcaatccggccacagctgctgcctacccacctgccccctttatgcacattctgaccccccatcagcagccgcattctcagatccggcacagggg

SEQ ID NO: 63794 - DNA, 272 bp, Homo Sapiens
ctcccacggatgaggaatggatataaacaatcaagtagtacctaaaaatattccaaaagtagctgagaatgttgcagataagaatgaagaaccctcaagcaatcatattccacatgggaaagaacaaatcaaaagaggtggtgatgcagggatgcctggaatagaagagaatgacctagcaaaagttgatgatcttccccctgctttaaggaagcctcctatttcagtttctcaacatgaaagtcatcaagcaatctcccatcttccaactg

SEQ ID NO: 63795 - DNA, 474 bp, Homo Sapiens
gctgcagcctctgggatgaccctgctcgcttcatcgtggtgcccgcggcctatgccttggcactgggcctggggctgccagccaacgtggcggccctggcaatgttcatccgcagcggcgggcgcctgggccaggccctgcttctctacctgttcaacctggctctggttgatgagttcttcacgctcacgctgcagctgtggctcacctactacctgggcctggcccggaggccgcctgccacgcggccggggccacctactacgtgtccacctatgcggcggtggtcttcgccgcgctcatcagcgtgtgccgctgcggcttcgtacgcggtcccgggcccagggcggctgcccgcctggcccggtgcctacggcgccccgcgcgcgctgcctgcgccttcgcctggctggcgggcctggcccctccctgcctgaagcaccgctgggcaagctcggggctggcctccgccac

SEQ ID NO: 63796 - DNA, 656 bp, Homo Sapiens
gaaacgacattggtaccagtggttatagccaagaggtggtgtgctacacattaggaaatatccctcagatgccttctgcaccaaggctggttcgagctggcatcacatgggtcacgttgcagtggagtaagccagaaggctgttcacccgaggaagtgatcacctacaccttggaaattcaggaggatgaaaatgataaccttttccacccaaaatacactggagaggatttaacctgtactgtgaaaaatctcaaaagaagcacacagtatacattcaggctgactgcttctaatccggaaggaaaaagctgtccaagcgaagttcttgtttgtacgacgagtcctgacaggcctggacctcctgccagaccgcttgtcaaaggccccgttacatctcatggctttagtgtcaaatgggatccccctaaggacaatggtggttcagaaatcctcaagtacttgctagagattactgatggaaattctgaaggtgaagtttttggcaattgttttattcaaatccaatagcaagctctgttttctaatatagtaaatgtctttatagtaatagtgagtaatcatcaattctaaagatagaattattattacaataaacaaactttagtcacatattggcagtttttctatttcaaa

SEQ ID NO: 63797 - DNA, 874 bp, Homo Sapiens
  misc_feature (256)..(264): n is a, c, g, or t
  misc_feature (420)..(420): n is a, c, g, or t
tggaataaagactggaaaatttgcttttgtagtgcagagctttagagcaagcacagttttatttatttgccttaaaccaatatttccggataaaaggtatatttttcttgtggagattgtagaataactatcatagcaaaggcagaaagtattcatttcaacttagtaaagacatattttttcactatcacagaaagatgacctttacataaaaattgttacatatacttccatagatactaatagtaagtatgannnnnnnnnaaaaaataactttctaagacaaatggcaaaggctttctttttcatgaattctttggttataaacaggttttgagtgattcttgttctatgaagtattaagtgattctgctgatatctgttctgtgtgtcctttgaagaccagaatataattaattntattctggtctaacatatttattctgatttacattgcttttatgtaacataattacagaatgaaaatatacctttagatctgacatatatcgttgatgaagctcctgctgagcatgttgcataagcttttcatccttttaaaactaaaaactcagaggctcttaacaggaaggataaacaaagctgaaatacgaactctgtatatcttccaatgattctcgacatgatgttttgtattcactggcccagagactcattttttctatgcctggggacattattttctataccattgctatcatctgatttcagctgttcaatctgctcaaattctttcccctcatctgagtgcttctttttcttttgtgtgtacttttcacaaagcagaatggtggccactaaaagaatcacctcagccactattacaagaaatggtttgaggggcaccaaatag

SEQ ID NO: 63798 - DNA, 569 bp, Homo Sapiens
tcccccgtgccccatgcacagatttatgaacacaattttgcccatgacattgcctacaggatttccagatgtgacttgcactcagaagatcagtgggcaacttcagaagttcttccacgcttagatcatgtcttcagaacttagttgtgaaaatctacacactgggagatgctgtgagccccaaggttttgatggagtttgcttggaatcctcttgacttcatgccacattgacgtgaactttgatgtataataagcagcagcaacttcatgtgaaaatatggtcaggtagttatatgtaaggttacgtggtccagtaatgtcttagattgataaattaggtatggaatccatcagtgttacgtgatgagaataggtgaacacaccttgtcagtgatgatgtaaacttctctccttggcaggacatgggcaaacatgctgattggtgcaaatgtggtgccgagctgtccatagctgcagtgaaagatgaagagcaagaccttctctaggttttctagctttcattaaatgtatttttttccccagagctaatttgaaagttgattggac

SEQ ID NO: 63799 - DNA, 258 bp, Homo Sapiens
ggtaattgtttctaatgtctctgaactcaaagtgaggtgctccaagacgctgtgaacttctgcaaagacacctccttacctactgggatcacgtgacctgacctcactcccagccaggctcccaaagggctcattccagccattccaatctcttcttctttatgcaaacacttttcccccacaacaagccttgtttgttccgataggaatacgtgtacgtcagtgcacttgtccttacgtcagttcgtcagcaccact

SEQ ID NO: 63800 - DNA, 918 bp, Homo Sapiens
gagtgatgatcgaaaggagaatgccctgcagacagtgggcacaggggaaccttggtgtgatgtagtcctagccattctggcagatggcactgtccttcccaccctggttttctacagagggcagatggatcagcctgctaacatgccagactccatattgctagaggcaaaggagttggagccatggcagaaaatcagtgatatcattgaggactctgtagttgaagattataattcagtggataaaactaccacagtttctgtgagccagcagccagtctcggctccagtgcccatcgctgcccatgcttctgttgctgggcacctctctacatccaccaccgttagtagcagcggggcacagaacagcgacagtacaaagaagactcttgtcacactaattgccaacaacaatgctggcaatcctttggtccagcaaggtggacagccactcatcctgacccagaatccagccccaggtctgggcacaatggttactcaaccagtattgaggcctgttcaggtcatgcagaatgccaatcatgtgactagttcccctgtggcctcacaaccaatatttatcactacgcagggatttcctgtaaggaatgtccggcctgtacaaaatgcaatgaatcaggttgggattgtgctgaacgtacagcaaggccaaacggttagaccaattacactagttccagccccaggtacccagtttgttaagccgacagttggagttccacaagtgttctcccagatgacccctgtgaggccaggctccacaatgcctgtgaggcccaccaccaacaccttcaccaccgtcatcccggccactcttaccattcgaagcaccgtcccacagtcccagtcccagcagaccaagtccactcccagcacttctaccacggtgctataacg

SEQ ID NO: 63801 - DNA, 273 bp, Homo Sapiens
  misc_feature (18)..(18): n is a, c, g, or t
gcagtcttctcccatcangggattttatacattgacctttgttggttatcaaaaagcagtaacgactgatgggacgaagatgcgtcttcgtcccatcagcatcctaccagcctctacagatatttatagaaagaacaattagagcagctgtggaacagcacctttttagatcttcagagcagcatagatcatgatcttaagaatttacaacagcaaagtgtggtgtgtaataatgaagcagacagtattcattctcgatgggagcaagatgcg

SEQ ID NO: 63802 - DNA, 713 bp, Homo Sapiens
gcgccgccgagccgggtcccccgccgccgccggagcgacagcctgatttggcttctgcacagttaggaggagcaccaaaccgatgggaggttttgtcagccacacctacaactataaaagatgaagctggtaatctagtccagattccaagtgctgctacttcaagtgggcagtatgttcttccccttcagaatttgcagaatcaacaaatattttccgttgcaccaggatcagattcatcaaatggtacagtgtccagtgttcaatatcaagtgataccacagatccagtcagcagatggtcagcaggttcaaattggtttcacaggctcttcagataatgggggtataaatcaagaaagcagtcaaattcagatcattcctggctctaatcaaaccttacttgcctctggaacaccttctgctaacatccagaatctcataccacagactggtcaagtccaggttcagggagttgcaattggtggttcatcttttcctggtcaaacccaagtagttgctaatgtgcctcttggtctgccaggaaatattacgtttgtaccaatcaatagtgtcgatctagattctttgggactctcgggcagttctcagacaatgactgcaggcattaatgccgacggacatttgataaacacaggacaagctatgggtagttcatacaattcagaaaggactggtgagcgggtttctcct

SEQ ID NO: 63803 - DNA, 410 bp, Homo Sapiens
tttccggggttgtgcatccacatcgcttcctggatgagagtggggttctcaatgtatgggtggttgtgaattaccaaaggcagacatcgcaggttcaataagtgatttaggtctgatgcctggagggagggtcaagctggtacatagtgctctgatccagttgggtgacagtctttcccataaaggtaatgaattttggggcactacacaaacactgaatgttagatttctgccttcagatcctaatcactttattattggcacagacatgggtctcataagccatggcacaagacaagatttgagagtggctcccaaactattcaaacctcagctacatggtataagatccagtgataagttaatgtcattgatttttcaccatttggagaacctatattttcgccgct

SEQ ID NO: 63804 - DNA, 537 bp, Homo Sapiens
  misc_feature (457)..(470): n is a, c, g, or t
gagagagccttgcctgacctgcacagaaagggcagcttcagtctctgcagtgtccattatctgctgttccttcgagggttccaggctgtgtgtggggcccaagcatgccccacccacccctcctgggcccaggcagcacctggagcccacagagtctgtgtgtagccaggaagccccgctcaggtagccaccgccggggcactggctgctctgtcttggtcctgttaaccctccacctcctctcttggactccctccccaccccaaccactctttctttctcctttaacccaatggagactttctgatgcatcgttttctttgctgtgccaaagcaggtcagaagagggagaggaggggctgggggtgaggggccaggccatggccaaggggccagctgcccctcatttatcactctgaccttcacagggacagatctgatttatttattttggttnnnnnnnnnnnnnnggaacagaaacaactttgcattgcattggcttgacccataaactaagttatatccgtgggcaaaaaa

SEQ ID NO: 63805 - DNA, 602 bp, Homo Sapiens
cgcagtcttgctaccatcaggccgacattaaggaagcaaggagggaagtggaagttaaattgactccgctgattctgaagccatttgtgaaatagcatctagtcagatttaatggggatgcctgagtcatattgatgagaaatgacgcacctcatataaatacacaggataaattcagttttgtcacaagtcaagcagttacatagcaacacagatatagccttcgtccaagaagagaataagtcatagattaaaagaaatagattctaaggaagaagcatacgttgtaaaagaactggccgttgatattctttgaagtgacccccatccgggcaaaggacttggagtttggaggagtacctggtgtgtttctcatcatgtttggcctgcctgtgttcctcttcctgttgctgttgatgtgtaaacagaaagatcccagtcttctgaatttccctcctcctttgccagctttgtatgagttatgggaaaccagagtatttggggtctacctcctgtggtttctgattcaagtcctgttctacctactgccaatttggaaaggttgtagagacgcctcttactgatgggagcagatgcggata

SEQ ID NO: 63806 - DNA, 455 bp, Homo Sapiens
  misc_feature (20)..(20): n is a, c, g, or t
cagcacctgcgcacgcacgncggcccgcggccccacaagtgcccggtgtgcgccaagggcttcggccagggctctgcgctgctcaaacacctgcgcacgcacacgggcgagcggccctacccgtgtccgcagtgcggcaaggccttcgggcagagctcggcgctgctgcagcaccagcgcacacacactgccgagcgcccctaccgctgcccccactgcggcaaagccttcgggcagagctccaacttgcaacaccacctgcgcatccacacgggcgagcggccctacgcctgcccgcactgctccaaggccttcggccagagctcagcgctgctccagcacctgcacgtgcattcgggcgagcgtccctatcgctgtcagctctgcgggaaggccttcggccaggcctccagcctcaccaagcacaaacgggtgcatgagggtgcagccgctgc

SEQ ID NO: 63807 - DNA, 495 bp, Homo Sapiens
cagtcttctccgcatcagattctactttacttctgtttaaggacagctcttccaagatgggttactttcctactgaagaaaaatcagaaacagatgaaaactcaggcaagcagcctagcaaactggatgaggatgattcatgttcattgctaacaaaggagagcagccacaatagcagctttgagctgattggctccacgattccatcctatcagccttgtaacagacaaacaggccgtgggaccagttttttccctacagcaggaggattcagatctccttcccctgggctatttcgagccagtttggtcagctcagcttctaagagttcagggaaactgtctgagccttcacttcccatagaggattcccaggatctgtataacgcctctcccagagcctaagacacttttcctaggagcaggagacttccagttctgatttagaagatgacactcagagccaactgatgggagcaagatgggggtaccgagc

SEQ ID NO: 63808 - DNA, 659 bp, Homo Sapiens
  misc_feature (82)..(115): n is a, c, g, or t
gattgtagtggtagtctaactccataacgctgaggaaatacatcattttcacttcagtggcttttaaatcctgcttatgaannnnnnnnnnnnnnnnnnnnnnnnnnnnnnnnnnccaaaattaactgtttggtgaagcccgcaaaacctcctcgctttgcatgcatgaacgtgccaagccagcataggggagctagaagccactttccagccacctgccgttgggttttttcatatctgtacataatgccgagtgcgtaaggaaaccgtggcgtcgcgcacagtgggtctgcttgtcaaggccagttctgcagtgacaggcccaggggctgcccaccaggtgtgctgggcagacttcagctgggacagaagtccgatctccctagggccccacctggaccattttccctccgttttattttgttaattaaattctttccaaattggatcgctctgggatttcttccatggtggacttttgtttctgatcttgttttccctgtggatattggaggacagcgaggttctttctgatactaaaaacctttctttcaggcagcaaatgaacttgaaaggttgcctggactcgctggagcaaaggaaagcgattttgtttgtataattaaatgatctgttcttctacttcactcttcctgttg

SEQ ID NO: 63809 - DNA, 563 bp, Homo Sapiens
aaagtgtacaaaatgtgtgcttcacggaggaagcagcgctactggccattctccatggactgcaccggcacagaggcccacatctccagctgcaagctgggcccccaggtgtcactggaccccatgaagaatgtcacctgcgagaatgggctaccggccgtggtgagttgtgtgcctgggcaggtcttcagccctgacggaccctcgagattccggaaagcgtacaagccagagcaacccctggtgcgactgagaggcggtgcctacatcggggagggccgcgtggaggtgctcaaaaatggagagtgggggaccgtctgcgacgacaagtgggacctggtgtcggccagtgtggtctgcagagagctgggctttgggagtgccaaagaggcagtcactggctcccgactggggcaagggatcggacccatccacctcaacgagatccagtgcacaggcaatgagaagtccattatagactgcaagttcaatgccgagtctcagggctgcaaccacgaggaggatgctggtgtgagatgcaacacccctgccatgggcttgca

SEQ ID NO: 63810 - DNA, 421 bp, Homo Sapiens
actcaggctttggtggaatacaatcagtttggagaaacagaagtgaatttgtctgaattacatccatatctacataacatgaagaaaagggatccacccagtgagccgtctccactagaggctgaattccagagacttccttcatataggagctggaggacacagcacattggaaatcaagaagaaaataaaagtaaaaacaggaattctaatgtcatcccatatgactataacagagtgccacttaaacatgagctggaaatgagtaaagagagtgagcatgattcagatgaatcctctgatgatgacagtgattcagaggaaccaagcaaatacatcaatgcatcttttataatgagctactggaaacctgaagtgatgattgctgctcaggaccactgatggacgaagacttcggtcc

SEQ ID NO: 63811 - DNA, 834 bp, Homo Sapiens
ggttatttaaaagaaaatgttacccaaagtcagttttacttttagttgcgcttttgcatttttgatgccattactatctcttttagataggtaatccaaaatggactattttaacaacaatgtctttaagttacttgcttggctgtgcggtttgtatgattacagttcaacttagaaagtgttctccaataatgagttgctcttaatttaatggaattgctaaggcctaatattactataagccaatttggtagtgagtttgcatgtttatgttatacaggttattatctagtaagtgaacactttaatttatatggaaatgattactggactttgtttacagaaagccacaaaaaaaactgataaacccagacaagaagataaagatgatctagattgtaacagagctcactaatgaagatcttttggatcagcttgtgaaatacggagtgaatcctggtcctattgtgggaacaaccaggaagctatatgagaaaaagcttttgaaactgagggaacaaggaacagaatcaagatcttctactcctctgccaacaatttcttcttcagcagaaaatacaaggcagaatggaagtaatgattctgacagatacagtgacaatgaagaaggaaagaagaaagaacacaagaaagtgaagtccactagggatattgttcctttttctgaacttgggaactactccctctggtggtgggattttttcagggtatttcttttcctgaaatctccacccgtcctcctttggggcagtacccgaactacaggcagctaaggaaagtacatacttctaagggaggacctacctaggggag

SEQ ID NO: 63812 - DNA, 526 bp, Homo Sapiens
aaatacagtattttaaactgaatgatgatatgccttccagggaaaaccttgaatttttcctttataactgacttttggattccaaagtcatttgcacattaacagagtacttaaatttacttgttcagtccataaactatgatatagcctctatacatggtaagaaaatttgaaaaattaaagatggttgcacagtatacttttataatccagcatgtaacaccacatgacaatttgttggccaaatgctggtttggagtttttttgaggaatcactttggtttttttgtcctttatatataaccttattggaagtattaattctaagcctgtctctcaagtttatttatagagaaaaagtaagtaatctgtattgccacataccttgaaaatagaatgtggtatgtttaggatgcccacggaatgaatttttccttattccaattcaaccttctgtctggttgtgccaggaaaacagatgttatatgacctatgtcatttttgccattatagtcaaatgttaaaa

SEQ ID NO: 63813 - DNA, 785 bp, Homo Sapiens
  misc_feature (420)..(420): n is a, c, g, or t
  misc_feature (445)..(445): n is a, c, g, or t
  misc_feature (466)..(466): n is a, c, g, or t
  misc_feature (482)..(482): n is a, c, g, or t
ctgtgctttgggacggcggaatgaacaggatttctatgcagcagttgatgactttagaaatgaatttaaagttcctccatttcaagattgtattttaagtttcctgggattttcagatgaagagaaaaccaatatggaagaaatgactgaaatgcaaggaggtaaatatttaccgcttggagatgaaagatgcactcaccttgtagttgaagagaatatagtaaaagatcttccctttgaaccttcaaagaaactttatgttgtcaagcaagagtggttctggggaagcattcaaatggatgcccgagctggagaaactatgtatttatatgaaaaggcaaatactcctgagctcaagaaatcagtgtcaatgctttctctaaatacccctaacagcaatcgcaaacgacgtcgtttaanaagaaacacttgctcagcctttcanagagagacagacgtgtcaccnatttccaccccgtaangcgcccatcagctgagcattccctttccatagggtcactcctagatatctccaacacaccagagtctagcattaactatggagacaccccaaagtcttgtactaagtcttctaaaagctccactccagttccttcaaagcagtcagcaaggtggcaagttgcaaaagagctttatcaaactgaaagtaattatgttaatatattggcaacaattattcagttatttcaagtaccattggaagaggaaggacaacgtggtgacctatcttgcacctgatgggagaagactggggatcctctgaa

SEQ ID NO: 63814 - DNA, 591 bp, Homo Sapiens
tgttttgcactttattttcaggggtttgtgatttggatggattaaattctagactgaaaagtaactcctactgtggttatggctagaggaaagcaagttcaagtatgatgggacaagtttgaataatgaactgattcctttgcctatcttaattaactgtatttgagaaattttaatttattattcccccctttttttcctgcatctataggataatattgtaaaatagcaattgaaacccataatcattaaataaatatcaaggaaaatccaagcaaagctttctttttgttggactagtggtgtggtgtttggagacagtctctgaatgtgaacaggaaagcacccatcagcaaaacacgatcactctctagggagacagctgggggaatctgactctggcttctgcttttgttttaagggattaacttccctgtcaagtccaagaagacttgcgtatgagaagattacctgatggacttaattctaagattagcttttttcatcaagatggaaaaagatctttaggagcagaaaaggggagtgctaactgggggagcgagaagggagacgagcattacaaacaaaatc

SEQ ID NO: 63815 - DNA, 416 bp, Homo Sapiens
ttcgcccatcagatcagctgaaagagaagatttaggcgactacggcaggacttctgtgtagattacacttgatagtattttggagaaaaaattggactgtattttgcctggctgggattatatacatcattcctcatcccatcttctgtaattggagtgattgtgtttctttatggatgtgcaacaattgaagaagatattcccagcagagagatgtgtgaccagcagaatgccttcaccatgtgtcccctgtgtgacaagtcctgtgattactggaacctcagctcagcctgtgggaccgcgcaggccagccacctgtttgacaaccctgccaccgtcttcttctctatcttcatggctctgtgggctaccatgttcctggaaaactggaagaggctacagatgcgactgggcta

SEQ ID NO: 63816 - DNA, 528 bp, Homo Sapiens
ttctcgaggatcccctgctgtacatgagtattgatgattccaagttttgggaagaagcgacaccaatatggatcacaaaccagagggcaggacatactagtggtgcagccatgtggcccggaacagatgtaaaaatacataagcgctttcctactcattacatgccttacaatgagtcagtttcatttgaagatagagttgccaaaattgttgaatggtttacgtcaaaagagcccataaatcttggtcttctctattgggaagaccctgatgacatgggccaccatttgggacctgacagtccgctcatggggcctgtcatttcagatattgacaagaagttaggatatctcatacaaatgctgaaaaaggcaaagttgtggaacactctgaacctaatcatcacaagtgatcatggaatgacgcagtgctctgaggaaaggttaatagaacttgaccagtacctggataaagaccactataccctgattgatcaatactcatgtacagccaggggtaccgagctcg

SEQ ID NO: 63817 - DNA, 598 bp, Homo Sapiens
ctcggtaccctttcttgcccccgactcgacagccctttccgagggatgcgccctacggccccctggcgctcagctccctgctcatccagcagtatgccgcctccctgggtctaggagctggttttccatccatccccgtcggcaagagccccatggtggagcagtctgtgcagactggttctgctgaccacctgaatgctaaaaagctgttacctggcaagggcaccacagggacgcagctcaacggtcgtcaggcccagccgagcagcaagacggccagcgatgtagtccagccggcagctgtgcaagctcaagggcaggtgaatgacgagaacagaagacctcagaggaggcgatcaggaaacaggcggacaaggaatcgctccagagggcaaaaccgtcccactaacgttaaggaaaacacaatcaaatttgagggtgactttgatttcgagagtgcaaatgcccagttcaaccgagaggagcttgacaaagaatttaagaagaaattgaattttaaagatgacaaggctgagaagggggaagagaaggacctggctgtggtgacccagagtgccgagctgcgtctgctgaggaa

SEQ ID NO: 63818 - DNA, 460 bp, Homo Sapiens
gctatgactacggtgatgagtaccggccgctgttcttctaccaggagaccacggctcagatcctggtccgggccctcaatcccctggattacatgaagtggagaaggaaatcagcatactggaaagccctcaaggtgttcaagctgcctgtggagttcctgctgctcctcacagtccccgtcgtggacccggacaaggatgaccagaactggaaacggcccctcaactgtctgcatctggttatcagccccctggttgtggtcctgaccctgcagtcggggacctatggtgtctatgagataggcggcctcgttcccgtctgggtcgtggtggtgatcgcaggcacagccttggcttcagtgaccttttttgccacatctgacagccagccccccaggcttcactggctctttgctttcctgggctttctgaccagcgccctgtggatcaacgcggccgc

SEQ ID NO: 63819 - DNA, 232 bp, Homo Sapiens
  misc_feature (49)..(49): n is a, c, g, or t
ctcacacaacccctccagtcatgccgcagcaggttaattatcagtaccnctccgggctattctcaccacaacttcccacctcccagttttaatagtttccagaacaaccctagttctttcctgcccagtgctaataacagcagtagtcctcatttcagacatctccctccatacccactcccaaggctcccagtgagagaagtccccagaaggcagaaacagacggtaccga

SEQ ID NO: 63820 - DNA, 461 bp, Homo Sapiens
tgggcccgtgcagtccccactgccgctgtcgcccctggctggccggccaggcaaaccaggtgcagggccggcccaggttcctcgtgagctcagcctgacgcccatcactggggccaagccctcagccactggctacctgggctcagtggcagccaagcggcccctgcaggaggaccgcctcctcccagcagaggtcaaggccaagacctacatccagactgaactgcccttcaaggcaaagacccttcatgagaagacctcccactcctccaccgaggcctgctgcgagctgtgtggcctttactttgaaaaccgcaaggccctggccagccacgcacgggcacacctgcggcagttcggcgtgaccgagtggtgcgtcaatggctcgcccatcgagacactgagcgagtggatcaaacaccggccccagaaggtgggcgcctaccgcagctacatccagg

SEQ ID NO: 63821 - DNA, 578 bp, Homo Sapiens
gtgattcccgaagaaattgacccataggcagaggcatgagctgtacttcatgtttccctcaaagactctcccgtggatgacggatgaggactctgggctgctggaataggacactcaagacttttgactgccattttgtttgttcagtggagactccctggccaacagaatccttcttgatagtttgcaggcaaaacaaatgtaatgttgcagatccgcaggcagaagctctgcccttctgtatcctatgtatgcagtgtgctttttcttgccagcttgggccattcttgcttagacagtcagcatttgtctcctcctttaactgagtcatcatcttagtccaactaatgcagtcgatacaatgcgtagatagaagaagccccacgggagccaggatgggactggtcgtgtttgtgcttttctccaagtcagcacccaaaggtcaatgcacagagaccccgggtgggtgagcgctggcttctcaaacggccgaagttgcctcttttaggaatctctttggaattgggagcacgatgactctgagtttgagctattaaagtacttcttacacattgaaa

SEQ ID NO: 63822 - DNA, 759 bp, Homo Sapiens
  misc_feature (29)..(29): n is a, c, g, or t
acttcttgggacgagcatggcatgcggcnggctctgctgcctctggtcacagcctctgcccgaaagctgagcccgggggtgacgcagtttgcatacagctgtgtgcagaagcacgtggtgtgagcaacgcacagtttctgggaggccatgttctatggggatgtgcagactcacatccgggccctctaccctggagccccacggaggacctggcccccgcccaggaggttgggtaggcaccttcccaggaggacgagcgctctgccctagacgtggcttctgagcagcggcgcttgtggccaactctgagtcgtgagaagcagcaggagctggtgcagaaggaggagagcacggtgttcagccaggccatccactatgccaaccgcatgagctacctcctcctgcccctggacagcagcaagagccgcctacttcgggagcgtgccgggctgggcgacctggagagcgccagcaacagcctggtcaccaacagcatggctggcagtgtggccgagagctatgacacggagagcggcttcgaggatgcagagacctgcgacgtagctggggctgtggtccgcttcatcaaccgctttgtggacaaggtctgcacggagagtggggtcaccagcgaccacctcaaggggctgcatgtcatggtgccagacattgtccagatgcacatcgagaccctggaggccgtgcagcgggagagccggaggctgccgcccatccagaagcccaagctgctgcggccgc

SEQ ID NO: 63823 - DNA, 457 bp, Homo Sapiens
catttgggctgtgtgtgcgacgcgggtcggaggggcagtcgggggaaccgcgaagaagccgaggagcccggagccccgcgtgacgctcctctctcagtccaaaagcggcttttggttcggcgcagagagacccgggggtctagcttttcctcgaaaagcgccgccctgcccttggccccgagaacagacaaagagcaccgcagggccgatcacgctgggggcgctgaggccggccatggtcatggaagtgggcaccctggacgctggaggcctgcgggcgctgctgggggagcgagcggcgcaatgcctgctgctggactgccgctccttcttcgctttcaacgccggccacatcgccggctctgtcaacgtgcgcttcagcaccatcgtgcggcgccgggccaagggcgccatgggcctggagcacatcgtgcccaacgccgagctccgcggccgc

SEQ ID NO: 63824 - DNA, 534 bp, Homo Sapiens
ctatgtcgtggctggctggctggccagggttttgccgatttccctcctcacatccctcccaccctcggtcatatcattgagatcaccgtaccagcaaatctgcaaaccaagcactttgttaatctccagagagagcaaatacagcaatctagagtttagcctttttaaaaatgtgactttaacccgcccacctgtgtcctcccattggcgtggcatttctttggtgtctgctcagaaagaaacagcatgggaccgtgtgattgggtccaggctgggctgtcagggaagcgccctggtgtctccgactcatcaattctcgggtctttttttaaaagccaggctccccaaagcactctttgtctcgcaattttgaggaggttgttccgacctggaagcgttaaactgctgcatgtcatctggcgtcagctgtgaggctgcgctctgcgtgttgtgcgtttgcaaaatgtattggcgtgactgtaaacacatcgttgaagtaaagcgattacatattgagtatgtcagcttttctca

SEQ ID NO: 63825 - DNA, 710 bp, Homo Sapiens
gggttttcacacatttttgctgactttgtcgtcctggaggttcacagttccttgtttgtgatagggtgctgtcccataagcgattgctgctgcgcgaactttcttgatgtacagctgttacttgtggtttccctaaggtctatcccagcacctcaattcgctaacctatctggcagaattttgggtagaacttgtactatctccccttcgagtatgtcatcctagatacatctctctcgagggggctactagggaagtgctttacgtaacaattcagtgcgttatttagtgaaggatagctccactgttcagcttcagttgtagtagatgtggggaggtgggcacctgatctctgagcaccgttgggggctcccccagcctgggggctccccaactcctgatgcccaatacgtttttatctaggcctcattacacaggtatgacttgattaagtcattggtcattggtgtattgaacacatactcaatctctggcccctcccaggagtgggggcggtgaggggggctggaagttcctctctaattacatggttggttcctctggcaacaagctcccaccctataagctaccttggggtcccccaagagtcacctcattagggtaaacaaatgtggtgaacaagagttgttatgaaatcagacacccctatcaggatattccaaagatttaaggagttacgtccgtgacat

SEQ ID NO: 63826 - DNA, 948 bp, Homo Sapiens
  misc_feature (936)..(936): n is a, c, g, or t
gcttgtactcgcgggtgcggcttataatgcgtcgcagagctatgttccgagcctcagacagcgcgtaccttcgggtcggtattcgggcggcctttttcgcagccaagttccctagcttccgtgtttcggtaccgccggtccctttacccgtgcaccccttacacccaagctcacgtgctgactggggcaggtattcagggaagcactggggtgccatataggaacaggcaacctaagagtacccggtcagaaggaagtaggaactggggagtcctctcagggagggaacaagcacaagactctaagtagatggacagataaaactgctgtgaggaggggaaagaggtagcagtcagggatgtgcaggggacggttggggaagatagggtagaagtagatggttatagaggttggagagatggtgcaggactgggccatgcagagccctgggcagccaggggacctgcccttgaccacatggaaagcatggagcccctggagaagaggggcagcccagccacgcagccctggcagagcgggggcccaagggacatgaggcagcccaagaatggtctcagggtgaggcagggaagggggcatccctgccctcctcagcgagctggcgctgtgccttgtggcaccgagtgtggcaagggcggcggcgagcccgtagacgcttgcagcagcaaaccaaggagggagctggaggtggcgctggcacaagagcagggtggctggcgactgaggctcaggtcacccaggagctgaaaggactgagtggtggcgaagagaggccagaaactgagcccctgctgagctttgtggcgtctgtctccccggctgaccgaatgctcactgtgaccccgctccaggatccccaaggcctgttccctgatctccatcatttcttacaggttttccatactccaggagggnttcagagcaatt

SEQ ID NO: 63827 - DNA, 892 bp, Homo Sapiens
  misc_feature (790)..(828): n is a, c, g, or t
gaagataaagagcggagagcgcgtccggaaggccagggcctggggggcgtggcggacgtggggtggcccggggaggcgcggcggcggcccagcggagactaggccagaactgagcattttcaaagttcccgaggagagatggatgccgcgtccccttcgcagcgacgagacttccctgccgtgtttgtgaccccctcctgcccagcaacctgccagctacaggagccccctgcgtcccagagactccctcacccaggcaggctccgtcgcggagtcgctgagtccgtgcccttttagttagttctgcagtctagtatggtccccatttgcccttccactccaccccaccctaaaccatgcgctcccaatcttccttcttttgcttctcgcccacctcttcccgcacccagcatgcagctctgcctccgcagcctcagtgcgctttcctgcgcgcactgcggagggcgccctaagcgtcacccaagcacactcacttaaagaaaaaaccagttctttcgttctgtgcagctaaaaggggcgccctacatctccgtgccactcccgccccagcctagccccaagactttggatccggggcgagatgaagggaagagggttgttttggtttcggacgacccttgctctgaccggaagagaagtccctatcccacacctgcctgtcacgttccctcccctttccccagcgcactgttgagggcagcctctccagctctcttgtttatgcaaacgccgagcgcctgggaggctcggtaggaggagtcttccacgnnnnnnnnnnnnnnnnnnnnnnnnnnnnnnnnnnnnnnncgggctcctggggctgtggccgaaaggtttcttttaaccctccccggtggggtggccatggtgc

SEQ ID NO: 63828 - DNA, 945 bp, Homo Sapiens
aacggtctaaggtagcgaggcctgggtggcgaattcggcacgaggagagtcttttcagcgctgaggactggcgctgaggaggcggcggtggctcccggggcgtttgagcgggctcacccgagcccgcgggccaacgcggatccaggcccgactggcgggaccgccccggattccccgcgggccttcctagccgccatggaggacggcgtctatgaacccccagacctgactccggaggagcggatggagctggagaacatccggcggcggaagcaggagctgctggtggagattcagcgcctgcgggaggagctcagtgaagccatgagcgaggtggaggggctggaggccaatgagggcagtaagaccttgcaacggaaccggaagatggcaatgggcaggaagaagttcaacatggaccccaagaaggggatccagttcttggtggagaatgaactgctgcagaacacacccgaggagatcgcccgcttcctgtacaagggcgaggggctgaacaagacagccatcggggactacctgggggagagggaagaactgaacctggcagtgctccatgctttcgtggatctgcatgagttcaccgacctcaatctggtgcaggccctcaggcagatttctatggagctttcgcctacccaggagaggcccagaaaatttgaccggatgatggaggccttcgccagcgatactgactgtgcaaacctggaggtaaaacaggaccaagaacacgtgcaaatgtgctgtccttcgacgacatcatgatcaaacaaagtctcgacaatcccaagtgtccgggacaagccgggcatgaagcgctacgaggccatgaccgcggcatccacagagggcgggaactgcctgaggagctgtcaagacctgtacgacagatccgaaatgaggcctcaagaatctgagaatagggaa

SEQ ID NO: 63829 - DNA, 1053 bp, Homo Sapiens
ggctgcttgaggatccccggcactgcttcggatgggcagacgcgggagcatgccctgctggctacacgctgggtgtgaagcagctcatcgtgggcgtgaacaaaatggactccacagagccggcctacagcgagaagcgctacgacgagatcgtcaaggaagtcagcgcctacatcaagaagatcggctacaacccggccaccgtgccctttgtgcccatctccggctggcacggtgacaacatgctggagccctcccccaacatgccgtggttcaagggctggaaggtggagcgtaaggagggcaacgcaagcggcgtgttcctgctggaggccctggacaccatcctgcctcccacgcgccccacggacaagcccctgcgcctgccgctgcaggacgtgtacaagattggcggcattggcacggtgcccgtgggccgggtggagaccggcatcctgcggccgggcatggtggtgacctttgcgccagtgaacatcaccactgaggtgaagtcagtggagatgcaccacgaggctctgagcgaagctctgcccggcgacaacgtcggcttcaatgtgaagaacgtgtcggtgaaggacatccggcggggcaacgtgtgtggggacagcaagtctgacccgccgcaggaggctgctcagttcacctcccaggtcatcatcctgaaccacccggggcagattagcgccggctactccccggtcatcgactgccacacagcccacatcgcctgcaagtttgcggagctgaaggagaagattgaccggcgctctggcaagaagctggaggacaaccccaagtccctgaagtctggagacgcggccatcgtggagatggtgccgggaaagcccatgtgtgtggagagcttctcccagtacccgcctctcggccgcttcgccgtgcgcgacatgaggcagacggtggccgtaggcgtcatcaagaacgtggagaagaagagcggcggcgccggcaaggtcaccaagtcggcgcagaaggcgcagaaggcgggcaggtgacgctcgggcactctgtgag

SEQ ID NO: 63830 - DNA, 897 bp, Homo Sapiens
aggctggtaccgcccggattttccgggatatcgtcgaccacgcgtcgcgatttcgtcggtggtaggctgctaccatgaggttgaatcagaacaccttgctgctggggaagaaggtggtccttgtaccctacacctcggagcatgtgcccagcaggtaccacgagtggatgaaatcagaggagctgcagcgtttgacagcctcggagccgctgaccctggagcaggagtatgccatgcagtgcagctggcaggaagatgcagacaagtgtaccttcattgtgctggatgccgagaagtggcaggcccagccaggcgccaccgaagagagctgcatggtgggagatgtgaacctcttcctcacagatctagaagacctcaccttgggggagatcgaggtcatgattgcagagcccagctgcaggggtaagggccttggcactgaggccgttctcgcgatgctgtcttacggtgtgaccacgctaggtctgaccaagtttgaggctaacaagttgggcaaggcaaatgaaccaagcatccggatgttccagaaacttcactttgagcaggtggctacgagcagtgtttttcaggaggtgaccctcagactgacagtgagtgagtccgagcatcagtggcttctggagcagaccagccacgtggaagagaagccttacagagatgggtcggcagagccctgctgatggctgggccttgtgggcagccactctgtgtgagcagggtgttgggcccatacacttcaaagaccagagccctgcactgggagagtgctcctggcccaggctgggaatcacctttcgaggcccttcagactctggcggggcttgctgtggcctccctccagctagtggtgtggctgagcaagaatccatgcccagg

SEQ ID NO: 63831 - DNA, 368 bp, Homo Sapiens
gttatactctgtgctgcctgagcaagatttgtagaatcatataattaccttttcatgtatatttgaaatcagaggtgtttaaaatacctatgagataccaatgtagccttaacatatgtcaaaatgcattgctggttagataattatttggactacacataaactcctaatattgaatcattacctatcaggtattatctttatggaacttttcaatatctttgctttataaagattctaaacatgtatctgagctggtaatattttaaaatctccattatttgtgtaaaactgtttataagcagtgtttgagagggtctgctttaccattaccccctcaatatcatgatcatccaatctcaaatgtg

SEQ ID NO: 63832 - DNA, 1004 bp, Homo Sapiens
  misc_feature (93)..(101): n is a, c, g, or t
  misc_feature (148)..(165): n is a, c, g, or t
  misc_feature (189)..(344): n is a, c, g, or t
  misc_feature (384)..(397): n is a, c, g, or t
  misc_feature (406)..(584): n is a, c, g, or t
cccccccgttttttccacggggggaaaaatttttctccccgcgggccaagggggggtgtccccccggggaataaaggattcacacccccgttnnnnnnnnntcccctcggcgggaaaggttaaaaaaattcccccctcccctctaatnnnnnnnnnnnnnnnnnnaattaaataaaaaacgcctggggnnnnnnnnnnnnnnnnnnnnnnnnnnnnnnnnnnnnnnnnnnnnnnnnnnnnnnnnnnnnnnnnnnnnnnnnnnnnnnnnnnnnnnnnnnnnnnnnnnnnnnnnnnnnnnnnnnnnnnnnnnnnnnnnnnnnnnnnnnnnnnnnnnnnnnnnnnnnggggcccccccccccaaaaaaggttttaaaaatttttttnnnnnnnnnnnnnnccccaaaannnnnnnnnnnnnnnnnnnnnnnnnnnnnnnnnnnnnnnnnnnnnnnnnnnnnnnnnnnnnnnnnnnnnnnnnnnnnnnnnnnnnnnnnnnnnnnnnnnnnnnnnnnnnnnnnnnnnnnnnnnnnnnnnnnnnnnnnnnnnnnnnnnnnnnnnnnnnnnnnnnnnnnnnnnnnnnnnnncagcttagaaccttctttattaaggaaggtctttcaggcactttcattaacaggcacatataagcttagcaagagcacctttcaaagtcacagttccaatggtttttgtaaggtcaaccagaggcagagaacacaatcatggtggcttaccgtcaaaatcatgacaagttgtcaacctaatgccttctgtcaaacataaccaccacccactctgcttctgtcctgtgaggaatgacgggaagtagggagtcaagacttgatattaatgtagatcgcatgtgacacttgcgtggccagcagacaaggccccccacccatgcccaggcttggacaaaatggtggctatgttttctgtgccaaacctcctcatctctgccatgtctagcctagaccttgaagtgtctgatcctccccggaccc

SEQ ID NO: 63833 - DNA, 1840 bp, Homo Sapiens
  misc_feature (323)..(347): n is a, c, g, or t
  misc_feature (962)..(1002): n is a, c, g, or t
  misc_feature (1049)..(1057): n is a, c, g, or t
  misc_feature (1536)..(1536): n is a, c, g, or t
  misc_feature (1561)..(1561): n is a, c, g, or t
  misc_feature (1689)..(1689): n is a, c, g, or t
  misc_feature (1698)..(1698): n is a, c, g, or t
  misc_feature (1711)..(1711): n is a, c, g, or t
gggaagtagtggtggtacgggtccgactgaggggtactcgccaccggctgcgtccacccgagcggctgcgagagccaaggcccgagggggtgggcgtggcggccgccgaaacacaaccccctctgttccctctcttcgcggagcggcgccgcgtagcttccatccgccagctgccatgagcgagcgcctccgtcccaggaaaaggagaaggaatggcaacgaagaagacaaccatcttcccccccagaccaaaagaagtagcagaaaccctgtctttcaggattcctgggacacagagtcttcaggcagtgacagtggtgggnnnnnnnnnnnnnnnnnnnnnnnnntcaatagcccggacagggccagcgggccggaaggcagcttgagccagaccatggccggatccagccctaacacgcctcagcccgtgcccgagcagtccgcgctgtgccaaggcctctacttccacatcaaccagaccctgagggaggcccacttccccagcctacagcaccgagggcggcctctgacatgatgtgccggcagtttcttgccttctgtgaagggacagcgctgtgcagatttgatatttccacttacaacttgtttttaaaagaaaaattgcacacgaaaaatgcctgttggcttttcagtctatatttgaaataacaggttaacaggcagttgtttacttgtggttttgctgcactattgcaatttcaaaggggctttgaagcaattttttataggattcttttgagggagggtatcaaatctatgtcaagggtagtgggtttgaggaaaactcattctgtgtgttgaattcatagtatgttccattcagactgattttcaaatctgtccactagaaactctactttatgtaaagggccttttaaaaatggcgggatcttcaattttttttattcaataaactactacagagtaaaacccacacnnnnnnnnnnnnnnnnnnnnnnnnnnnnnnnnnnnnnnnnnggcgattctctgcacgcaagacgccgaacatgcaccccagggccggnnnnnnnnngccgccccacaaaaagcctttcccaaaacatttgcggttggggcccgcgggccccccgggcggtatagggtgacacggcggcacaaaccttgttttccccaaaggaaaaaacccccggggaccatcggaacaaagggggcttgggtttctcgctccgccgcgaatgaaaaaaaccccccccgcggcggctcatcctcgtcagcgggttttctcggaaaacaccctcctccccctcgtcggccacctcctccggagaggcgccccttctcaacccgtggggtaatccggtgaagacaaaaacgagaggaacatcattccacaactgagatagagaaaggtatggtgcgtgatgtagtctcgcaacatatccttattgatcccctcatccacacctctagctttttcggaaccccctctcaccctacgcgcgctcatatacatcgttgggggtggggacagcaaccggatattctttagtntaggcccccattgttgtcattttcntctcttacaatgtcgcgtcctgctgtgcccactgctttcccgcgtaaaaaggcgggcacttggtgtctcgccgggcaccaccacgcgggaggaactctgcgcgccccaactgcgcgctcatatctacngatgaaaancacgaatatacgnatcttcaaccttatgtgcgaggaatataaaaaccaatatctcctgcaacccccggaggggggggaaacacacgcacggcgccgggggtacaaaccggagagaaagttatttacccgcacccagctgtgg

SEQ ID NO: 63834 - DNA, 676 bp, Homo Sapiens
gcaggggcacagctccatgtgcgcgcgcgtgtggagctgtgtgcaccgcatgtgtgctttccacaggggcgtctctgcgtccacgcctgcacatcccggcgcacgtgtgggcaccacagaggacacgtgaggggaatggtcaccagtgagccatatttattatttctagagaaatcacgaactgctttctgtaattgcactgtggataaatgttccgagagtctccattgttgtacaggatcttcagttattcgaggggaatgaggcaggtcaagccgatgctagccactagtttgattttttttctgttttatagtttgcgctgcatggtacttgtgaagcttaaatattttgagtgttctactgtgtctaggattgttgggattgtacatatggtactctttcataaatgataaatgattctgaatgttagtgttttatgttcatataggaaatattttcattgagtccaaaataccactgttttgttgatggacttgaatgcatttttgtctcttcttgatgaagcggctttgccgcagcaaatgaagcttctctctgaggagctgagaaagtcttgcagcctctccttgtcattctcccaccccacatcccattttttaaagcccttttggtaaaaaccaacaggttgtggccgcagacctcagatggaccc

SEQ ID NO: 63835 - DNA, 912 bp, Homo Sapiens
atgtgttgggagtagtggcgatgttgttctagtttggctgtgtaagcgcatcgcctgcgggttttcagcttccggtttcccggagtccctgccctccaaggggttgacgaaggccaggacgttgtattcttgtgcgtggtttgtagggctgtgcctgctgcgtgacgtatgctgcagggcggggcgtcacgcctgtcagcgccgttaagtcttcgctgtttcccagtctcagattgagtgggtgctctcattggcctctctagctaggccgtctccctggtcagcttccttgagcctgggccactcctccctggccttcttacctctgccaagagcctccagatgtgcctgcagccgagtccctgcccaagcttctcccccagccaccctctgcccctgtggtagagcccactataggcccaggcgccttacgtgcttctcccctggacctatgtgcatccctcacctgccagttatgtggctgccaagccccacaggctgtcatggtggctcttgccacacttcccttcctgagctgacctgacctcactgccacctcttgcattgggatcctgagggctggcccctgctcactgatggccctcccaggcccgtcaagccctggtgaaggagcttagcttgtcttcttggcaattcacaatgcctcactccacagcccgtaaaagctaggagcgtcccctatggtactcctgctgtggtcttgggtgccgggcgtctccgcgcctccaggatctcctctcacctgccccgcagttaaagctctgccactcatgcaggcatgtgtggaccagtgttttcgcctggccagagcccccacctgccactggaggccagttgccctcttagcactcaagcattaacacggtcttcacagaataatgctatggcgta

SEQ ID NO: 63836 - DNA, 618 bp, Homo Sapiens
caaatatcaatgatatggtagattgaggattttttgtctgtagctcaaaggtggagggagtttattagttaaccatatatcgttgagaggaatttaaaatactgttactaccaaagatttttattaataaaggcttatattttggtaacacttctctatatttttactcacaggaatgtcactgttggacaattattttaaaagtgtataaaaccaagtctcataaatgatatgagtgatctaaatttgcagcaatgatactaaacaactctctgaaatttctcaagcaccaagagaaacatcattttagcaagggccaggaggaaaaatagaaataatttgtcttgaagatctcattgatgtgatgttacattccctttaatctgccatctgtggtcaaagttcataggtgtcgtacatttccacttatttgctagtatcatgctatctgatgcttctcttttgttttgtacagtaagtagtttgaagtgggttttgtatataaatactgtattaaaaattaggcaattaccaaaaatccttttatggaaaccatttttttaacaagtgatgacacaatccacagagtaacagcggctgacattcatctaacattcc

SEQ ID NO: 63837 - DNA, 1364 bp, Homo Sapiens
  misc_feature (972)..(980): n is a, c, g, or t
  misc_feature (1044)..(1192): n is a, c, g, or t
  misc_feature (1194)..(1213): n is a, c, g, or t
  misc_feature (1255)..(1266): n is a, c, g, or t
gcccaacatccgtgacacctggactctttcagtttctgaagtcgatcttggagaaagagggaccaaagtcactttttagaggcttgggtccaaatttggttggagttgcaccatcaagggctgtatactttgcatgttactccaaagccaaagagcaatttaatggcattttcgtgcctaacagcaattattgtgcatattttctcagctggctctgcagcttttatcacaaattccttaatgaatcctatatggatggttaatacccgaatgcagctagaacagaaagtgaggggctctaagcagatgaatacactccagtgtgctcgttacgtttaccagaccgaaggcattcgtggcttctatagaggattaactgcctcgtatgctggaatttccgaaactataatctgctttgctatttatgaaagtttaaagaagtatccgaaagaagctccattagcctcttctgcaaatgggactgagaaaaattccacaagtttttttggacttatggcagctgctgctctttctaagggctgtgcctcctgcattgcttatccacacgaagtcataaggacgaggctccgggaagagggcaccaagtacaagtcttttgtccagacggcgcgcctggtgttccgggaagaaggctaccttgccttttatagaggactgtttgcccagcttatccggcagatcccaaatactgccattgtgttgtctacttatgagttaattgtgtacctgttagaagaccgtactcagtaacaggccggaaaattgtgctctagaagaataaaactggaaaactctagagaattttttttccccattgatgtttagaaagtttgagactgaaacaggaaaggccataaaatatctggttcatatcacctgttggacatttccttttggattcatgctttctggaaggtttaaattcattaacgttaatagttaattataacnnnnnnnnnaacttaagaggattcagggttaagcaccaactaaattaaatcatgctatttaatttaagtatannnnnnnnnnnnnnnnnnnnnnnnnnnnnnnnnnnnnnnnnnnnnnnnnnnnnnnnnnnnnnnnnnnnnnnnnnnnnnnnnnnnnnnnnnnnnnnnnnnnnnnnnnnnnnnnnnnnnnnnnnnnnnnnnnnnnnnnnnnnnnnnnnnnnannnnnnnnnnnnnnnnnnnncgccccccccgccccaagaaaaatttttctcacccttttttnnnnnnnnnnnncgccccaacccggggggaagaaacaacggggatatacaatgtttccccacaaaaaacacccgcgggtaaaaaaaccagggttgggtttccccccccac

SEQ ID NO: 63838 - DNA, 1029 bp, Homo Sapiens
caacgggggcatcactacatcacccttgatggccgtgtctacgacctgcatggctcgtgctcctatgtcttggcccaagtctgccacccacagcctggggacgaggacttttccatcgtgcttgagaagaatgcagctggagatctccaacgcctcctggttactgtggctggccaggttgtgagcctagctcaggggcagcaggtcaccgtggacggcgaggctgtggccctgcctgtggctgtgggccgcgtgcgggtgaccgccgagggccgaaacatggttctgcagacgaccaaggggctgcggcttctctttgatggcgatgcccacctcctcatgtccatccccagccccttccgtggacggctctgtggcctctgtgggaacttcaatggcaactggagtgacgactttgtcctgcccaatggctcagcagcgtccagtgtggagaccttcggggctgcatggcgggtgcccggctcctccaagggctgtggcgagggctgcgggccccaaggctgcccagtgtgcttggcagaggagactgcaccctatgagagcaacgaggcctgcgggcagctccggaacccccagggccccttcgcgacctgccaggcggtgctgagtccctctgagtacttccgccaatgcgtatacgacctgtgcgcgcaaaagggtgacaaagccttcctgtgccgcagcctggcagcctacacggcggcctgtcaggcagctggcgtggccgtgaagccctggaggacagacagcttctgcccgctccattgccccgcccacagccactactccatctgcactcgcacctgccagggatcctgtgcggctctctccggcctcacgggctgcaccacccgctgttttgagggctgtgagtgcgacgaccgcttcctgctttcacagggtgtctgcatccctgtccaagattgtggctgcacccataatggccgatacttgccggtaaactcctccctgctgacctcagactgcagcgagcacaacaccgggcgg

SEQ ID NO: 63839 - DNA, 718 bp, Homo Sapiens
gtaaccgcgtccggggttgcgggaggagatcgagcgggaggttaacatcctgcgttagatccggcaccccaacatcatcaccctgcacgacatcttcgagaacaagacggacgtggtcctcatcctggagctggtctctggcggggagctctttgacttcctggcggagaaggagtcgctgacggaggacgaggccacccagttcctcaagcagatcctggacggcgttcactacctgcactctaagcgcatcgcacactttgacctgaagccggaaaacatcatgctgctggacaagaacgtgcccaacccacgaatcaagctcatcgacttcggcatcgcgcacaagatcgaggcggggaacgagttcaagaacatcttcggcaccccggagtttgtggccccagagattgtgaactatgagccgctgggcctggaggcggacatgtggagcatcggtgtcatcacctatatcctcctgagcggtgcatccccgttcctgggcgagaccaagcaggagacgctcaccaacatctcagccgtgaactacgacttcgacgaggagtacttcagcaacaccagcgagctggccaaggacttcattcgccggctgctcgtcaaagatcccaagcggagaatgaccattgcccagagcctggaacattcctggattaaggcgatccggcggcggaacgtgcgtggtgaggacagcggccgc

SEQ ID NO: 63840 - DNA, 487 bp, Homo Sapiens
gtaccagggccaagtgggtccagacatccacacggattctgaaagggcaggtcaagcagactttgtccagccatcagccacggcctctcgacagcaccaagatggaagtcaaaggtcagctgatcagctctcctaccttcaatgccccagctgccctgttcggagaggctgccccccaggtgaagtcagagcgtctgcgggggctgcttgaccggcagcggaccctgcaggaggccctgagcctgaaacttcaggagctccgcaaagtgtgtctccaggaggcggagctgactggccagctgccccctgagtgcccactagagcctggtgaacggccccagttggtccgccggcggccccccacagcccgcgcctaccctccaccgcaccccaaccaagcacaccactccttgtgccctgctgaggagctggctcttgaggccctggaacgcgaggtgtcagtgcaacagcagatcgcggcggccgc

SEQ ID NO: 63841 - DNA, 426 bp, Homo Sapiens
gcgggtcccggccgcgccgccgccgcgcgcccctgcccgagagagctctggccccgctagcggggccaggagccgggcctcccaccgcagcgtcccccgccgcgccagtccccgctagtggtagtatctcgtaatagcttctgtgtgtgagctaccgtggatctccttcccttctcttgggggccggggggaaagaaaaggatttaagcaaaggctccctcgccctgtgagggcgagcggcaaaggcccggctgagccccccatgcccctcccctccccgtgtaaaaagcctccttgtgcaattgtcttttttttcctttgaacgtgcttctttgtaatgaccaaggtaccgatttctgctaagttctcccaacaacatgaaactgcctattcacgccgtaattctttctgtctcccttctctctc

SEQ ID NO: 63842 - DNA, 263 bp, Homo Sapiens
ctgtccctccctgaggtccctcatcttgtccctgctctgattctgtcagcagatcctgaacactccttggtggggacccatgcctccaaggctgcccccaatgccagctgtcctggggaaactccccagaactctcggggaaaggcccgagaacctttggaggaagcctccgggactcctcgccacctgctctgtttctctcccggccccactgccttcaggtatcaggaagagggcaggcccctgtgcccccttcccttccg

SEQ ID NO: 63843 - DNA, 1438 bp, Homo Sapiens
  misc_feature (21)..(21): n is a, c, g, or t
cgcccactctccaaaaaaaanaactgacggtaccggaccggaattctccggatggcagccgggggtctgagccgttccgagcgcaaagcggcggagcgggtccggaggttgcgggaggagcagcagagggagcgcctccgccaggtgtcgcgcatcctgaggaaggcggcggcggagcgcagcgccgaggagggccggctgctggccgagagcgcggacctggtaacggagctgcagggccggagccggcggcgcgagggcctgaagcggcggcaggaggaggtgtgcgacgacccggaggagctgcgggggaaggtccgggagctggccagcgccgtccggaacgccaaatacttggtcgtctacacaggcgcgggaatcagcacggcagcgtctatcccagactaccggggccctaatggagtgtggacactgcttcagaaagggagaagcgttagtgctgccgacctgagcgaggccgagccaaccctcacccacatgagcatcacccgtctgcatgagcagaagctggtgcagcatgtggtgtctcagaactgtgacgggctccacctgaggagtgggctgccgcgcacggccatctccgagctccacgggaacatgtacattgaagtctgtacctcctgcgttccctacagggagtacgtgcgggtgttcgatgtgacggagcgcactgccctccacagacaccagacaggccggacctgtcacaagtgtgggacccagctgtgggactccattgtgctactttggggagagggggacgttggggcagtctctgaactgggaagcggcgaccgagggctgccagcaagagcagacaccatcctgtgtctagggtccagcctgaaggttctacaagaagtacccacgcctctggtgcatgaccaagacccctagccggaggccgaagctttacatcgtgaacctgcacgtggaccggaaggatgcgtgggctgcccttgcagctacatgggacgtgtgatgaagtcatgcggctcctacatgggcggacgctgggctcggaccaagcccggataatagcacagggggcagggacccactaactcactggccgaccccactggatcgtgtgaaccaaggcaaccacacgacggcagtcagtgggaccacaggagaggcggcccgctgggcacaggcgtgacggaaagtacacacaacccagcgacagcatgatacgaggaggaacaaacgcactcacagtcaactaggcgagtaagggaagcagacaacgcagagatgcaccgaccagtgacaaaacagggcacccacgaagggaaatgatgaagaacatcgcgaatcagacgccaccacgataatgagagcaaggacaggcgaccacatgacagcgcagagacgaaccacagagcgcaggccacgtctgcgccctctcggcccg

SEQ ID NO: 63844 - DNA, 1136 bp, Homo Sapiens
  misc_feature (491)..(504): n is a, c, g, or t
  misc_feature (981)..(981): n is a, c, g, or t
  misc_feature (1102)..(1102): n is a, c, g, or t
  misc_feature (1104)..(1105): n is a, c, g, or t
atgatgaagagccaattgtggaagatgttatgatgtcctcagaagggaggattgaggatcttaatgagggaatggattttgacaccatggatatagatttgccaccatcaaagaacagacgagagagaacagaactgaagcctgatttctttgatccagcttcaattatggatgaatcagttcttggagtgtcaatgttttaataccagtacacaattaaatctgtggtgaagtcattttctaagtggaagaggaaattttaaaagtgtggtagatacagtgaaattctgtacagatttttctctaaggagaatatgacatgcttatgcttaccaagatcaagtgcattgaggggcagttttgtttgcctgaataaacgtaaaggacaagtaaacaatttgatgataagctacagtttttcttagaaagtaaatattttatttatgcgctgttagttggcttttgaatcgattatttcatgcttttttttnnnnnnnnnnnnnncaaaataacaatctgaagaggcatttggtacagatatgaattctcttacatttatttactgggttgtactaaataatgatgacctctgctggatttctgtttacatccagaaaacaatgttaaggatgtatttattcccctaccctgaagaaagtgtcggatagaattgtttttagcattctaaatttaaatgcttaaaacgtcaatcaacaaaactttgttttaaatattgtaattgtggagaaaagtaaacttataagcagaacttttacaattttttcatctaaaagtattttaagatatttttaaaatccaagagcttctctatacttttcagaaatatccagatgcagtgaactgccagaaggtaaccagtctcaaacatgcttatcccattatcaaccctgaaagtttgcttgtcctttaagataaaaatgtaatgttgtgatattccttccagtaatgccactgtatttngtctccaaataaaagaggcttattgtagtatgtttgcagaaaaattctaaacaaaaattatacagcttattagagtgtgggaatagggatctaaattttaaataaaattatatatatatananntgggtgctgattttataattgcgcagtttgt

SEQ ID NO: 63845 - DNA, 477 bp, Homo Sapiens
caatgctggactactgtctcaagatttaaattttaatgcagagtactttattggtgtgaggcacacaggtaagaagaaatgtcaacattaaatgtatgacttacttggtacaaaaattttttaaaaagggaactaccttgacattgtgtattaaatgtttacctaagactataatctcaagtatgatgtttgtttaacatatacctctcaaaatttatccccactcaatgaccctgcatcaaaattgactataaaactaattcaagaaatatttatatatattttttaatatacaaaaaatatttagcctgatggaatggctttccttttcaaacattattttctaagtttctatacaaatgaaatctttacctctgcatattaatgagccttgccataattactgtagagtggcttttcaaagatattttgttgcactaaaactgtggtagtaaactcagtgaacatgatgtgtgg

SEQ ID NO: 63846 - DNA, 339 bp, Homo Sapiens
gatggtgctagggaccccagtgaaaattgaggccatagacgaggatgcagaggaacccaccaacctggtggactattccatcacccatgcagagcccgccaacgtgttcgacatcaattcccacacgggggagatctggctcaagaattccatccgctccctggatgccctgcacaacatcacacctggaagggactgcctatggtccctagaggtgcaggccaaggaccggggctcccacatcacttcagcaccacagccttactcaagattgacatcgcagatgctgagaccctctcccggagccccatggctgccttcctgatacagaccaaggac

SEQ ID NO: 63847 - DNA, 426 bp, Homo Sapiens
  misc_feature (38)..(38): n is a, c, g, or t
gggctgggctgacatcaagatgggagcccagcccgggngctttataaacacccaagaaccgtttcagatcttctctgtgctgatgcaggtagttttaaatttttctcagttccagtgatagaaaacccacacaatacatcctctgccagtcttaatagaatatcagaggtaagaggggcctcagagaagctctgacgcagtgctgctggggaagggaagtgactaaccccgggtcagcctgccatttagggaaagagctgaggttcttacccttgttgcatgctgccacctctccttagccagtgctcttgtacatccacacagcaccctaaggagccatagtcaccatcaaagactcaaccctaaggcccttcaagatctcaaagtgccttctgaagcatcagagattaaatattgttcaaacta

SEQ ID NO: 63848 - DNA, 539 bp, Homo Sapiens
  misc_feature (46)..(67): n is a, c, g, or t
  misc_feature (488)..(488): n is a, c, g, or t
  misc_feature (491)..(491): n is a, c, g, or t
  misc_feature (496)..(496): n is a, c, g, or t
  misc_feature (503)..(505): n is a, c, g, or t
tttttgaaacccgggtaagttttgggctctcctgcccccccccccnnnnnnnnnnnnnnnnnnnnnngcctgaagagatgagataggaggaaagacctcacagccggatctgctgggttttgaggagtgattttctttcttccccttgaaggggaaaaagctattttcattggtacatttaaagtcccccaactatggggaggtaccaattctggacaagtgccactacaacaacactaaacctgaacttttcaactccgttggtggtgggaggcagcgggcagaaatttactgttggccactgccaggtctatttcatatttcaaaggaatattgggtgctgcatataggaactgaaggggtcaatgtattaaacctgtgattggttgttttcctgtcattttgagagactaaatgtggggggcagatgtcaaaatacctgtacaattttaaaatgtcacaattaaacatgagctggtttcccaaanaanacaanaaggaannnctaagggaataaatgggatatataaaaaggaaga

SEQ ID NO: 63849 - DNA, 370 bp, Homo Sapiens
atgcgaccagtggtgcgctgagccctgccaaagactgtgggtctcaaaaatatgcttatttcaatggctgctcctcaccaaccgctcccctctcgcctatgtctcctcctgggtacaagctggttactggcgacagaaacaattcttcttgccgcaattacaacaagcaagcaagtgagcaaaactgggctaattacagtgcagaacaaaatcgaatggggcaggcgggaagcaccatctctaactcccatgcacagccttttgatttccccgatgataaccagaattctaaaaaaactagctgctggacatgaattacagccactagccacttgtggaccagcgcctttcacagttcgtagggatcctt

SEQ ID NO: 63850 - DNA, 336 bp, Homo Sapiens
ggcccggccgtttttttacttgtttgttggattttaagggggcgccgagtgaaatgatagtcggtgagttcaggatcgacctttatgtccagagcgtttgttccgtcgtccatttcttgtctagagtagtggtatgagctgaaaacattgctaagtgatcaccacatattgttgatgtaagggctaccggttattacaagagatttttatgactcctgctgtgggggtgccctttctacccggctgagcttggtgggagccaaggctgagtcggatgtatctttatatccccagttctcaacggacttaaaatgctgtggtggcagaaattagcgc

SEQ ID NO: 63851 - DNA, 273 bp, Homo Sapiens
cattttggatgacgacacgatcataaccactctggagaacctgaagagagaggctgcagaggtcaccaggaaagttgaggagacggacattgtcatgcaggaggtggagaccgtgtcccagcagtacctcccgctctccaccgcctgcagcagcatctacttcaccatggagtccctcaagcagatacacttcttgtaccagtactccctccagtttttcctggacatttatcacaacgtcctatacgagaacccgaacctgaagggtgtcac

SEQ ID NO: 63852 - DNA, 471 bp, Homo Sapiens
cgtactgcgcgggatatggaaagggaattatgagtacctctattttttaagccttgcttttaaattaaacagctacagccatttaagccttgaggataataaagcttgagagtaataatgttaggttagcaaaggtttagatgtatcacttcatgcatgctaccatgatagtaatgcagctcttcgagtcatttctggtcattcaagatattcacccttttgcccatagaaagcaccctacctcacctgcttactgacattgtcttagctgatcacaagatcattatcagcctccattattccttactgtatataaaatacagagttttatattttcctttcttcgtttttcaccatattcagaacctaaatttgtttttgcagatggaatgcaaagtaatcaagtgtttgtgctttcacctagaagggtgtggtcctgaaggaaagaggtcccctaaatatcccagcgca

SEQ ID NO: 63853 - DNA, 419 bp, Homo Sapiens
cggatatgacagtcggcacgcttttgtggcgtcactgcactgttaccccgccctacgtgtctctgacgctgacaccttctcactgtgaaaggtcgcgacctgtgacgtctggggggcgcctcaaatcttccactccagcatcggatcccggaaaggcagcgtcggagactggacccaaaactcttcctgttctgcctgcagagttgagccccgtccgggtcctggacccgcgtagtactgaccctggatccctgttcactgcgttctcgctccccgcgctccctgctggaccccgggatgccgggcatctccgcccgaggcctctctcatgaggggaggaagcagctagctgttaacctcacccgtgtcctggcactctaccgttccatcttggatgcctacatcatcgacctttcaca

SEQ ID NO: 63854 - DNA, 524 bp, Homo Sapiens
gtatattatattctggtcgttccttgggttttaaacattggaaccaagcagttttcgctcttttaaaagtacagtgccttatttatcctttttgctatctttaaatttacaaaagctaaaaagctgatctatgtgattaaaggcttgtatctttatacttgatgcacatagcacttgtactgtagccgagaagaccaccatcatgcacatcaaaggagctgttctcagcagccagccctgcagcatctgccgcacgaacagatgcccttctattgcaaacccacagcagtgaacttccctctctgtcttgctttgttctgtttagatgatgtttgaaaggctaaacccaaatcattttactggtatgcagaggagtttataattatataaagattactatcttctgttacccccttttaaaaaagatcatgttcattgttggtccctcctctcaccgtttgatgttttgtcatttgagagcatgtattctaaattatgttaccatcggagccgagatctgtcat

SEQ ID NO: 63855 - DNA, 372 bp, Homo Sapiens
gctgggatatccgatctacaatggaaccctcaagcgggagcctgacaacaggcgcttcagctcctacagccagatggagaactggagccggcactacccccggggcagctgtaacaccaccggcgcaggcagcgacatctgcttcatgcagaaaatcaaggcgagccgcagtgagcccgacctctactgtgacccacggggcaccctgcgcaagggcacgctgggcagcaagggccagaagaccacccagaaccgctacagcttttacagcacctgcagtggtcagaaggccataaagaagtgccctgtgcgcccgccctcttgtgcctccaagcaggaccctgtgaatccagcgcaagtacggggatcctt

SEQ ID NO: 63856 - DNA, 223 bp, Homo Sapiens
cgtacttgcgctggatatctccatgaagttttcccactgagtcacatcagaaatgccctacatcttatttcctcagaggctcaagagaatctgacagataccataaagggatttgacctaatcactaattttcaggtggtggctgatgctttgaacatctctttgctgcccaatccattagcgacagtaggatttttcaaacctggtatgaatagacagaacc

SEQ ID NO: 63857 - DNA, 409 bp, Homo Sapiens
cctggcaaatcacatgtgttgttgatgtgagtatctgatgaaaaaacaatgtcagaataaccgacatgaaaattttttaggataacttggtgcctacctgaaaaatgtattgtgttttagactcttgatttcaaaaggttccacagaactagtctgcgcttaccttacccatgtttatatatagctgtcctacagggagcttttatttagaaaatgtctgcataatgttagattcttctcctgtctacattatgcactacataattggacttcattatgcttttgaaatgcttatctgcctgtcacataagttaaactatttaatttgttttgaatgttttgtattgctacacaatacaatattctaaatttaggcatgagggtttctacgatagtggtgatcctcaag

SEQ ID NO: 63858 - DNA, 875 bp, Homo Sapiens
  misc_feature (772)..(781): n is a, c, g, or t
ttacaaccccacgatcacctagaggagaaatctactactcctcctccggcagaacctgtttctctgccacaagaaccaccaaagccaagagtcgaagctaaaccagaagttcaatctcagccacctcgtgtgcgtgaacaacgacctagagaacgacctggttttcctcctagaggaccaagaccaggcagaggagatatggaacagaatgactctgacaaccgtagaataattcgctatccagatagtcatcaactttttgttggtaacttgccacatgatattgatgaaaatgacctaaaggaattcttcatgagttttggaaacgttgtggaacttcgcatcaataccaagggtgttgggggaaagcttccaaattttggttttgtggtttttgatgactctgaaccagttcagagaatcttaattgcaaaaccgattatgtttcgaggggaagtacgtttaaatgtggaagagaaaaaaacaagagctgcaagagagcgagaaaccagaggtggtggtgatgatcgcagggatattaggcgcaatgatcgaggtcccggtggtccacgtggaattgtgggtggtggaatgatgcgtgatcgtgatggaagaggacctcctccaaggggtggcatggcacagaaacttggctctggaagaggaaccgggcaaatggagggccgcttcacaggacagcgtcgctgaagctccactgttggcaaagtcttggcagtggtacattattcatcgtgtttgcattcttgttaannnnnnnnnnggctttggaatgtgacacagcctttttgatcatttctttgatgtgaaaagcatctttggttatcagttaaattgaggtggacattatttcccca

SEQ ID NO: 63859 - DNA, 543 bp, Homo Sapiens
ggtaatagttaagcatagaatcacatgaacaataaatgtatgttcctgactgtcatatcgtgacctgcaaattcacctttgggacgtacacaatgttaggcatacctccttttttctaatacatggaatacattttgttggaggtaatttatgtgattcatataccactgctacagtgttagctgccaacatatagtatgaggtaaggatctaattctgtttcctctcacatgattacttgatagctaagcatctgattggtttactgctttaccactgagctgaaatgccgtgttttccatttattaaaatcacacatggctcctgtttttgtcactcagcactttttctccatattcttcaagacgattgtgagtatggtacgtaacaggaattacatctggtaagttgtatagttttgtgtaggaactctatattcatagcatatttgtggaaatgatacctatggaggtttctcacactggtgtgtcattatacattaattgtacaatatgcattttcagtaaaatatttgaaaactgt

SEQ ID NO: 63860 - DNA, 413 bp, Homo Sapiens
tcccactgtgtgtcccctggcgctcttgcccatagagagccagacaccaatcctcaatggcaccttggtggcttccctctgccatgacagcccctaggccaggaaccatcagggggccagccggcatccaattcctgcggataagtagcgttgggagagaacgggaaaggggacttgggttacagggtgacccagaaagacgattcagctgtgtccagcctgccacccatacgtaggccaaccaagcacttcatgaagaggaggcctcgtggcatattcagtttacacctgaaatattccttgatgggacagcttgtggggatggctatgggggaaggggaggttgagaaaggaagttctcgacaccagaaatgcatcggaggaccacaatcagttctatgctgccaaagatt

SEQ ID NO: 63861 - DNA, 479 bp, Homo Sapiens
ggctgccacacagatgacctgaccagggccagcaagcttttccgaggcccactcgtaattaaccggtgctgcttggacaaacccacaaaatcgatcacgtgcctctggggtggactcctctatataattgtgcctcagaacagcaaactgggttctgtgcctgtcccgtgaagggggctgtgcatgctccatactacaagctgggggagaccaccctggaggagtggaagaggcgtatccaggagaatccagggccctggggagagctggccacggacaacatcattctgaccgtgccgaccgcaaatcttcgtactctggagagccctgagccgctgctccgcctctgggatgaggtgatgcaggctgtggcgcgactgggagctgagcccttccctttgcgcctgcctcagaggattgttgccagacgtgcagatatcagtgggctgaatgcatgcagggtaccccatcatgtgcca

SEQ ID NO: 63862 - DNA, 441 bp, Homo Sapiens
gccacacacactgtagcctgtcttgccatctttgtcttgttgccattgggtttgtttggagccaaggggctgaagaaggcattgggtatggggccaggcccctggatgaatatcctgtgggcctggtttattttctggtggcctcatggggtggttctaggactggatttcctggtgaggtccaagctgttgctgttgtcaacatgtctggcccagcaggctttggacctggtgctgaacctggcagaagccctggcaattttgcactgtgtggctccgcccctgctcctcgccctattttgccagcagggcacccgcacccttttgccctttttgcccctccctgaaggatggttttttcatttggacacccttggaagcaaatcctaggtttttttcccacctgtcaacctgaattaaagtttaccctgcctttgtgaa

SEQ ID NO: 63863 - DNA, 440 bp, Homo Sapiens
actttcttccagatgcctgtggtctctctgatgtagcccatgtggaaagcttgcaggaaaagtctcagtgtgctttggaagaatacgttaggagccagtaccccaaccagccgacgagattcggaaagcttttgcttcgcctcccttccctccgcaccgtctcctcctcagtcatagagcaattgtttttcgtccgtttggtaggtaaaacccccatcgaaaccctcatccgggatatgttactgtccggcagcagttttaactggccgtatatggcaattcaataaataaataaaataagaagggggagtgaaacagagaaagaaaaggcaaaagactggtttgtttgcttaatttccttctgttaagaaaggatataaaaggatgttacaagtttgctaaaagaagagaggggaagaatttaatggactgtgaatttc

SEQ ID NO: 63864 - DNA, 1049 bp, Homo Sapiens
  misc_feature (486)..(532): n is a, c, g, or t
  misc_feature (951)..(951): n is a, c, g, or t
acccaagtgaaaaacaaaagcaagaaaaagaagccaagggattcaaagcctatgttagttgggtctggaacaacttcagtaacttcaaataatgagatcatcacttcaagtgaagaccatagcaatcgaaattcagattctgcaggcccatttgcagtgcctgaccatcttcggcaagatgtagaagaattcgaagctctctatgaccaacacagtaacgaatatgttgtccgcaataagaagctatgggacatgaacccaaaacaaaaatgttcaactctatatgattacttctctcagtttttggaggaacatggtcccttggacatgagtaacaagatgttctctgcagaatatgagtttttcccagaagaaactcgacagatactagaaaaagcaggaggtttaaaaccttttctcttgggatgccctcgttttgttgtgattgacaactgtattgcactgaagaaggttgcatcacggctnnnnnnnnnnnnnnnnnnnnnnnnnnnnnnnnnnnnnnnnnnnnnnntttcaaaagcaggggagtatgtacgagttaaactacaactgaatccagctgctagggaatttaaaccagatgtaaagtctaaaccagtgtcagattcatcttcagcaccagcttttgaaaatgtgaaacccaaacctgtgtctgcaaattctcccaagccagcttgtgaagatgtgaaggccaaaccagtatccgacaattcttctagacaagtttctgaggatgggcaacccaaaggggtctcttctaattctcctaaaccaggctctgaggatgcaaattacaagcgagtctcctgtaattccccccaaaccggtgtcttgaggatgtgaaaccaacttattgggctcaatcccatttggtcacaggatactgtacgtatcttccttttcagagatttgatatcccccagacaccgncagcatacataaacgtggttccaggttttgccccagtaccccagcatatatacacccctgggccagcctttcctcgtgagtatcccgctacccagaat

SEQ ID NO: 63865 - DNA, 422 bp, Homo Sapiens
taaaaaagagttttaaataattatctatgtgcctgtatttcccttttgagtgctgcacaacatgttaacatattagtgtaaaagcagatgaaacaaccacgtgttctaaagtctagggattgtgctataatccctatttagttcaaaattaaccagaattcttccatgtgaaatggaccaaactcatattattgttatgtaaatacagagttttaatgcagtatgacatcccacaggggaaaagaatgtctgtagtgggtgactgttatcaaatattttatagaatacaatgaacggtgaacagactggtaacttgtttgagttcccatgacagatttgagacttgtcaatagcaaatcatttttgtatttaaatttttgtactgatttgaaaaacatcattaaatatctttaaaagtaaaa

SEQ ID NO: 63866 - DNA, 649 bp, Homo Sapiens
gacccctgtgtcttccgcgtgtctgtgcgcaaggagctgaaaggcgggaaggcttattccaaactgggcttcgctgacttgaacctggccgagttttcgggctcgggctccaccggtgcgctgctgcctgctcgagggatatgacacgaagaacactcgccaggacaactccatccttaaggtcaccattggtatgttcctgctctctggagatccctgcttcaagacgccaccatcgactgccaagtccatctccatcccaggccaggattcctccctgcagctgacgtgtaagggtggtggggcacagcagtgggggcagcagcaccaactccctgactgggtcccggccccccaaggctcggcccactattctcagctcagggctgccagaggaacccgaccagaacctgtccagccctgaggaggtgttccactctggccactcccgcaactccagctatgccagccagcagtccaagatctccggctacagcacagagcactcgcgctcctccagcctctcagacctgacgcaccgccgcaacacagtccaccagcagcagcgcctctgggggccttggcatgaccgtggagtgcctgagggcagtgagcggagcaccgcccccgaaagggatcctctagatga

SEQ ID NO: 63867 - DNA, 1073 bp, Homo Sapiens
accacagcactacgtgagtcacactcagtacaacccggcggcggttttaacaacaaaagcccacggcctggatacggtcggattccgggatatcgtcgaccacgcgtcgcagcccggcttcggaaaaacggcatcgtggtctcgcgcatcggcgtcaagatgtacgcgaccatcccggagctgggagtccaggtcatgttctccggcctcatcttctccgtggaggtgcccttcagcaagtttgccaacaacaccgagggccagtgcggcacttgcaccaacgacaggaaggatgagtgccgcacgcctagggggacggtggtcgcttcctgctccgagatgtccggcctctggaacgtgagcatccctgaccagccagcctgccaccggcctcacccgacgcccaccacggtcgggcccacacacagttgggtctaccacggtcgggcccaccacagttgggtctaccacggtcgggcccaccacaccgcctgctccgtgcctgccatcacccatctgccagctgattctgagcaaggtctttgagccgtgccacactgtgatccccccactgctgttctatgagggctgcgtctttgaccggtgccacatgacggacctggatgtggtgtgctccagcctggagctgtacgcggcactctgcgcgtcccacgacatctgcatcgattggagaggccggaccgggccacatgtgcccattcaccttgccagccgacaaggtgtaccagccctgcggcccgagcaacccctcctactgctacgggaatgacagcgccagcctcggggctctgccggaggccggcccatcaccgaaggctgcttctgtccggagggcatgaccctcttcagcaccagtgcccaagtctgcgtgccacgggctgccccaggtgtctggggcccacggagagccagtgaaggtgggccacacgtcggcatggactgcaggagtgcccgtgtgaggcggcacgtggacgctgactgcgacccagtctgccgtgccctgctggccccggcggtttcgtgcctgtgctccgccccggcggctgtgcccc

SEQ ID NO: 63868 - DNA, 501 bp, Homo Sapiens
atgggtgagaaggctaggatgcttgtctagtgttcttagctgtcacgttggctccttccagggtggccagacggtgttggccactcccttctaaaacacaggcgcccttctggtgacagtgacctgccgtggtatgccttggcccattccagcagtcccagttatgcatttcaagtttggggtttgttcttttcgttaatgttcctctgtgttgtcagctgtcttcatttcctgggctaagcagcattgggagatgtggaccagagatccactccttaagaaccagtggcgaaagacactttctttcttcactctgaagtagctggtggtacaaatgagaacttcaagagaggatgttatttagactgaacctctgttgccagagatgctgaagatacagaccttggacaggtcagagggtttcatttttggccttcatcttagatgactggttgcgtcatttggagaagtgagtgctccttgatggtggaatgaccgggc

SEQ ID NO: 63869 - DNA, 405 bp, Homo Sapiens
  misc_feature (128)..(128): n is a, c, g, or t
gaacggggagcgtttattgtctgtttttcagataaggaaactgaggtcagaggggctgcctttgtggtcatacgcacaaatgaatggaaggggatcctgaagagcatggtcgtgggctagggtgaagngagatcaccccagtaccacaacagtctatgcagacaaccaaggtgatgcactttctaccgctggcttcggtcgccatcctctctgcttcatgacccctggcctgcaccgcacactccacaacatgatgaaagaagctcttccttgcagctcatcgctggagttcaagcgcctggggtcatcagtcatctacgccaacttcaaccgcatcatcctctgtacaaagaagcgccgtgtggaagatgccatcgcttagcgtgcggtacgataagtcctgta

SEQ ID NO: 63870 - DNA, 685 bp, Homo Sapiens
  misc_feature (101)..(101): n is a, c, g, or t
gaagaaaggagggggcaagggagaagctgctggtcggactcacaatgaaaacgctccttcttttgctgctggtgctcctggagctgggagaggcccaaggntcccttcacagggtgcccctcaggaggcatccgtccctcaagaagaagctgcgggcacggagccagctctctgagttctggaaatcccataatttggacatgatccagttcaccgagtcctgctcaatgggccaagagtgccaaggaacccctcatcaactacttggatatggaatacttcggcactatctccattggctccccaccacagactttcactgtcatcttcgacgctggctcctccaacctctgggtcccctctgtgtactgcactagcccagcctgcaagacgcacagcaggttccagccttcccagtccagcacatacagccagccaggtcaatctttctccattcagtatggaaccgggagcttgtccgggatcattggagccgaccaagtctctgtggaaggactattcgtggttggcaagcagtttggagagagtgtcacagagccaggccagacctttgctccctgcagagtttgatggaattctgggcctgggataaacctccttggctgtgggaggagtgactccagtatttgacaacatggtgggtcagagcatgaggtagatcctc

SEQ ID NO: 63871 - DNA, 849 bp, Homo Sapiens
tggtacgggtcggtatccgggattgcgtcgacccacgcgtcgactggcggcgctctccccgcttcttcgcagtcttcggccctctcctgtcgccgccatgagcactggcaccttcgtcgtgtcgcagccgctcaattaccgcggcggggcccgcgtggagccggcggacgcctccggtaccgagaaagctttcgagccagcaaccggccgagtgatagctactttcacatgttcaggagaaaaggaagtaaatttggctgttcaaaatgcaaaggctgcttttaaaatatggagtcaaaaatctggcatggagcgttgccgaatccttttggaggctgccaggataataagggaacgggaggatgaaattgctactatggagtgcatcaacaatggcaagtccatctttgaggcccgcttggacatcgacatttcctggcagtgcctggagtattatgcgggcttggctgcatccatggctggtgaacacatccagctcccaggtggatcgtttggttataccagaagagaaccacttggggtatgtgtgggaatcaggaagcatggaactacccctttcagattgcctcttggaagtcggctccagcattagcctgtggtaatgccatggtctttaaaccttctccctttacacctgtttctgcattgctactggctgaaatctacagtgaggctggtgtacctcctgggctcttcaatgtggtgcagggaggggctgccacaggccagtttctgtgtcagcatcccgatgtggccaagtctccttcactggaagtgtgcccactggcatgaagatcatggaagtgtgccctttagctgacatctcca

SEQ ID NO: 63872 - DNA, 1152 bp, Homo Sapiens
cgcctgtatgagctcacacgcatcgaccgctggttcctgcaccgaatgaagcgtatcatcgcacatgcccagctgctagaacaacaccgtggacagcctttgccgccagacctgctgcaacaggccaagtgtcttggcttctcagacaaacagattgcccttgcagttctgagcacagagctggctgttcgcaagctgcgtcaggaactggggatctgtccagcagtgaaacagattgacacagttgcagctgagtggccagcccagacaaatttcctatacctaacgtattggggcaccacccatgacctcacctttcgaacacctcatgtcctagtccgtggctctggcgtctaccgtattggctctagcgttgaatttgactggtgtgctgtaggctgcatccagcagctccgaaagatgggatataagaccatcatggtgaactataacccagagacagtcagcaccgactatgacatgtgtgatcgactctactttgatgagatctcttttgaggtggtgatggacatctatgagctcgagaaccctgaaggtgtgatacctatccatgggtggacagctgcccaacaacatggccatggcgtagcatcggcagacagtgccgggtgctgggcacctcccctgaagccattgactcggctgagaaccgtttcaagttttcccggctccttgacaccataggatatcagccagcctcagtggagggagctcagtgacctcgaggtgggctgggacctggtgggttacccggaggctggatgatgcttgggggaaagtgtgaacaactcagctaagctccctgactcctgtagtctgctcgccaattctgccagaccgtggggtacccctgtgtggtgcgcccctcctatgtgctgagcggtgctgctatgaatgtggcctacacggatggagacctggagcgcttcctgagcagcgcagcagcgtctccaaagagcatcccgtggtcatctccaagttcatccaggaggctaaggagattgacgtggatgccgtggcctctgatggtgtggtggcagccatcgcacatctctgagcatgtggaagaatgccaggtgtgcatacaggtgatgcgaagctggtgacaccccacataagatatccatgcaa

SEQ ID NO: 63873 - DNA, 817 bp, Homo Sapiens
  misc_feature (35)..(35): n is a, c, g, or t
  misc_feature (60)..(60): n is a, c, g, or t
atgaggggttcgccacctatgagaccaagcgtggngggcacttgctggagctgctgaacncctcggaggtcttcggggacatcatgattgactacacctatgtggagtgcacctcagccgtgatgcaggcgcttaagtatttccacaagcgtttcccggagcacagggcagcggagatccgggagaccctcacgcagggcttagagttctgtcggcggcagcagagggccgatggctcctgggaaggctcctggggagtttgcttcacctacggcacctggtttggcctggaggccttcgcctgtatggggcagacctaccgagatgggactgcctgtgcagaggtctcccgggcctgtgacttcctgctgtcccggcagatggcagacggaggctggggggaggactttgagtcctgcgaggagcggcgttatgtgcagagtgcccagtcccagatccataacacatgctgggccatgatggggctgatggccgttcggcatcctgacatcgaggcccaggagagaggagtccggtgtctacttgagaaacagctccccaatggcgactggccgcaggacaacattgctggggtcttcaacaagtcctgtgccatctcctacacgagctacaggaacatcttccccatctgggccctcggccgcttctcccagctgtaccctgagagagcccttgctaggcacccctgagaacatgcctacctgctgggtgccgtctgtgcgttccagtgcaggccaacgggcgtccctgggccccgcggctactggcggcagacccgtcgccactaacgtcctga

SEQ ID NO: 63874 - DNA, 732 bp, Homo Sapiens
cttccatcaggagcttagttatggcaggattccttgtagggctcatagcagtacagagaggtaagtcttgcctcagagggcctgtatcttgcggtagtttttaaatagggcatagtgtataggtatagaggacatttgtttgcacatagtttgttgccccgaatgggttttttacccagccttttttctttcagtatttaccagtccggagcaccagattctcttcttttccaaaaaccaaagtaattcgctttactttaccaaccactaaatctgggctcttgaatttccccgtgcattggactgattggattgttgggagttagaggctgttcccaccatccttagtttgggagagtggctccttctgcttgttttctaagcgtaccagtcaacgggtgccctattgtggtatttaacatagttaggatgattgttcccaatagctgagttgttttatattctagatgtgaattagttcactttatgtaataattcttctctcagactgactttaaaaaccaagtgtttatcattttccattgtatttgtatttattacagagtgttttagctttgatattctttgtattttcattcatttgttacatgagctttatcagtaacatctgtataaatggtttttaaaaattaactatgtatgtgcccatgccgaagtcgagccatataaatccatgctgtttgcactgtcacagcatcaacgttttttaag

SEQ ID NO: 63875 - DNA, 873 bp, Homo Sapiens
tcagaagacactgatttcattttgtgaaatttagctcagagactattgatcttttgtttcattaatatgaacaactattagtaaaaaatagctttaacagcatttctgctgatatctagtaatctattcttttaatgtgaaaataagataaaatgtcctggagctaattctagcttaaatttgccagtatttctgtatgtcattaagtttttttcctctaaggttggtaatagaattttgttaatctttgcatacctgatggcatctatgtcaatgctgattgggtaattataaattctgtgctaatttaaaacttaatttgcctcttaaggtgattgtcctctgagtaatgattgtagttaaatgaagtatagcttgcaactatactatcacatgggtcgttaagtaaaaataaataaacccaatttgtctgagacaggctaagatcaatcttctcatcaaacccatttttctctaagagccatttcactttcagttttaggatggacattcttgaatgcctccaaattaaacgttatctatttaatcttcttggaatagtctgtgacccaaaaggagggtgtgatatatttaggtgtaaatatatcacatatatggtgtgatatatttgggatttatatattcagctcattctctgtgaagaagtcttcctgactaaaattggtttcaagataaactaatttctgttagtatttctactctgcctaccatgtatgcctttttgttagaaactaataaatgtatcagtcactagcaggtactggtcctttttcctctcatttttgtggaaaggatatgccaacactgaatttctcagggagtactaaggctgtgcagaggctgagaattctg

SEQ ID NO: 63876 - DNA, 405 bp, Homo Sapiens
  misc_feature (276)..(300): n is a, c, g, or t
ttttcttttaattacaagtagagcttgttacctatatgtagaaggaaagctaaacattttgatataaaattagaaataattcaccaaaataactgtaggtaaagtaagaagagctcagacattcgattcataataataccataagggaaacacactactttgctgtagttcaccaaaatagctgtaaaggtcactgttaactatttaactttctcttaagaacttgtttttccctgtttattagtacataattaaaattcttattcaggcccagannnnnnnnnnnnnnnnnnnnnnnnnctggcctggccgtaggtttgtaactgtttcatagaagagccctggagaagacagtagaatgagcctatctagtttaaaaaataaagaagcacgttgatttcaccc

SEQ ID NO: 63877 - DNA, 640 bp, Homo Sapiens
gccttgttatttgatgtatatcttttaaatttactgaccaaagcatgttttaagctgcaatgcagtagtcacgggtggtaaccatgtagtcaggtattgttattagtacctatcactgctgagctgtatttaaaattttggtacaatatataaaatggagaagagcttgatattcaggtactaaccacaactagtctgacattgttggcagttaaaatcttattttgaattgtaaattagttaaattttatgtggaatttgctgagaaaagaatatagactactgaaatgtcattttagttatttttcttatgaccacattgtacaaatgaatctgtgttaaaaagactattttaaatgtatttcctgcttttgtaagcattaaagatttataagaaaattattcaaactattttttataaaatgaaagttatgatttttaaacttattgattcctcttgcccctaccccctctttttggaagatattttgattccttataaacttttaccctaagcttatatatgttttctgtcacaagtgcttcctggcacacagacagccaatggaggggatcaaattcagtgttgtatgtatgtttatggcaacattttgaaaataaaaattaaatgtttttcttc

SEQ ID NO: 63878 - DNA, 478 bp, Homo Sapiens
  misc_feature (413)..(433): n is a, c, g, or t
aaaaccagcattcccacggggagttccggtgcctaccacgaaaagtcgcaacactgcttggctcttgagggcgcctaggaggtcggtgtcgcctaagatgggataatggcttcacggccactcctagccttccccatatctcctgcctcagcccccctggcccagtgctggggcgtcagctaaacctgagcttccaagaagtcaggttgccaaaggaaggagccttttgagaccctccccaacccacccaggttcccaaggccctgccgtaccctggggaatcaaccaaggagttcttgttctcgaagaaccccaggcctcatgatggtctacggtagaggtccaacaactacagcctgtgggccacatctggccacagcctgatttgtaaataaagttttattggaacaccnnnnnnnnnnnnnnnnnnnnngggcgccgctctagagtatccctcgagggtaacagcttagcgcga

SEQ ID NO: 63879 - DNA, 361 bp, Homo Sapiens
ggggatttcttcattttctaatagatgtgggagtgctccattttccccgacagcgaatttcccctgagaaacgatgctagaccctgggtttgcccaccttgtaactcttccttatctcctccttttcatccctaattcatcctccctctggcatggaattgacgcccgtgcagtacatttgccaagtggcaccttctttcaatttatgttttattttgctatggtggtgattctttatttgctggttgtcttttctcacacatctttctctctgtctctctctttcctgctctttgtttttctgcccagaaaaacctgacttcgataccaaaaaaagatgaaactacagaaactcaaattt

SEQ ID NO: 63880 - DNA, 941 bp, Homo Sapiens
  misc_feature (88)..(88): n is a, c, g, or t
tctgcttgaatgtcttctcctttaccacctcaacttgttggtacctccctccctggatctctgagccagcagccaggaggacctgacncagcagttctttactggcccctttgtagggccttgctgccagggggcagggatgctttccagcctgcagcaacagaacacttgaccttaaaagtctcttctggtctttggattagaaaaggcttatgttagcatagcttaagagcaacctcagagatttgagccctactaagtgactgaccactgtttagagtgtctggtatctgatgttcatttattcccatgttcttgtgtgtcacagttcagccagttttggtttatgcctagagctacttcaaggagctagactaattagctatataggcccagcgatgcttcttattgatcttaatagtatgcccctccttcccctgtcctttcatttctctatccaagtagcagtcaggttcttggtgtggtgggactgaaagaattccagtcagccagagccttggcagctctgaagctaaccttagcatctaagtgtcgatcttgaattccctgaaaaaatttctataggaaatgaagcttccctggtcccctcctttctggccattgtcatccatttcccagttagggcaacaatgaaggaggacccagccaagctagaaggaattttgtggatgggagacagcaggattagcttcagcttgggctggagcagtcaatataggatctcaggccaggcccgcttttctagaatgtgtttaattttgagtttgctttattagatatgttttttaagagctctgtatatttgaactgctccttatgtgacaaaataggtagctcttgggctcatgtcctgggttttggctctttaatgattactccagggcagcatttagtcgtttgagaattgtagcctgttgttt

SEQ ID NO: 63881 - DNA, 907 bp, Homo Sapiens
  misc_feature (480)..(483): n is a, c, g, or t
  misc_feature (490)..(490): n is a, c, g, or t
  misc_feature (495)..(495): n is a, c, g, or t
  misc_feature (502)..(502): n is a, c, g, or t
gtctagcctggggtgtgtatggagggtctagcctgggtgagtatggagggtctagcgtgggtgtgtatggagggtctagcctgggtgagtatggagggtctagcctgggtgtgaggcgcgtgcagggtgagtgtgagtggacgcgtgagtgtgtgagtgtgcgcgcttggagcgtgttaggcgagtgcgtgcgcccacccctgcgcccctcctcccgcttacactttgatcttatttgatcggatcgtgaccccagccccgccgggccgacccgaaatgaaaagctctcctcctgcgaagccccctcggggcgctgtgcagcgaggccccttaggcggcggccacgctgtggtccccgaggtcccggagctggccctgcggggcccggcgctcagaagtgatgaattgatcagatagacgaggccgggcttgtccccggccactgattatcgaggcgattctgatctgggcacggtcccnnnnccccgcnccccnttaaaancctccttgtcgggccgccctcggccccctcgaagaagcttttctagaccatttcgttttggccccgcggggcccacttaggtccagtgaaacatgggtcaataccgtgttcccctagggagatccctgggccatggacctaggggctttggcattcctcaccaaattaaaaaacccccccggggggcaacccagagccgtttctgaaaaccaactccaaaaggggggtttcctgaaggtcctttttctgggtatcctttccaaagggaagccccaggccgaaccctcaatttattaaatttagcgcccccggcccttggccactttaattggcaagaacctgggttgccaaatttcacttaaagcctttcctgtccggaaatgtgggaaaacctcttccccaaac

SEQ ID NO: 63882 - DNA, 501 bp, Homo Sapiens
gattcaaagtggttatttttattatcttacctccactgggttttcagtcccaatggagattgtgagacctggcaagaccttgagatcagtagcatccctgaggggtaaacacaagactggtccactgtctgctgccctgactttcctacaactcttaagaggtttgcagtccccattcctcatagccagccatagaaatctttccctgaaacaggaaacactttgggcagcagagcttctcatcccattccaggtagacaaccacacccctaaacactcctctccataactgaaggtcagagggtgaagggaatagtctctgctctctgtgaccaggaacttcactcgttcctttccagctctgccaatggacttatgtcctccactgccctgtttatcaacagctttacttgtttgtccccaccactagagtgtgggcagcttgagtagagtgtctggttcaccactgatctcagcatcagcctcagtcactgctgctga

SEQ ID NO: 63883 - DNA, 488 bp, Homo Sapiens
agctgcggtcggacttccagtgcgttgtgggcttcgggggcattcactccacgccgtccactgtcctcagcgaccaggccaagtatctaaaccccttactgggagagtggaagcacttcactgcctccctggccccccgcatgtccaaccagggcatcgcggtgctcaacaacttcgtatacttgattggaggggacaacaatgtccaaggatttcgagcagagtcccgatgctggaggtatgacccacggcacaaccgctggttccagatccagtccctgcagcaggagcacgccgacctgtccgtgtgtgttgtaggcaggtacatctacgctgtggcgggccgtgactaccacaatgacctgaatgctgtggagcgctacgaccctgccaccaactcctgggcatacgtggccccactcaagagggaggtgtatgcccacgcaggcgcgacgctggaggggaagatgtatatcacctgcggccgc

SEQ ID NO: 63884 - DNA, 277 bp, Homo Sapiens
  misc_feature (13)..(13): n is a, c, g, or t
ttccaccctttanatcttaggatgacaagttataaagaaagaagatctttgtctgggacccccaaagggatcctttctctaaggtctctgacagtgggtccaggaccagacctctctacaaaaaattgccccaactacagtttgcaaccccaaaccacattagaagtctgtgcagacatccctccgtggtgtgtgtcttggtgcattggaaaaggagtcaggagccactgtgaggtgagaatgaaagtggatctcagctgggcacggtggctcacgc

SEQ ID NO: 63885 - DNA, 486 bp, Homo Sapiens
aactgcagccatgtgggcctgtcagcactgcacgttcatgaaccagccaggcacaggccactgcgagatgtgcagcctccccaggacctagggcgcctgccctctgctggctaggaccgggcccagcccagcccttcctgaagccagaagcgttgctgagtgtgttccctgtaactgccccatagtgggcagccctggaggaacaaggggctggctgtcctgggctccctgacccactgaagcttctcagcacgttcctccctggagagcgggcgccacggctggtattctgcaggctgaatgcagtctccagactggaaacgcagagcggctcctcacgcctaatcctgttgacaagtcccccgccgtgttggaaagacctctcgcctctacgtggcacctggcattggggcgcacagggaggtgcggatgctgccaccacccagccttctctttattttcaggcaatttgtttggcggggatcc

SEQ ID NO: 63886 - DNA, 244 bp, Homo Sapiens
tctagacgatccttatcctctccgcagccaacgcaacctccacagcagccgaatgtctcctcagcataaagctttcttaagcctcattaagaaaaaaactgaaagcaatctatccttgtgtgccactggtgttctttccactttatacgaaagcaagtagccatgctttggttgtgtgtttggccttttcagtattagacaatcattctacaagagcttttcctctctctgagatgtcatgcag

SEQ ID NO: 63887 - DNA, 489 bp, Homo Sapiens
gtgaagggccgtgttgctttcagtgggtgggcagaggtttagaaaggtggttctgaaatggcacctggtactcttgtgggacctggggaatataaggaactctgtgcatgaggtttcaaaaataaaaattgagtccactctccccgtacacacacactcgggcacttcaggaggtcagttctcaccccttcctcgatggggctttaaagctttggggagaaagagctgctccccactcatgccccagagggactgtgaaaaggcttcctgtgacctccgatggcggcccctcattggccaagggcactgtggatgttttgtgggaggcagcatggcaccgtggaaagggcagtagacgtggagccggcacctttggtttggattccactttaaaccagttgagtggtttcaaggccttaacctttgtaagcctgtttcttctctgaaatcacagtaataaagcgtcgtaagatggttgggaagaaccaa

SEQ ID NO: 63888 - DNA, 451 bp, Homo Sapiens
gcacgaggtccctcggggcggcgggctaacgcggccgctttgttcttcgcttctcggctcgaggccccagtctcgaccgccgaccgcctcggaaccgggctgcatccgagctgccacgcggcgtgtgaaccttgaagcgcggccggggaatccgcaaggcgccgactctcttcctccttgcaagcccttcgaaagtgagatttctcaccccacccttgcagggtggagagaacacgtttcaaaaaggggatgcctagaactcagccgtgggaagtgcctgtctaaagccttgtgctggtgccagtagcaaacccgtgcgcgtgctcggctttgagcgatcatggagctctgcaaatagctcaactgcagagcgtgccccttagagctcctgtgctgctgggaggcctcataaaggtgccaaaaccaggtgtccccagcggttggcctcttt

SEQ ID NO: 63889 - DNA, 605 bp, Homo Sapiens
ccagaacatctcatccaacgtgctagaggagtccgccatctccgacgacatcctgtcgcccgacgaggagggcttctgctccgggaagcacttcactgagctggggctggtagggttgctggaacaggcagccggctacttcaccatgggcgggctctacgaggcggtgaatgaggtctacaagaacctcatccccatcctggaagcccaccgtgactacaagaagctggccgcggtgcacggcaaactgcaggaggccttcaccaagatcatgcaccagagttccggctgggagcgcgtgttcgggacgtatttccgcgtgggcttctacggcgcccacttcggtgacctggatgagcaggagtttgtgtacaaggagccatcgatcacgaagctggcagagatctcacaccggctggaggagttctacacggagagatttggcgacgacgtcgttgaggattatcacagactctaacctctgtggacaagtccaagcttgactcacaaaaggcctaacatccagatcacgtatgtggacaccgtactttgatacctacgagctcaaggaccgggtgacctactatgaccgcaaatatgggctt

SEQ ID NO: 63890 - DNA, 323 bp, Homo Sapiens
ggtcacccatgtctggtctcattcctgttgcagtgaaacttcgagttccacagactttgcatgctggcttctctaaccctgtgtgctgcgtgtgcctgtttctcatctcttattctttttataattcatgcttaactactgtgggagaataactgtaaacagctttaattaaatcatacgttataataaactattttcttatattccactctatgcttttggtattgttgatctttacaatattatatggtctttgatatatggatctattttgtattgccttattaagacctgatacttcttgtcatccctgtgcgatatag

SEQ ID NO: 63891 - DNA, 902 bp, Homo Sapiens
aggcggaccgagccggctggcgcgcgagaagagacgccgggggtacagccaggaagggaggaaggcaagaagggatcagctgacagaggcggcccgacaggtgcctgggccctactgcgtgtgccgtcaccctcgttcgaacgacgttgcacgggcctctggcctgccggatgtgcctgcgctgcccgtcttctccctgggctgagcgaagccatgcccctcaattcagggaagggcaaggagccgtgttgcactgcgattcaggtaatcagaatcagtgcgttccggtctgcgagcacggaaaagcacagaatctttcttttgctgtgactgaaatgtatccctcgttaatcatgccccgtttgtttgtgattgcgtgctaaagtcagtagtatcgtttgtttctcaaaggaaggtttggtgtttttaaccatcgctgttccagcaaagatgataccttaaactcccactgcaagcccatgaacttcccagagagtggaacggctgtgctcttctttctagaagtgtccatgcatcttgggttttaatcagcagttccctattagttctgattttaagcgtgttcctgtgatgaacttagagacagcatcggtgtctgctggtctgtgtccccaggtcttcgctgtgggtggcacagatctgggcagttagatagtgctctgtgcctaaggtgaagccacagctagggtgaagcctcacttccctgtttgagcaatgcagtgcctgctgcccgtgtgcacctgaaggtacagccattcagataagtggaactattgagttacataaagaaaatagatttgcatttgtccggcagacgtttatacaacaccacggtgcttttatacattgtgcttattttaataaaactgaaattctatgtg

SEQ ID NO: 63892 - DNA, 664 bp, Homo Sapiens
ggggggcacggctcctaagatccagcccccatactgacagacggacagacagacatgcaaacaccagactgaagcacatgtaatatagaccgtgtatgtttacaatgttgtgtataaatgggacaactcctcgccctctacctgtcccctccccctttggttgtatgattttcttcttttttaagaacccctggaagcagcgcctccttcagggttggctgggagctcggcccatccacctcttggggtacctgcctctctctctcctgtggtgtcccttccctctcccatgtgctcggtgttcagtggtgtatatttcttctcccagacatggggcacacgccccaagggacatgatcctctccttagtcttagctcatggggctctttataaggagttggggggtagaggcaggaaatgggaaccgagctgaagcagaggctgagttagggggctagaggacagtgctcctggccacccagcctctgctgagaaccattcctgggattagagctgcctttcccagggaaaaagtgtcgtctccccgaccctcccgtgggccctgtggtgtgatgctgtgtctgtatattctatacaaaggtacttgtcctttccctttgtaaactacatttgacatggattaaaccagtataaacagttaat

SEQ ID NO: 63893 - DNA, 635 bp, Homo Sapiens
aaatcatcagtcataatagcacctattgaagggcttactgtatgccaattactgattaggacactttacaagcacttatagtattaatttttatagcaaccatatgaggcaggtacactattggcctcattttgcaaatgagacaaacgcatagaggttaaatgcccaaagccacatggctactaagtggctgagcctagatttcacccgagtgcccacatgtccagctactctgctctgttgcctgcaggatcacagtgcagtgttgctcactgcagctgtgcatgagcaaggcagctgagtgtgaacaaaggggaaatgtaacctaattcttctaattctatgatttgatgcacaaagggctccataatcgtgggaattgattacgactgccgggagaggatggtgtactggacagatgttgctggacggacaatcagccgtgctggtctggaactgggagcagagcctgagacgatcgtgaattcaggtcagcagcttcactcagcagtctgcatttcatttgattctacaaagtcacttgtctactttacgccgaagtctcccctcgatttttctccattaggggaggttaagttctaggcaagtcattttattgagctgtataagactag

SEQ ID NO: 63894 - DNA, 324 bp, Homo Sapiens
atgtctaagtagtagattatttgcatatttgtaaaaactgttaggtctttatattttaaagtgtaataccagttttgttattttagtagcagaaatgggatgattgttaaagttccccaaaaatgttggcatgaaattaatttttccctccttatagtcaaggaccgtagaggaagaaaaacttttttttcatatcatgcactatgtaaacagacacattttgctatctgtgtcatcaggatagtgtaagtggtagggtagagactaccctagacatctgcatctttgtaagttagccagacaataaagaaaagcagaatgaaa

SEQ ID NO: 63895 - DNA, 639 bp, Homo Sapiens
  misc_feature (32)..(32): n is a, c, g, or t
  misc_feature (35)..(35): n is a, c, g, or t
  misc_feature (39)..(39): n is a, c, g, or t
  misc_feature (69)..(69): n is a, c, g, or t
cactcaattgcctttttaatgaatgtacttgnctngggnaggttgctggtaaaccattttaaactattntttatagctgaagttcttcactactataaacatgtcttctgtactataaaatccatttaactggtgttcttaaaatcagagcgtccagaggaaattcttcctaaaactaggattcctgttcctttgtcttctcactcgcactctggcactgctccctctgaagtgcagtgggatctcgtgtgctttgtcttgattctgtgctgcgctgccgctgggcgatgcagaccacctgtcttctactgaaggacagtccgctgtctccagtgggggcagcagctgtcccccagcctcgatggagacactggggcagtctgccttgtctgtggagctgctctctctccctcatcccaccccaaatacttaaaatgacactacacccagacggcgcccagctggctgcagcacttgtagcatgcacatgactctggtagtaaccaacaaaaacttgttttatggattcctcgtttactgaggaaagggaacatgctggttctggaaaagccacaatattgaatctaaaaggaaaccgtttattgtttgatgaaagtttcactggttaaataaaaaact

SEQ ID NO: 63896 - DNA, 516 bp, Homo Sapiens
ttcaaggtagaatgagaatttttactttttgacatggatgctttttctctgcagcagtacccaagttacagagaagaaaagcgtcgctgtgagtaccttcaccagaaattgtcccacattaaaggtctcatcctggagtttgaggaaaagaacaggggcagctgaagttatcaagggaatttttgagcctctgcttagtgaaacacaaaggaacaaagcagctataaactaaatagaatgcaactatctgcttttcttatgctgaccactggagtccatggtggcaagtagagagctgctctaggttcttgaggtttggttttcattattaatttcttagggtatgggcactgtgctaagactccactagctgtgcctacggagtctaggaaaagtgacagaggcttggctttttttacctttagattcagccaagtcattttcaagtcctgagaaatgacaatcatccacaggatcatatgatgaggacattagcccaccaactaatgaatttac

SEQ ID NO: 63897 - DNA, 429 bp, Homo Sapiens
  misc_feature (56)..(140): n is a, c, g, or t
agagactcgccccgcccctgtatcataagcctttaaatggagtcaactttttaatnnnnnnnnnnnnnnnnnnnnnnnnnnnnnnnnnnnnnnnnnnnnnnnnnnnnnnnnnnnnnnnnnnnnnnnnnnnnnnnnnnnnncattctgacgtgcagaatattattttttatttcctgttagattatagtgtctagcaccggcttcaccggcctcccagtccccagcacaccccccgcccaccccgccaagtgtactgtactcaccccccaggatagagaagtgtttgttagggagagaagagggagaggcaggagccggcccaagcccagggtccctgcttgggccccagaaagcacttaaccaggccccaagccttcaagggaaaccaaggcctcaaccagacaatcttgagggaaggaaaagccagac

SEQ ID NO: 63898 - DNA, 567 bp, Homo Sapiens
aggctactcctaactaagcgttgcctttcacggaccccgctggaagcttgtagcttggcaaggctgatgcttctgccctgtcctgctctgggtggtggtggataggtggacagacggccagccagccagctgttgccgggggcccggctccatgtgtcccgtgtctgtgtgctgtgctgccgcgccgtgtctgatgtgtcagtgctccggccgccgctgtccctttcatcaaagccttaacctttgctttatgctcttgtgggaggcgacgggggggcaggcgggagcaggcacgggggtgatgctgccacagggggctggtgacacccagagccccctccccagccctcaggccctccctgccaaactggagaaccccaccccaaggcatgccacgtccgcagccccggcctggctgcggtgctcgcgccgtgggaaagcacactggggaggggtcagtgcttcccttggtgtcagggacctgagagtaagcacatgacagcgtctgcttgcgttgtgtctgttttatgtttttatatctacatctatatatctataattttatta

SEQ ID NO: 63899 - DNA, 456 bp, Homo Sapiens
aaataggggtggagtcctcaaatgtccccccacatcaaagtcaccagttcatctcttctctctaccaaaagcttgaacgtctctcagcatttttggaagcataaggaaaggttcagaaattagaatacacattccaaaagcacttattcagcacttgctatgtgtattgcttgctatttgcactggagagaaacaagaaaagtaaaactaagagaacttagcatctgattgactgttccctttcttttatcccctatacgtcaaaggtacctaaagcttggaatttatgttatttcaaggatattggttccatcaaatacataatgaagattttgtgaagaaaaagcgatgttgttttgaacattgagagtttgaagttccacctatgggggcattcagattcagcattcccttcaggattggtgcttgggagatagattgagtcatcatttacaa

SEQ ID NO: 63900 - DNA, 679 bp, Homo Sapiens
ctcaaaggtattttgcttagaaattcaggtggcccataccctttgtcctcccagcctggcatccaggcagggacaccctcacaccaccagccccaggagcttccctgctataaacacagacccccttgtctttgcctctgatttttacacagtgtagagtggccagcagtgaacaggttgaggatgtgcgggtagatagataactttgggtctggtttgtgtctgtgttcatgtttgtttaagggatatgtgtgactgtgggtggggacgtgtgcttgtggggcacaggtggcggcccctgctggagcccggctgggcgcagcgcctatgtaggacgggtgttctcagtgacctacctcccaggctcctctgcacctgcaaaggaacaggagtgagtcgtgactgacaggggtggttgagactagactaggtagagtagttaccaggagatgtgaatgtgcgtcaggtgatggatgggtttgtcaagggaatcgttaccgttttataccaaaggtattaacatgggcagcctttgacacatgtattccaaaaacgagtttatattttcaaacggtttttacagcttagactttgtacttactgccctgcctgtgacagttgtatgccttcattttgtatccaacagcaaagtctacaataaagctttaaaacaaaaaaa

SEQ ID NO: 63901 - DNA, 591 bp, Homo Sapiens
  misc_feature (177)..(177): n is a, c, g, or t
  misc_feature (493)..(493): n is a, c, g, or t
  misc_feature (554)..(554): n is a, c, g, or t
  misc_feature (566)..(566): n is a, c, g, or t
ccaggtcaaacaggaggttttgtgcgagtacccccaaggttgccaccgagacctgtgaatggaaaaaccattccaactcaacagcctccaaccaaggtgccccctgagagaccacctcccccaaagctttcttgcaaccagaaagatctaatgaggaactggcttttaaatcgatcntccttcctggacatgggatctttcagaaaaaacaaagtaacttggcaactggactctcaaaagccaaggagtcaagtttttaaaaatcaagatccggtgctaccccctcgtcccaaaccaggacaccctctctacagtaaatacatgctgtctgtgcctcatggaattgccaatgaagatattgtctctcaaaaccccggagaactctcttgtaagcgtggggatgtacttgtgatgctgaagcagacggaaaataattacttggagtgccaaaagggagaagacactggcagagttcacctgtctcaaatgaagnttatcactccacttgatgaacatcttagaagcagaccaaaccccttttctccccctaaggntccaagccacgntcagaagcctgttgacagtggtgct

SEQ ID NO: 63902 - DNA, 1172 bp, Homo Sapiens
  misc_feature (98)..(160): n is a, c, g, or t
ggaatttccgggatggtagctcctccgccggcagtaactcggcgcccgcggtccatggaccggaacctcgggccgacggacgggaacccgggccgcgnnnnnnnnnnnnnnnnnnnnnnnnnnnnnnnnnnnnnnnnnnnnnnnnnnnnnnnnnnnnnnnaggccctgcaccgccgccgccaggctagcggagctgccccgggaagctgggtgacgggttcgcggctgccgccggactgcggcctactccgccggctctcagtgctattgtccctggggcctggccttgaggcgggtccactgtgggaagggcgtgtggcgcgcggctccgcggacagatgccaggagccaagccctgacagcagagtgctggacagaagttgcatgggtttgttttgctagtgatgaagatgatagaacagctgaatgggtgagaccagtgcatggtgctagaggattctactaaaatgggtttcatccatggtgctgtctacaacgctgtgggtggatgaagaagcgaaaagatggaagctagtacggccagagtggcatgtcctcatgtgcaatgctggaatacctaataagtttttccaaaattgggtccagtggtttacgtcttggatcttgcagatagactgatctcaaaagcctgtccatttgctgcagcaggaataatggtcggctctatctattggacagctgtgacttatggagcagtgacagtgatgcaggttgtaggtcataaagaaggtctggatgttatggagagagctgatcctttattccttttaattggacttcctactattcctgtcatgctgatattaggcaagatgattcgctgggaggactatgtgcttagactgtggcgccaatactcgaataaactaccaaattttaagtagtatatttccagggataggttgtcctgttcctcgaattccagctgaggccaatcctttagcagatcatgtctctgctactcgaatcttgtgtgggagcccttgtctttcctactattgctacaatagtggtacatgatgttcagtagtgttactctaatttacaaggacaatctgggtggaatgcgttggtgcataaaggagcatttaaagttacttcaacagcagcatattacgacaggacacgcaaattctgaatatcagagaaga

SEQ ID NO: 63903 - DNA, 452 bp, Homo Sapiens
  misc_feature (73)..(97): n is a, c, g, or t
aggcaatataaacgagtggaggttagctgaggcggaagaggccttttgcatggtaaatgattcacttctatannnnnnnnnnnnnnnnnnnnnnnnncttgggttttcatcctggattcatcccctgatcttaaatcaaaacgtcagatcaatgaactatgaactaaagtatttttcttaagcctattgagtgatttattttttaaaaaatgtttaaatgcatatgcttttctttcagcacaaacaacagcaaaaacttttgtaataactaacttacctttgcatgtatgaagaactgagtcatttatttccctaacttactcctctttcaagtaacaggtggcagatcataaaatgaattctttattgtatctacacactccacattctttactgtgtcctactactgtatcttggctccctgctgtattaaacaccatcttaagcaaaaa

SEQ ID NO: 63904 - DNA, 862 bp, Homo Sapiens
tgtcagggagggattgtggggtgacagttttacatttactttttcttcttaatgcagctggatctaagtaaaatgttgtgaagtttatcagaaactagatgtacttttaaaacgtatagggtcagggatgggggaaaaatacaggtatagtaagtaagaaaagtgacccatgaagaaagcatcgtgaggttgtatgttggttgactgtgattaaaatgcggggctggtgtaagtcgtaagtggtggctgattgccgtgtaactatgtacatgattgttgggatggctgtcccatattgtgtatattggaataaaaatttctataaattattgtaactaaaagtaaatattctaaattaagtcccacttcttaagtcacatggcttctgtcttggaaatttgacctttaaaagattatttaagacaggaaccaggaggcttgggaacagggaaagagggaaatgtagtcatatgtgggtctaggggcctctaaccatcagtatagggttttttctttccttgatggcagtagaaagacctcattttcataacataactactcttgatactttctttaaaaacactttttattaaagattctatcatgaggtatttggctgggagctgggaggctaaagcgctcatgtcctggctcttcagtgaatttaactgtgtgaccttgggcaagtcacttaacctctctgtgcttcagtctccctgtcttgtaaaatgggagtaatacctacctcacagggttgttgtggggattaattagagataatgtctgtaaagcatttaaggttcttgaagaaggcactatataaatacaaaataatatctattaaagttggtttatttgtgaa

SEQ ID NO: 63905 - DNA, 430 bp, Homo Sapiens
gactggaaagaaattgggatttttattttagtaagtaagttggtcaggcacaagggcgactcagcagagggaacttcaaggaagtgtgagacaacagctggagccctgagctgggagagtggaggacgaattataaagagttttatgcctgccataatgagaagcttgtccttgaacttgaggggaatgctgagagtgcaaaggactttaagcaggccctacacagtggcagccaagcaggtcataaagagcaagatgatgcccaggcagatcagggattctcttatctacagagcgtccgcctaccagctccttcacagcagcggattttgctgcaagagaagaggcagcaggccaggccttttccttcgcccacagcgcctacgtcgaaggctcccaggctggttgctccactggctgcttgaaggtc

SEQ ID NO: 63906 - DNA, 557 bp, Homo Sapiens
atcgcctccttcagaggtggtgacctgcagccatgatggaaagttctctctgcccctctgccctctgaggtcatgtctggatctgtgccattagaacttgggcctgttgggagaggaggcggaggcctgaaagcagtttacataaagctttcagtaatggttggtttttaaacaggcttgctatgtgctggtagcttctttgtgcatcttgcctagacaattaaaaatatttgctccatgtccccttgcatttctaaaccaaattaattggctaccattagaataacttagactcttcatcccacccccactcatccaagtgaggggagagggaaggtacccgagtctgtttcttgttactcaacatcagtgcttgttttgggccccctttgtttgctgccttgtaaaaaatcaaaagagggagaaaacccaccaaaatggcagaattctgaccaatgtcctacaagatcctggaaagtgaaggcttctacctcatagacaggggtgctattttcagctgagtcaccggtccttttttcacttcctgtcaagcgatt

SEQ ID NO: 63907 - DNA, 696 bp, Homo Sapiens
actgtcttatgtattctggggaaaatcttccggatactatgaaaactattttaacaatcgggcatgggcccacatcataggaaacccaaacacatcacagccagggtgaaagaaatttaactttgacaattcttttagtttctattcacaccagccctaacccagatggttgctcacagttagttagaaaagatctccctgcacactgtagtcactgtatttgtacagcaagggacttgttccccaagcctggagcttttggaactgaatggagcccagaggcaagagcagtgaaatgaggctgacctttgcttctggttttgcttgctacttgccagtatgtgggttccctggaggaacacacaggtgtcttggctttgccactgggcattttgggtgatttcgttaactttgcctgttttgaccagaagagagcctgatcgtgataggaggaggcgggggactgacggggttatacaatcttcacatatatatacactcagtcccatgccttgagtctagaggctggggagagggcccagctgcacgttggttgaggccagcagtacatggcccttgaggctatgctgatagcacttgtggcacactcttgtacattcatactgtgaggaacatgcaataagccggagccaggcctgatcttgtaagaccctctctcagtgggacgcctctgta

SEQ ID NO: 63908 - DNA, 520 bp, Homo Sapiens
tccagactgccttcagactctccagactgccttcagactctcccttcagtattctgtccttgctgagctctgaatcggagcagtaccagtgggatggaaacctgaagccacaggcaaagtcggcccacctggcaggcttgcttctgcgaagccccacacactacagtagttgccgttggcctctgctgcttgaccccagcaacgaggccctcatctggttggacccgctgcctctggaagagaatcgatcttttgcgccagccctcactgagggtagagggaaaggcctcatgagaaatcgaaagagagagagtaaaacggacatgaaagaggaagatgatgagagtgaagagagtaatgaggctgaggaccagacaaaagagcagaaggcagaggaaaggcctcatgagaaatcaaagagagagagtaaaacggacatgaaagaggaagatgatgaggtaagagagtaatgagtctgaagcagtctggaggtccgcgctcgattctatcatgtctactt

SEQ ID NO: 63909 - DNA, 1085 bp, Homo Sapiens
gctttatctttacaagtgtgccactgtcaacttggctcaccctgtatagggattgcgcggcgcttgaacagctcaaatccatagagagcctttcgtattggtctccccttgttgtgtcagctggcgtcttttccaacagtaagccaactcaagttcccagtacccattcctggcggatgacttcagacattaggattggtcaggtgtattttcttataataggcgcattcagtttcggaaaaggacagctgtttcattaatgtcgcacggtaaaggaatagtggcgtactacaggtacgtacgcgtgctgcgtggtcatatttgttcctcgtgatcttattgtatctttcaaagtttggaagtatatctcgtgtgcttttgctgtttttttatgcttcctggaattctaggggactcatgagatgacttgaggttctaagagttctgcaagtgagaagacactacatggtctgcagcttgccacatgaagaacccaagctcctgtcaaagttgtgaatgcgactttggatgagattgaagaaggcccagtggacggttggtcttgaagacgtggcacgtgtagtgcgattatgaggaccgtctcgcagatccatcaagatcaaaggagggagagctgttcttggctgtttttgtctttgtttgcgtcttcttatagcattttgctttattcttcggaatgtaattttcctatcggcatgttaactcggtgcacatcgtgtaacctgtctggtgagcaacctactaattgggatgagttctacggtacatcgtgtattcgctgactcttggcggtacaactaactgttgtatataatacagtctctgccacagatgcaagtgacctcttcaggggccacagagtgcgcctgaggaaggataagcttcaagctggccatgggggtcgctcaaacagtcactccaggcttagatgatagactagcctaggtcatcagagcccagactctcacagagactaaaatcagagctctgtcttgttatcgataaatttcatcgcttggaaaaagaaatgctgaaagccagtgttagaatatcggggtgaccaa

SEQ ID NO: 63910 - DNA, 785 bp, Homo Sapiens
gggttgagcttttctgtgtgtgtggggccctcaagcgagctcgactggtccatcctggggtagcggaggtggtgtttgtgaaaaaggacgatgccatcaccgcatataagaagtacaacaaccggtgtctggacgggcagccgatgaagtgcaaccttctttgaatgggaatgttatcacctcagaccagcccatcctgctgcggctgagtgacagcccatcaatgaaaaaggagagcgagctgcctcgcagggtgaactctgcctcctcctccaacccccctgccgaagtggaccctgacaccatcctgaaggcactcttcaagtcctcaggggcctctgtgaccacgcagcccacagaattcaaaatcaagctttgagcaggggagtgaggcagccagaagtgggggcagaggagggtggctctgtttcccccaggcaaagcttatgaccaatgggccatcggactggagacccctgattgtgggaagggttgccagggatgaagagcttcctcactggatgggacccgcctttctgtgttgtgttctgccctgtgctcttctctctacgttaacgtttcctgtagtatgtttcttcatctcatcgcccaggtaggcttgtgtttttcagtgtgtgcctccccgagcctcagccccaagctgatttctcatctggaactggtacactgaattctctgggtggctttctctgtggccccatgggatgcagcgtcggggcctgtctgaaggaccctgctttcttccgggtccgatgggctgcctc

SEQ ID NO: 63911 - DNA, 1404 bp, Homo Sapiens
  misc_feature (1289)..(1289): n is a, c, g, or t
  misc_feature (1303)..(1303): n is a, c, g, or t
gggaagatctgagttcatgtagctggtgttggcttagggtctgggaggaaggcttttgggaagatgtaaataagaacaaaatctgcagccacctgggaagcctggcctcagtgtggaagagaaggcagcaggattattacagaaccttgtgaagccaacgcgggcagccgccaggagctgcagaccgagaggatctcgtcctttcttgcggcccagggagaccaggcctttcattctgggctcgagaccaacaattcgaattccgaactccccctgcgtgtgggactcaaggttgcccagggctcacctctgatgggtgggcaggtgagcgcttccaacagcttctcgaggctgcactgcagaaatgccaacgaggactggatgtcggcactgtgtccccggctctgggatgtgcccctccaccacctctccatcccagggagccacgacacgatgacgtactgcctgaacaagaagtcccccatttcgcacgaggagtcccggctgctgcagctgctgaacaaggccttgccctgcatcacgcgccctgtcgtgctgaaatggtccgtcacccaggcactggacgtcacagagcagctggatgccggggtgcggtacctggacctgcggatagcccacatgctggagggctcggagaagaacctgcactttgtccatatggtgtacacaacggcgcctggtgggggacgcactcacggaaatctcggagtggctggagcggcatccacgcgaggtggtcatcctggcctgcagaaacttcgaggggctgagcgaggacctgcacgagtacctggtcgcctgtatcaagaacatcttcggggacatgctgtgtcctcgtggggaggtgccgacactgcggcagctgtggtcccggggccaacaggtcatcgtctcctatgaagacgagagctccttgcgccggcaccacgagctgtggccaggagtcccctactggtggggaaacagggtgaagaccgaggccctcatccgatacctggagaccatgaagagctgcggccgcccaggagggttgttcgtggccggcatcaacctcacggagaacctgcagtacgttctggggggcccgtccgagtccctggagaagatgacgctgcccaaccttccgcggctgagcgcgtgggtccgagagcagtgcccggggccgggttcacggtgcaccaacatcatcgcgggggacttcatcggcgcagacggcttcgtcagtgacgtcatcgcgctcaatcagaagctgctgtggtgctgacggngacccttctgaagnttcgggacgcgggcgtctgcagtttccacccccgaaattttcaaagtattggttgacttttggtttggggccaaaatgttggggggatcactaggaaccgg

SEQ ID NO: 63912 - DNA, 874 bp, Homo Sapiens
ctcgcagctccgcggcgcctacgcgctccgtgtccccgccgcgacgctgccacctgtccctgccggtgcctccgtgcgcttcgaagatgagggtcctgggtgggcgctgcggggctgctgctggcgtgtctcctcctagtgcttcccgtctcagaggcaaactttttgtcaaagcaacaggcttcacaagtcctggttaggaagcgtcgtgcaaattctttacttgaagaaaccaaacagggtaatcttgaaagagaatgcatcgaagaactgtgcaataaagaagaagccaggaggtctttgaaaatgacccggaaacggattatttttatccaaaatacttagtttgtcttcgctcttttcaaactgggttattcactgctgcactgtcagtcaactaatgcttatcctgacctaagaagctgtgtcaatgccattccagaccagtgtagtcctctgccatgcagtgaagatggatatatgagctgcaaagatggcaccaagcttcttttacttgcacttgtaaaccaggttggcaaggagaaacagtgtgaatttgacataaatgaatgcaaagatccctcgaaatataaatggaggttgcagtcaaatttgtgataatacacctggaaagttaccactgttcctgtaaaaatggttttgtatatgctttcaaataagagaagattgtacaggatgtggatgaatgctctttgaagccaagcgatattgtggcacagctgtgtgcaagaacatcccaggagattttgaatggtgaatgccccgaaggctacagatataatctcaaatcaaagtcttgtgaagatatagatgaatgctctgagcacatgtgtgctcagctttgtggcaatta

SEQ ID NO: 63913 - DNA, 849 bp, Homo Sapiens
ccaccggcagttgtactccggcctgcgcagcctgagattctctttgtggccagatgggtttgtatggacaggcttgtccatctgttacttcattaatgaattccatacgacataatctgtcattgaacaaatgtttccttaaagtgcctcgatctaaggatgaccctggaaaggggtcctactgggcaatagacaccaattccgaaggaagatgcgctgcctactcggccaaagaagagggcacgatctgtagaacgggtaacattgtataacactgatcaggatggtagtgatagcccacgcagtagccttaacaacagtctctcagaccagagtttggcatctgttaatttgaacagtgttggaagtgtgcatagttatacaccggtgacaagccatccagaatcagtctctcaatcattaactcctcagcagcaaccacagtacaaccttccagaaagagacaagcacctacttttctcagaatataatttgaagatcttagtgcctcatttcggagccttctataagtcagtttttgagcagtcacttagtcaacaaggtttgatgaacatcccttctgaatcttcccagcagtcccacacttcatgtacctttcagcactctcccagcagtacagtgagcactcacccacacagcaaccaaagcagcctgtccaacagtcatggcagtggcctcaacaccacaggcagtaattcggttgcacaggtctcactgtctcacccccagatgcacccacagccatctccacatcctccccatcgaccgcatggtttaccgcagcatccgcagcgttccccacacccagcaccacacccacagcaacac

SEQ ID NO: 63914 - DNA, 304 bp, Homo Sapiens
aacgacagaacggatcgcgtggagtgatggtcctaccacggcgcgtgagtttcgctctgccttggattaagtctgcacattcccaggtccccggcgcttctgcccctgggacgtgggatccccacggacctggaaattctcgcctgtcttcccttcacccagagcaaattgagacgtcccggttagagtctggaagttgcttgcttttgggtttgaagtcgctcggaggctggtcccgtccccggatctttctgctatagggcactgtatacacttcctttcgcgtttgcgcacagggggatcg

SEQ ID NO: 63915 - DNA, 384 bp, Homo Sapiens
tagacaggagaaactggaacagctcgcccgcagatttgatcgcaatgcagctatgagggagacttggctgagcgaaaagcagcgtctggtgtctcaggacaactttgggtttgaccttcctgcagttgagtccgccacaaaaaagcacgaggccattgagacagacattgccgcatacgaggagcgtgtgcaggctgtggtagccgtggccagttagctcgaggccgataattaccacgacatcaagcgcatcacagcgaggaaggacaatgtcatccggctctgggaatacctactggacctgctcagggcccggagacagcggctcgagatgaacctggggctgcagaagatattccaggaaatgctctccttatgtgctaa

SEQ ID NO: 63916 - DNA, 915 bp, Homo Sapiens
  misc_feature (129)..(184): n is a, c, g, or t
ggggctccgggagctagagcctgaggtcggcggcgcacgctgttgccccgtgggcttctgctccctcgcttgtcttctcgggcttctcgccccggccgcggccgggtcctcagtagtcgagaatgactnnnnnnnnnnnnnnnnnnnnnnnnnnnnnnnnnnnnnnnnnnnnnnnnnnnnnnnngaagcccaagttacaaaatgctactcctacaaactttaaaacaaagactatacatctgcctgagcaactcaaagaggatggaacacttccaacaaacaatagaaaacttaacataaaggatttgctgtcacagatgcatcactacaatgctggggttaaacaaagtgctcttcttggacttaaagaccttttgtctcaatacccatttataattgatgcacacctttcaaacatattaagtgaagtgactgctgtgtttacagataaagatgctaatgtacgattagcagcagttcaacttcttcaattcctggcccccaaaatacgagctgaacaaatttctccatttttttcctttggtaagtgcccatctctctagtggcatgactcccattactgaaggaattcaggatggactcctttaaagtttttggacattctggctggaacagtaccccagactctaatttactgggcccgtaacaagcatattggcttaaggaatttttggtagaaccttaatttcctccatccagcagggtggttccaaaagggaacttggataaaattaaaagaacgggattcccccgggcccctgggaattaccttttcctggttaaaaatcccctaaattcggggagagactttcatcctttttctcccaccccaatagtgggggaaaggcctttgcaaaaaaagtcccttttataggttgggcggcaacacctcca

SEQ ID NO: 63917 - DNA, 223 bp, Homo Sapiens
ccgcagtctggggcttggcaacgcggagctggagaacctcatccgggagcggtctcagcagcaggagcccttgctgtgccccagttaccagtcctattttaagaccattgaggagctccagcagaagatcctgtgtaccaagtctgagaatgccaggcttgtggtgcagatcgacaacgccactggctgcgggatgatttcagaaccaagttctccagccgct

SEQ ID NO: 63918 - DNA, 1371 bp, Homo Sapiens
  misc_feature (962)..(1255): n is a, c, g, or t
  misc_feature (1257)..(1257): n is a, c, g, or t
  misc_feature (1259)..(1260): n is a, c, g, or t
  misc_feature (1262)..(1263): n is a, c, g, or t
  misc_feature (1265)..(1265): n is a, c, g, or t
  misc_feature (1269)..(1271): n is a, c, g, or t
  misc_feature (1273)..(1273): n is a, c, g, or t
ccggcacgaggctgcggtcggtacggccagtgcacccaggactctaccacagtacatgaatggtttattaataggttcatgtactgtggtagagtccctggggtcaggtccggccagtgcatgaacctattaataaaccattcatgcttcccagttggcagatgtgagcaaactatgtataggaattccaaaggaatatcttgtaccggaattatcaagtgaagtacagtctctttggtccaaagctgctgacctctttgagtctgagggggccaaagtaattgaagtatcccttcctcacaccagttattcaattgtctgctaccatgtattgtgcacatcagaagtggcatcgaatatggcaagatttgatgggctacaatatggtcacagatgtgacattgatgtgtccactgaagccatgtatgctgcaaccagacgagaagggtttaatgatgtggtgagaggaagaattctctcaggaaactttttcttattaaaagaaaactatgaaaattattttgtcaaagcacagaaagtgagacgcctcattgctaatgactttgtaaatgcttttaactctggagtagatgtcttgctaactcccaccaccttgagtgaggcagtaccatacttggagttcatcaaagaggacaacagaacccgaagtgcccaggatgatatttttacacaagctgtaaatatggcaggattgccagcagtgagtatccctgttgcactctcaaaccaagggttgccaataggactgcagtttattggacgtgcgttttgtgaccagcagcttcttacagtagccaaatggtttgaaaaacaagttacagtttcctgttattcaacttcaagacctcatggatgattgttcagcagtccttgaaaatgaaaagttagcctctgtctctctaaaacagtaaacatatcttacaaattaaaatgacttttannnnnnnnnnnnnnnnnnnnnnnnnnnnnnnnnnnnnnnnnnnnnnnnnnnnnnnnnnnnnnnnnnnnnnnnnnnnnnnnnnnnnnnnnnnnnnnnnnnnnnnnnnnnnnnnnnnnnnnnnnnnnnnnnnnnnnnnnnnnnnnnnnnnnnnnnnnnnnnnnnnnnnnnnnnnnnnnnnnnnnnnnnnnnnnnnnnnnnnnnnnnnnnnnnnnnnnnnnnnnnnnnnnnnnnnnnnnnnnnnnnnnnnnnnnnnnnnnnnnnnnnnnnnnnnnnnnnnnnnnnnnnnnnnnnnnnanannannanaaannnanaaacatgttcggccgccctcgggccctccgagagcttttctagacccattcgttttgggcgcgcggggcccacgtaggtaaggtggaacatgggtccc

SEQ ID NO: 63919 - DNA, 634 bp, Homo Sapiens
atcttgcgtgacttctgctctattccggcactctggcctcgctcagacggcactgcgctgaattggccccagttgtgacagcgttgaggaagatatgaatgcttctgccaaggtgcttctgccacagttttggaagaaacaaggaaggaaacggctcctgtgcagctccctgtttcagggccagaactggctgccatgatgaagattggaacaagggtcatgagaggtgtggactggaaatggggcgatcaggatgggcctcctccaggcctaggccgagcgattggtgagctgggagaggacgggtggataagagtccagtgggacacaggcagcaccaactcctacaggatggggaaagaaggaaaatacgacctcaagctggcagagctgccagcccctgtacagccctcagcagaggattcggacacagaggacgactctgaagccgaacaaactgaaaggaacattcaccccactgcaatgatgtttaccagcactattaacttactgcagactctttgtctgtctgctggagttcatgctgagatcatgcagagtgaagccaccaagactttatgcggactgctgcaaatgttagtggaaagcggaatgacggacaataacctctctg

SEQ ID NO: 63920 - DNA, 346 bp, Homo Sapiens
ctttagctattttacttaagcataatagcctcaataggacatataaaagattataaatacagagctttattatcctgacgtcttgggtcttttaagtatatacttttctgaaaggtatccattttgtaggcttgggttcttcatgagcatacgattgtttatttttgctgctgttctcaacatcatcattgcctgctgatggtgccacgatgctgctcctatagacagcaataagattgtctctaatttgagcagtaacatgattgcaagagaccaagtttcacagcttgtaaagttctgtatttgggattcttgcttatttttccgctggtgtatttcgaggatc

SEQ ID NO: 63921 - DNA, 395 bp, Homo Sapiens
tccactttcatgagtttcctttactgtattctcaacttgggccttgcttcaagcaggcaaacatacattgaagaatgcactttggtactgtttaaataacaacacatcagcccacttgattccatgccatgtccttgctgacagaaacatccccaacagggcatgccctggtccaagtcctctgtctttgtcaaaatgctcttctgatgagttggagaggaggcagccagcagtggcagtccacaaggatccaggtaccttctccaatcctaaagcagacagcaggttgaataaaaccaatacacaacctattttctaggcaggaggggaaaaggcccttaggacaataatatttgtacaaagagttgagagtaaacaaacagtatatcaggttc

SEQ ID NO: 63922 - DNA, 1285 bp, Homo Sapiens
  misc_feature (157)..(157): n is a, c, g, or t
  misc_feature (325)..(379): n is a, c, g, or t
  misc_feature (383)..(395): n is a, c, g, or t
  misc_feature (1108)..(1108): n is a, c, g, or t
  misc_feature (1179)..(1179): n is a, c, g, or t
  misc_feature (1233)..(1233): n is a, c, g, or t
cgtacacgttctctagtcccgctctctgcctacctccactatcgcacacgatgtcgttcctggcgcccgagctcccctccatctcatttacgttgctcatattgagagagtgcatctcactaatgtgcatgagagaagcaaacataccataggtcantcacaatgacataatactaaggacgcatacatgaatgtctcgagtcaagttccctatggtttctgtagatcagtcgtcatcttgtatattccccacaaaggccgttcgcagcttccggtgagaaggggccagagcccggtgggagccacgatttccttcagcaaggannnnnnnnnnnnnnnnnnnnnnnnnnnnnnnnnnnnnnnnnnnnnnnnnnnnnnntttnnnnnnnnnnnnntttggggaatggccccccgaattccagcccagtttggtgctactgcgtgtggccagctgtggtgtgcttcctccatgaccaccggcgctcggccccggcatccctgttgggcgtcagccgtgagtagtccctactgtgcgtcatgaatccaccttgcgtgctgtgcgtatctgtgaacctggagcggttacttattttgacagatatcactttgggtctttttacattaacatttcttttctctaaggaatattagacataccccatagctctgtgtgagccagcaataccgctgccccctggcgacagggcagaccaatgatgccaggcagctgtcacacgctagtattggcttcattgtgatctgagccctgcacgctgggccttcagaattaatggccagcagtgtcagggatgagcccgtcagccagggcacaggcctggctcacagtcccgcacacctgctggcctggggagctccagccaggcagcgagtcctgccccgcccgcagctccctcccacaccccgcctggccaagatgactgcttcagggggctttggggaaagaattaggaagggtcagaaccaaacaatacctgctcatttacactgaggattcagggcgggagacaggagccttggggtcctgttaaaccacagacagttatgaactgaaagtcataacggggagaggtgcctggcttctacctgngtgctcaggaatggtcctcgtcacccctgccactctgtggtcggtgccctggcttcctcctcactcctggncgcctttctcagcgccgcacacacagatgctcagtctcagagaagctggcacgngcctggcagtcctgaaaaaagcgtcagttaagcacacctgcagggcccccta

SEQ ID NO: 63923 - DNA, 470 bp, Homo Sapiens
aatcgagctcgtacctcacccacaaacccctctaggcatgagtgtgggtgcactggtgagctttcagtcaataagctaaacatcttgtgttggttttatcgggtgacaggttccagatgtgacgactgtgcctcaggatactttggcaatccatcagaagttggggggtcgtgtcagccttgccagtgtcacaacaacattgacacgacagacccagaagcctgtgacaaggagactgggaggtgtctcaagtgcctgtaccacacggaaggggaacactgtcagttctgcccggtttggatactatggtgatgccctccggcaggactgtcgaaagtgtgtctgtaattacctgggcaccgtgcaagagcactgtaacggctctgactgccagtgcgacaaagcccactggtcagtgcttgtgtcttcctaatgtgatcgggcagaaactgtgaccgctgtgtattccg

SEQ ID NO: 63924 - DNA, 1217 bp, Homo Sapiens
  misc_feature (31)..(31): n is a, c, g, or t
  misc_feature (122)..(122): n is a, c, g, or t
  misc_feature (226)..(239): n is a, c, g, or t
  misc_feature (293)..(293): n is a, c, g, or t
  misc_feature (452)..(519): n is a, c, g, or t
actgtgccgcctcacagcgccgtgagcgggncccccatagagattaacaccccgttcttggtggcctccgtgcagccctctatggcggtttttttggggagtgcgctataagcccttctcgnacttctggcttgttagtccaggagaggtggtggctttccaccgggggcggcctaattttggctccaggtcccgcggggaagaagtctccgcccccagtatctgnnnnnnnnnnnnnngcagaccgcgatttgccattagagagggcgtataaggtgaggcactcccttttntgatcagcgtttattttaattttggttgagggggtggccgcccccacatctggggcgcgggggctccctcgggggccggggagagtctagagagcgttttgtttactggagtgggagaagggtgtggcggtcggtgttcttagagggccaggtaaaaannnnnnnnnnnnnnnnnnnnnnnnnnnnnnnnnnnnnnnnnnnnnnnnnnnnnnnnnnnnnnnnnnnntccccgcagcctcgaaagagttcgcgcgcgcgtgatctccgtcgactacatcgatgttgcgggacgggcccctattgaatgcccaaccgggccgggttgtctcgggtaaatcccgcccgaacgcgtcggcgccggcctcttagaaagggattgtgtcgggaaccggtcgtacagacccggcacggcgaagtcgtcggtcggtccggccggttgggcccgtgcggggtttcccaggcccggtttccccaccggcgggcggcgatgcaagagttcgcagggaagctggccctcgaaggcggctggagcgtccaggaacaaaggcgcttctagttagatgtgaagcagaacgcccgagggccgcttcctcaagatccctgagggtgggcgcgggcggttccaagagccgcctcacgctgtccatggcggtggccgccgagttccgcgactcgctgggcgacttcatagaacactacggcgcagctgggccttagcagccccgagcagctggcggcgggcgccgaggagggcggcgggccgcggcgcgcgctcaagagcgaattcttggtgcgtgagaaccgcaagtactacttggacctcaaggagaaccagcgcggccgcttcctgcgcatccgccaaacggtcaaccgcggcggtggcggcttcggcgcgggccccgggccgggcggcttgcagagccc

SEQ ID NO: 63925 - DNA, 506 bp, Homo Sapiens
tcttaaaatgaaaatctgggcccacttaactaccctagataatacgcttcaatggcttcccatggctcactggataacatctaaattcttcatggaattgaaggcccctatgtgctggttttggctaagatctcccctttgatgtgggtcccctgttgattatacgtgcggccttccagctgcccaccatcacagctacagctcgctccccttggcctctgtgccttggctcgcactgttcctactgaaggcctagcacctgctcttggcctggtgagcccctccgccttccaggcttactcaaagaattctttctgcccctccctgtgtcccgggacctgtttcatatcgcttctgtggtcgtgaccccatggtcttgtaattgtgaacttctttgctgccccttcgaagctggggagtgcttgttgcagatgcatccaagaggggtaattgcgtatcaacagtggattcgctggtgtatttccggtaatcctcagagtcagcga

SEQ ID NO: 63926 - DNA, 358 bp, Homo Sapiens
  misc_feature (130)..(130): n is a, c, g, or t
acagcgagagcgtgcactcatgacgctatgtcggatgctcgcattcccatacccttaaccgtatcatctgaagaatcacagagctgctacatgatctaagaactgagtactctgctcacgtatatacgcnatagagagacaggaggaaggacgcctacatttggctgtcccactgccaaccggaaatggtacatctcctggtgtccagaagatgtgagcttaacctctgcgaccgtgaagacaggacacctctgatcaaggctgtgcaactgaggcaggaggcttgtgcaactcttctgctgcaaaatggcgccaatccaaatattacggatttctttggaaggactgctctgcacta

SEQ ID NO: 63927 - DNA, 628 bp, Homo Sapiens
gtaaaatgtgcttaaaaggccatccttttcattttcagagataacataaagatctttgcatgaggtaaatctacagcatagttcatttttagattttgttgagtcctgtaaagaagaagaagaaaaaagtttcagttgtggtagaataccgtgctgtgtttaaatgttacttgttttcaaactttgttttctatgaaaatgatatggaaacttctaaaatggaatttggtgcatatgtactgctgaataaagaccgatgaagaggtttgagtagatgtacaaatcaagtaatggtttgaacacctttaataatatgcctaatctgttcaattgttttagaatctttttatcttagatgtaggcagccatgaacaatctattttgagccactttagggagaaaactttgtatttttaaaacttgcataaaagttatgcaagtggtttttataaattggaataatacctcagttttgaggttatgcacactaaattaaatgtgacataaattaatttgtacaaaaagaactctttataaggtggctcattgtaggaaatcctgtgccttcccctttgaggcacaagtgttgcatgaacaacagtttgctattgaaacttctaaaactagg

SEQ ID NO: 63928 - DNA, 340 bp, Homo Sapiens
ctcatttcttttgaaatggcatctcgaacaaagtccaccgatccctttacgaaagaatgaactgctcctctgtgtgtacttcatagaaggtgggaatcggacagaggcaggttagtgacagttattcctgaaatacaggagcagagtacagtctgttgtggtttcccggattccgggcctagctcagccaaattaagcatgagacataggccattgagccacttagtagttatgcgagtggatagattggtatgtagagggaaagaggtctgctgtaaagcacaatacgggagtagatttattacagctactccacattttcccgctggtgtattgccgg

SEQ ID NO: 63929 - DNA, 329 bp, Homo Sapiens
aaacgacccgaagaccgtgcccggcctcgccgccacgtcaccgactctcacggccggccggaagtgccgtgtgtcaccgctacggaaattcccgccgttgtgaacgtgacctcgctcgcagagccaggatcgtggggcaatcctgagattcagtagccgctttcgtggggtgggactgacagttcctctcctcgggttttgtgaagattacctgagaccatagaagtcatcgtcctctgttgagaccgtaccaccactgggagctggggcggttaatgttcatcgcagtatttcattcacatttcgtcttcgggtcgtttgagatcctc

SEQ ID NO: 63930 - DNA, 435 bp, Homo Sapiens
cctagttttagaagtttcaatagcagagctgcacttgtgggcccaggatttggagaagtggagagaaggtctgatgggagttgaaggagctgcaggtccagcttcttccccatgccagcaaggtgagctaacagatcggcagcacatgcaaacttcacagtgtgctctccattgaccttcacggtgtaaaaaatatgacttgcttcatttgtgagttccatataatgtctcctatagcccacagtacccagaactatataaggaagggaattctgggaaatgtttttaagtccgagttagctgagttgatacagtacaaagccattagagctctagttaactgatctttttcatcttttaatagagttttgttgtttcattcttgctattttaattcttggctcttgagtcgctattgaacttctcactagggtt

SEQ ID NO: 63931 - DNA, 430 bp, Homo Sapiens
aaacgacccgaagacgaatgatttccctgcgattccttgcttggtactttctggacctgaagattcaaggggaaacccatgacggtattgaggatgcccgcacagcccttcagctgtaccgaaagtatctggagctaagcaaaaatggcactgagcctgagtctttccacaaggtgctcaagggtctttatgagaagggcagaaagatggactggaaggtgcctgagcctgagggccaaacaagtcccaagaatgcagctgtcttctcctcagtgctggcgctctgactacccttcccaaagaaccacggccctctccctttactgttctatagccccagaactgggagatggcttcctaagttggctataccttgtccacttccagtactggacgtgctcaggtcttcgggtcgtttaagatcctgcag

SEQ ID NO: 63932 - DNA, 394 bp, Homo Sapiens
aggatttacgtagatccactgtaatgcagtgatgttttttgtgtctttcaggtgacttcatggtcatgacgattttcttcaatgtgagcaggcggtttggctatgttgcctttcaaaactatgtcccttcttccgtgaccacgatgctctcctgggtttccttttggatcaagacagagtctgctccagcccggacctctctagggatcacctctgttctgaccatgaccacgttgggcaccttttctcgtaagaatttcccgcgtgtctcctatatcacagccttggatttctatatcgccatctgcttcgtcttctgcttctgcgctctgttggagtttgctgtgctcaacttcctgatctacgcatcctgggatcctctagatcaccatcc

SEQ ID NO: 63933 - DNA, 479 bp, Homo Sapiens
acacgcaggaataatgtgactcgctggtttgtcacgtgtgtccggcagccagaattccgagccgtgctaggagaagtggttctatactcaggagccaggcctctctctcatcagccaggccccgaggctcctgccctcccaaagacagctgctctgctcaagaacgaggcgatagaaacgggagaagctagagaaattccaacagaagcagaagatccaacagcagcagccacctccaggggagcacgaagaaaccaaaaccagagaagagggagaaacgggatcctggggtcattacctatgacctcccaaccccacccggggaaaagaaagatgtcagtggccccatgcccgactcctacagccctcggtatgtggaggctgcctggtacccttggtgggagcagcagggcttcttcaagccagggtatgggcgtcctaatgtgtcagcagcaaatccccgaggtgtcttcgggtcg

SEQ ID NO: 63934 - DNA, 951 bp, Homo Sapiens
ggtaacctggttctctgttatgttaaggctttctgggaagccagccactctgcgcaggagtgaaacatgaagttgttttctgaggacctgttttggtgggattgtttgggcagaggactgtgtttatgcagggcaaatcccagaaagataagaggaagctagagaaacttaatgtacctgaattcttcatggtgtatttgcaaactaacttaacatagattcttttgactatggtaagtttgaatctctccttgccaaacaacattataagtttagttttcttcttcctcttgcagccggtacagaaaggtgtaagtggtggctgaaaattgaggaagcttcatctgaccaatgtgggtgctggtttcttgtgaaatgtgtccctaagcctccttctccttgcaggcagccacccacccaggtgtctaagataggacatgctcctttctttctctaatcccatcctgaggttgccggcaaagccaatatgaccactactgagaaatagtaatgacttctacaaatgcaagggtcttaccctcctcctttcccttaaacaccctccccttttccttagaccccgtttttgccatccccccaatggtgtggtatgggtgaaactaatccccctgaatggtgaattgctatccttattgccctattaaagaaaaacccagctgggcatattggcccggcagcccccattttaaaatggtaacatggccacagacgcaaattaagtaaagtccctctccggggaattccctggtggatcccaaccccatggtaaattgagggataattgtgcgggcgccttcgggccccttgaagaaagttttcccaagaccccttccgttttggcgccgccgcgcgcccactcaaggcgaaggtgagacgtgggccccaaaagcgcgtttccccaaggggaaaccccggggcccatgaattaaa

SEQ ID NO: 63935 - DNA, 521 bp, Homo Sapiens
gaagaagctccctctcaccaccctcttctgcctatgagcggggaacaaaaaggccagatgacagatatgatacaccaacttctaaaaagaaagtacgagttaaagaccgcaataaactttctacagaggaacgccggaagttgtttgagcaagaggtggctcaacgggaggctcagaaacaacagcaacagatgcagaacctgggaatgacatcaccactgccctatgactctcttggttataatgccccgcatcatccctttgctggttacccaccaggttatcccatgcaggcctatgtggatcccagcaaccctaatgctggaaaggtgctcctgcccacactcagcatggactcagtgtgttctcctgctccttatgatcatgctcagcccttggtgggacattctacagaacccctttctgcccctccaccagtaccagtggtgccacatgtgtcagctccatgtggaagtttccagttcccagtatgtggcttagagtgatggtgtagtacaaca

SEQ ID NO: 63936 - DNA, 542 bp, Homo Sapiens
tgttctggaagacgtacctttgttggaagacatacctttgttggaagacgtacctttgttggaagacgtacctttgttggaagacacaagtaggctggaagacattaatttgatggaagacatggctttgttggaagacgtggatttgctggaagacacggatttcctggaagacctggatttttcggaagctatggatttgagggaagacaaggattttctggaagacatggatagtctggaagacatggctttgttggaagacgtggacttgctggaagacacggatttcctggaagacccggattttttggaagctatagatttaagggaagacaaggattttctggaagacatggatagtctggaagacctggaggccattggaagatgtggattttctggaagacatggcttttttggaagacgtagattttctaggaagacccaaattatctcggaagacttggattgttgcggcagacgtggattttctggaagactgggtgatactggaacatgatatatctggaacatgtata

SEQ ID NO: 63937 - DNA, 185 bp, Homo Sapiens
ggatttctgaaagttatgttttttttctatcatctggtataccattgctttatttttataaattattttctcattgccattggaatagatatctcagattgtgtagatatgctatttaaataatttatcaggaaatactgcctgtagagttagtatttctatttttatataatgtttgcacactg

SEQ ID NO: 63938 - DNA, 1447 bp, Homo Sapiens
  misc_feature (306)..(439): n is a, c, g, or t
  misc_feature (492)..(492): n is a, c, g, or t
  misc_feature (1063)..(1063): n is a, c, g, or t
  misc_feature (1069)..(1069): n is a, c, g, or t
ttggcagcagcagacatttattgagctcactgtggccggctcccctcttagcccggtccccacatcgctagttcttatagcgtccctatgaggtgggagctgtcgctccactttgcgtgtgggaagactgaggcaccgaggccatgccaccagcccaaagtacagcagacaggctcagaaacaggaggctgcctgtcctccatccccagggcaggaagtaaggccgagctccaaacccactctggcccagggcaaggctttaggcaggggaaggatacggccaggtcagcacattagaaagtgggnnnnnnnnnnnnnnnnnnnnnnnnnnnnnnnnnnnnnnnnnnnnnnnnnnnnnnnnnnnnnnnnnnnnnnnnnnnnnnnnnnnnnnnnnnnnnnnnnnnnnnnnnnnnnnnnnnnnnnnnnnnnnnnnnnnnnnggcgggactggatgcagtgttgggaactggggtccgaaaagttcccagacacncccttctccgcaggcctcagcctacctgaaacagaacaagtatcaacaagcggaagagctgtacaaagaaatcctccacaaggaggacctacccgcccctctcggtgcccccaacacaggcacagctggtgacgcagaacaggcccttcgccgcagcagctcactctccaagatccgtgagtctatcaggcgaggaagtgagaagctggtctcccggctccgaggcgaggcggcggcaggagcagccgggaatgaagagagccatgtcactcaacacactgaacgtggatgctccaagggctcctgggactcagtttccccagctggcacctggacaacggcccctcggaccctcagcgccagcacccaggacctgagcccccactaacgtccagtgaactgcgctggccgcagctttcttgggaacagtgcaggaggggatgggctggctggggtggagaagggggtctatcatctccctggccccccccttgccttctggggtaacttggggggataacctgcctttctccctgcgaattaaagggctgggggacgttggaccccaacnccacanagccacgcggttaaacgcgcacagcccctggtcgggcccgccctcccggcccctcgaaaaaagcttttcctaaaaccatttcctttttgggtgccgccgggccccatgaagggaaagcggaactctgggcccaaaccctggttcccccaagaaaaaacctggggcaatgaaacaagggctttggaattcccccaccaaaaaaacaaccgcccgcggggaaactcaaaccggtttttaaacaaaccccaaaggggagtctcgggggtcgttacttggaatccaaccaacagggaatcccacgcgggtctcaaaatcaaatatagtgcccgcccccgtccattttttgcgaggagtggggcacaccccataaacctcccg

SEQ ID NO: 63939 - DNA, 877 bp, Homo Sapiens
  misc_feature (285)..(285): n is a, c, g, or t
  misc_feature (290)..(290): n is a, c, g, or t
  misc_feature (595)..(595): n is a, c, g, or t
gggttaactggttgtatcttattagcaaggagattggggttttgagtgtttgcgtgggtggtttcaatttgccagggaacagtggcaggctgctagcaaggcagtgagaagctcttggcagccaaatgggtgcattcagggctgatttatagagacccttggcttctccttctcctactccctgtctttctggcattttgtagcttgttagattttctgccagaggggtgggtcagagcagtggaggggagacatcgcccatgtgcttctgctactggtccttgngctgngtggttggtagaggagatgttgacactatgagctaagggttggcttttgtaattacctgaatctgaaaggaatgcctaaggttaccttggggtttctcttctggtgagatagggttcctggtttgagtaagttaatgtcctggatatttcttgtggcagggggtggtcaaagagcctgattgctgacccagtcctcaggccctgtggtcgatgacctcatcggtagtttcaagggggctgggaggggatatttgacttgttttttccgaatgtagccttctaaccctcagtctttagaagctggngggactcttagtggtcctgcagcgtatcctaaaagactacctttggaaacaggattcttgtatggctaggatcctgtctgggaaccagaaaccctacaccctccccctccagggaatgcttgagttccagttttgagcagaggtgaggcagaattcacctgtagccttccgccctggtatttgtggggggtgaccagctccaggcgttgggtgttagtctgcatgagtttgtgagagtaaatagtctggtacgtactgctgtgccggtatcctctagaacag

SEQ ID NO: 63940 - DNA, 829 bp, Homo Sapiens
  misc_feature (126)..(139): n is a, c, g, or t
gggcaccagtaactccagctagtaattttgctaggtagctgcagttagccctgcaaggaaagaagaggtcagttagcacaaaccctttaccatgactggaaaactcagtatcacgtatttaaacannnnnnnnnnnnnnagccatgtagaaactctaaattaagccaatattctcatttgagaatgaggatgtctcagctgagaaacgttttaaattctctttattcataatgttctttgaagggtttaaaacaagatgttgataaatctaagctgatgagtttgctcaaaacaggaagttgaaattgttgagacaggaatggaaaatataattaattgatacctatgaggatttggaggcttggcattttaatttgcagataataccctggtaattctcatgaaaaatagacttggataacttttgataaaagactaatttccaaatgggcactttgttcctggtctttaatatcctaaatacttactggaagggcctcccaccttcaataattaaggaatttttccctttaatttaacgccaaagggtcctaatttccccttggaaaattctccaaaagaagaaagaaaccctttgccctggggggccccaaaagaaataatgggaaaccctggccaaagtttggggccctctttaaacggggtaaatttcgggggggagtttttcccacagaaaccggggccctcactttttggcaaaacggggaaaatacccgggctttttccggggtttcgggcgccccctctgggggaaacaagggcccacccccgggggaacttttccccccggagggggttttttcccccg

SEQ ID NO: 63941 - DNA, 951 bp, Homo Sapiens
  misc_feature (262)..(311): n is a, c, g, or t
  misc_feature (478)..(555): n is a, c, g, or t
  misc_feature (584)..(646): n is a, c, g, or t
  misc_feature (933)..(933): n is a, c, g, or t
gttttgaaactcaaaaccttgtatttttgttaatctagttacctgccaaatcaaacaggaatccaaagtttcataaccctgctgtgttctctggttactagaaataagcatatttttgatgttttaacaaccttttaaaataataatttctaataatgaaatagaatatttctattttaagtagctattgggtatatctttacataactagatgattatattaaatgggttttttagatgaatgatgtgcatgggtagatannnnnnnnnnnnnnnnnnnnnnnnnnnnnnnnnnnnnnnnnnnnnnnnnnaacatactgttatgaacattaacatttatccaagtccttgggacaattcttcttcagttacccagtaaaattttcatgatctcttttgcatttggtggtcagggtcttcggaatcgtatgaatctgatatcaaatcccagttgtattgctgactagctctttcagcnnnnnnnnnnnnnnnnnnnnnnnnnnnnnnnnnnnnnnnnnnnnnnnnnnnnnnnnnnnnnnnnnnnnnnnnnnnnnntatttcctgtatcttctcctcttctgtcnnnnnnnnnnnnnnnnnnnnnnnnnnnnnnnnnnnnnnnnnnnnnnnnnnnnnnnnnnnnnnngatcctgcgcacgcgtcgcagccatctccgcgcacagtggtggccaccgcgactggtgctgaagtgtcggcgcgtgccgggcgctccgctgggacccgggttgctcgccctgagtctcagctttctcatctgtacggttgggacaagtacagtaaccctcgcccgtcaagacgggccagggctgtggcgagggtccacgccttagagcaggcacctatcttgtgcagggccctgagacggggtctgactcagttcctgcggggaacttcacccagtgaccccagtcnagatccgcgggaattccc

SEQ ID NO: 63942 - DNA, 1085 bp, Homo Sapiens
  misc_feature (939)..(939): n is a, c, g, or t
agagtacatggtgcatgttgaagaacattttcagcttcttgcacgcagaatgcaagtggacaaaaaaagagtgtatttggccacagatgacccttctttattaaaggaggcaaaaacaaagtaccccaattatgaatttattagtgataactctatttcctggtcagctggactgcacaatcgatacacagaaaattcacttcgtggagtgatcctggatatacattttctctctcaggcagacttcctagtgtgtactttttcatcccaggtctgtcgagttgcttatgaaattatgcaaacactacatcctgatgcctctgcaaacttccattctttagatgacatctactattttgggggccagaatgcccacaatcaaattgccatttatgctcaccaaccccgaactgcagatgaaattcccatggaacctggagatatcattggtgtggctggaaatcattgggatggctattctaaaggtgtcaacaggaaattgggaaggacgggcctatatccctcctacaaagttcgagagaagatagaaacggtcaagtaccccacatatcctgaggctgagaaataaagctcagatggcaagagataaacgaccaaactcagttcgaccaaactcagttcaaaccatttgagccaaactgtagatgaagagggctctgatctaacaaaataaggttatatgagtagatactctcaggcaccaagagcagctgtgaactgacattggcttcaattgggtggaattcctctttaacaagggctgcaatgccctcattcccatgcacagtacaataatgtactcacatataacatgcaaacaggttgttttctactttgcccctttcagtatgtccccataagacaaacactgccatattgtgtaatttaagtgacacagacattttgtgtgagacttanaacatggtgcctatatctgagagacctgtgtgaactattgagaagatcggaacagctccttactctgaggaaagtgattcttatttgatggtgggattgtgaccactgaattcactccagtcaacagattcagaatgagaatggac

SEQ ID NO: 63943 - DNA, 530 bp, Homo Sapiens
ccagaagggggacagggagccccacccatgtaccagctctataagcggacgtttcctgtgctgcttcgacttgcgtgtgatgttgatcaggtgacaaggcaactgtatgagccactagttatgcagctgattcactggttcactaacaacaagaaatttgaaagtcaggatactgttgccttactagaagctatattggatggaattgtggaccctgttgacagtactttaagagatttttgtggtcggtgtattcgagaattccttaaatggtccattaagcaaataacaccacagcagcaggagaagagtccagtaaacaccaaatcgcttttcaagcgactttatagccttgcgcttcaccccaatgctttcaagaggctgggagcatcacttgcctttaataatatctacagggaattcagggaagaagagtctctggtggaacagtttgtgtttgaagccttggtgatatacatggagagtctggccttagcacatgcagatctacgaatcctggatcctcagaa

SEQ ID NO: 63944 - DNA, 337 bp, Homo Sapiens
aggatgtcgtagatccatcaagggactgaagctgacggtggaggaggctgtgcgtatgggcattgtgggccccgagttcaaggacaagctgctgtcggccgagcgcgccgtcactgggtacaaggacccctactctgggaagctcatctccctcttccaggccatgaagaagggcctgatcctgaaggaccatggcatccgcctgctggaggcccagatcgccacggacggcatcatcgaccctgaggagagccaccggctgcccgtggaggtggcctacaagcgcggcctcttcgatgaggagatctacgaatcctgggatcctctagatcacctc

SEQ ID NO: 63945 - DNA, 574 bp, Homo Sapiens
gcacgaggaaacagtttcttcagctacactttctgaagaaactgaaaaaccaaagcttaaagctacaggccacgtattccaggcattacagtacttacgtaaactgtgcaaccatccagcattagtcttaacacctcaacatccagaattcaagaccactgccgaaaaactggcagttcagaattcttctctacatgatattcaacatgcccctaagctctcagctttgaaaccattgctgttggactgcggtttgggaaatggcagcacttccgagagtggcacagagtctgttgtggcccagcacaggatactgatattctgtcagctgaaaagcatgcttgatatagtagagcatgatctcctcaaacctcacttgccctctgtcacttatttgagattagatggcagcatacctcctggtcagaggcattccattgtttcccggtttaataatgatccatctatagacgttctgttacttaccactcacgttggtggcctgggacttaatttgacaggcgctgacacagtagtatttgtggagcatgactggactcctatgcgagatctc

SEQ ID NO: 63946 - DNA, 627 bp, Homo Sapiens
  misc_feature (370)..(387): n is a, c, g, or t
ccccagcagccagcacctgcgatgaaatctcatctgatcgtcacttctccaccccgggcccagagtggtgccaggaaagcccgaggggaggctaagaagtgccgcaaaggtgtatggcttcgagcaccgggaccagtggtgcacggcgtgccggtggaagaaggcctgccagcgctttctggactgagctgtgctgcaggttctactctgttcctggccctgccggcagccactgacaagaggccagtgtgtcaccagccctcagcagaaaccgaaagagaaagaacggaaacacggagtttgggctctgttggctaaggtgtaacacttaaagcaattttctcccattgtgcgaacattttattttttnnnnnnnnnnnnnnnnnntatttttccccctaaaataggagagagccaaaactgaccaaggctattcagcagtgaaccagtgaccaaagaattaattaccctccgtttcccacatccccactctctaggggattagcttgtgcgtgtcaaaagaaggaacagctcgttctgcttcctgctgagtcggtgaattctttgctttctaaactcttccagaaaggactgtgcgcaagatgaatttccttttcttaaggaacg

SEQ ID NO: 63947 - DNA, 741 bp, Homo Sapiens
  misc_feature (590)..(590): n is a, c, g, or t
gcggccgcgggacggggtagtgagcgtgtcacttcctgccgctgccaggcgcgtcctcccgcgcgctatgacggccagcgcacagccgcgcgggcggcggccaggagtcggagtcggagtcgtggtgaccagctgcaagcatccgcgttgcgtcctcctggggaagaggaaaggctcggttggagctggcagtttccaactccctggaggtcatctggagttcggtgaaacctgggaagaatgtgctcaaagggaaacctgggaagaagcagctcttcacctgaaaaatgttcactttgcctcagttgtgaattctttcattgagaaggagaattaccattatgttactatattaatgaaaggagaagtggatgtgactcatgattcagaaccaaagaatgtagagcctgaaaaaaatgaaagttgggagtgggttccttgggaagaactgcctcccctggaccagcttttctggggactgcgttgtttaaaagaacaaggctatgatccatttaaagaagatctgaaccatctggtgggatacaaaggaaatcatctctaggtggccgagaagatttgattttctttanaaagacaagaataaggtctggttagggaatgaaaaatgtatacatttcggaacaactccattttatctaaaaaagttcttgtgattgccagtttatttgcagtctcttaatgtatcccccactctttcagccagtactttgagaaattttt

SEQ ID NO: 63948 - DNA, 498 bp, Homo Sapiens
  misc_feature (467)..(467): n is a, c, g, or t
cattccctgtattcatagcttgactttgtgactgctctacactgcatgtctgacattgcagagtgagctatgttgaggtaaactggttggttgtcattattttgcaatcagcctggtctctcccatgaagatgtcgtgtgcataagcacaatcatcactgattagaagatcacagcagaatacccttggattagagagaagttcgtaccttgcatttctctgaattctagtctctcataagcactgctttgctggatgattttcactgctttgtgttaatgactttgagcgatctctcacatgatggggttctttagtacatggtaacagccatgtcatcttacacacctagcattgtgaatgctgtagtgacatcctttataggcaccttacagctcaaaacttttgtttcatttcatgccttacttatcaaaaaggcaggaaagtaggtatgatctctaaagaanaacaaacacccctcccaaatacaaaacttgt

SEQ ID NO: 63949 - DNA, 326 bp, Homo Sapiens
ggtatcttatttctctattttatgttgtgacttaacctaattttatttttttaacattttcttatttcttataatatgaatgctgatatttaaaggtagatctatgtggtattctttgtgtttcttaattgtttaactcttaagattatttgtgatctggatttatgtatttgttagatacatacgaattgttaaaatggaatgcaagtttttcaaaagcccaggtctaaatgtaatggttggtttattgttctataaccccagcccatcattttctgtgtaaatcataaacaataaacagaatatactcggtggtcatttctaat

SEQ ID NO: 63950 - DNA, 777 bp, Homo Sapiens
  misc_feature (492)..(492): n is a, c, g, or t
  misc_feature (671)..(671): n is a, c, g, or t
  misc_feature (723)..(723): n is a, c, g, or t
  misc_feature (762)..(762): n is a, c, g, or t
ggggccattttgtgttcagagccgctatagctgccggcggtgtgcgactgagtcggtggcgaagacgggaacgcgacgatggcggagactctgcccgggtcgggcgactcgggcccatggcacggcttctctcggcccagggcgttgcggagactgggacgagcgcggctcagcgagctgcagggtgatcgatgtgcgggcggagctgaagaagcggaacctggacacgggcggcaacaagagcgtcctgatggagcggctcaagaaggcggttacagaagaggggcaagatcgtgatgaaattggcatcgagttagcagccaccagcaagaagtcagccaagagatgtgttaaaggatctgaagatggaggaggaaggcccagaagattatggcactggaagacgattccagagacgggcaggaggacatggaagcaagtctggagaacctgcagaatatgggcatgatggacatgagtgtgctagacganactgaagtggcgaatagcagtgctccagattttggggaggatggcacggacggccttctcgattccttttgtgatagtaaagaatacgtggctgcacagctgagacagctcccggctcagcccccagagcatgctgtgggatggggaaggattttagaacactttggaaacttcatcgntgaacttcaaagtaactccggacattgaagaaatcccttttggagccagaanaatgagaaatactcgacatttttggggggaaacttgtanatctgagccccagta

SEQ ID NO: 63951 - DNA, 397 bp, Homo Sapiens
gatccccggaccccatacacagtagtcgacgagcatttatccagtgccatcatgcatgtttgtgatgtttgagaaaactgttttatgtacacaaaaaggcattcttacattgtcttgcagttagctgtgtacatgtttcctgagggcaggaattgtctccacccatatttgtaatttctttaaacatttagcagcccaggcaataggtatttgttgaattgaaccaaatacatttattgtgaaggaatgttttgacttcaacctcatttttgctttcaggcacagtaacagctgccaatgccagtacactgaatgatggagcagctgctctggttctcatgacggcagatgcagcgaagaggctcaatgttacaccactggcaagaatagtaggtaa

SEQ ID NO: 63952 - DNA, 430 bp, Homo Sapiens
atttattgctgtttttcggtgagggtttgatggccagagttcctgaatccatctttgcttttcttttacagaacgcaatattcattataacatgtcttcttttaatgaatcagtcggtcttggctacttgaagacacatgcaattgaatttgtcaattataacaaacggcaaatgagttgcatttaccccaagggaggccgagtcgattccagtaattacatgcctcagattttctggaacgctggctgccagatggtttcactgaactatcaaaccccaggtaggagctgatgtccagtgaccccaaattccatgagaacactttgacaggatggtgccagcacttcccatcagttggctgtgggcattttttaaaggaagcagacatatggcaaagcaatgtgttattggatttatataatggtgaga

SEQ ID NO: 63953 - DNA, 401 bp, Homo Sapiens
  misc_feature (38)..(38): n is a, c, g, or t
tgagaacagtaatggaaaatggtgttgaaaggacttcntcatttttggagctttccttccagagtcctggctgattggtgttcgctgttcatctgagcccccaaaagcattattactgatacttgcacacagtcaaaagcgcagactggatggatggtcttttataaggcatttaagggtacactactgtgtttcactgaccatacatttttcttagcccctcaagtaatatagcacagagttatgaatgacaattcccctaaccattcctcttcatatctgcctcttccccttaccatcgtaattctccaaactggtcataaaggcactctgtgaagatattggggactgacatcttaagctctcacctggctgcagtaggaaaggccaaactgacgaca

SEQ ID NO: 63954 - DNA, 508 bp, Homo Sapiens
gtggcgtggtcgccctctggctcgcacgttgtcagtgtggacaaaggatgcaaagctgtgctgtgggcacagtactgacggggctctcagggctgggaggaccccagtgccctcctcagaagaagcacatgggctcctgcagccctgtcctggcaggtgatgtgctgggtatagcatggacctcccagagaagctcaagctatgtggcactgtagctttgccgtgaatgggatttctgaagatttgactgaggtctctcttggcctggaagaataacactgaaaaaacctgacgctgcggtcacttaagcaagaaggctcaaggttcttgccttgggaaacactactaagctctgaccttccatacctcacttgggggagcacagggccccgctgggcttccttcaccaacggcagtgccaaaatcaagcccccacatcaaggtggtgttctctgtgctttctctcgtccttccaaaagtcggttctggcctaacgcatgtcccaaca

SEQ ID NO: 63955 - DNA, 464 bp, Homo Sapiens
atgcatgtagtgaggacacacacaaagaaagtagtccgtggctctgccaggtgattggtatgatgcattgtgtattctccttcgtcacagcaagaatgtacgtttttggtttgctcataacgtcctttttaatgtttcaaatcgcttctccgaataccttctggagtggcctaagtgcgagaagtgaggggtgcgtttgcaaaacttatagtctttattgcacatttttccttgcaagatgggccatggtccttcaccttttgcctctcctggaccttctagtcaggcttatgacaacttaagcttgagtgatcacttactaagagcagtactaaatctcttgagaagggaagtttcagagcatgggcgtcatttacagcagtatttcaacctgtttgtaatgtatgccaatttaggtgtggcagagaagacacagcttctgaaatggagtgtacctgctactt

SEQ ID NO: 63956 - DNA, 413 bp, Homo Sapiens
gatgatctggataaggacaaaaaacgccagaagaaaagaggcattttccccaaagtagcaacaaatatcatgagagcatggctcttctagcatctcacacatccgtacccttccgaagagcagaagaaacagttagcgcaagacacaggacttacaattctccaagtaaacaactggtttattaatgccagaagaagaatagtacagcccatgattgaccagtcaaatcgagcaggttttcttcttgatccttcagtgagccaaggagcagcatatagtccagagggtcagcccatggggagctttgtgttggatggtcagcaacacatggggatccggcctgcaggacctatgagtggaatgggcatgaatatgggcatggatggcaatggcactacattaccttcatcatt

SEQ ID NO: 63957 - DNA, 498 bp, Homo Sapiens
ttgggccaacgcaccgtcagcaagcttccttttttgcccgggaaaaagtgaggtgcaggtagtataagccattgatcacggaacgcacaggagcagagctcgagtccaagcatcgtggctccacccgtcatgctggatgcatctttaggctccgctctaggtatgtgtatcctttacgggatcagcctccggcagttgccttgcgagcacgatgacaaacctctgccggctcttttgggtctcatccctgtatctatacgttgcatctctacataaagaccggaatgttcctttcgctgacccagtctctcaccctttccaaactccagaaatcttgtctgtcctcggaagatctccgcctgcttctttctctaaaggctgtcttcaggccgggcacagtgggaggatcgcttgagcccaggaggccgcagtgaggtgagatcgcgccattgcactgcagcccccggcggcagagccggagccccgtcccggatatca

SEQ ID NO: 63958 - DNA, 425 bp, Homo Sapiens
  misc_feature (191)..(191): n is a, c, g, or t
tgtcacctacggtttttaagttattacaccccgaccctcctcctgtcagccccctcacctgcagcctgttgccccaatgaaatttaggagagtccccccctccccaatgctgacccttaggattttccttccctgccctcacctgcaaatgagttaaagaagaggcgtgggaatccaggcagtggtttttncttttcggagcctcggttttctcatctgcagaatgggagcggtgggggtgggaaggtaaggatggtcgtggaagaaggcaggatggaactcggcctcatccccgaggccccagttcctatatcgggccccccattcatccactcacactcccagccaccatgttacactggactctaagccacttcttactccagtagtaaatttattcaataaacaatcattgacccatgcct

SEQ ID NO: 63959 - DNA, 510 bp, Homo Sapiens
  misc_feature (457)..(457): n is a, c, g, or t
ggaccacagtgttaccagcatttggagggagcaaaggagtttgctgctgctctcaccgctgagcggataaagaccccaccaaaacgtccaggaggccgcagaagaggacggcttcccaataacagtagcaggcccagcacccccaccattaatgtgctggaatcaaaggatacagacagtgatagggaagcagggactgaaacggggggagagaacaatgataaagaagaagaagagaagaaagatgaaacttcgagctcctctgaagcaaattctcggtgtcaaacaccaataaagatgaagccaaatattgaacctcctgagaatgtggagtggagtggtgctgaagcctcaatgtttagagtcctcattggcacttactatgacaatttctgtgccattgctaggttaattgggaccaaaacatgtagacaggtgtatgagtttagagtcaaangaatctagcatcatagctccagctcccgctgaggatgtggatactcctccaag

SEQ ID NO: 63960 - DNA, 545 bp, Homo Sapiens
tgagagttctttttgttgttgtttattgaaaaaaatgcaatacaagaagcaagaccaaacagatatctaaacactacaaccacttctactacgaaaggccaaaacagcagacttgattattgcctgtgtagtctaaagattctgccaatctgattctgctgcccgagttcctattttttcaagaaatgtaaacaactacttgatatgattcataattttaaaaaaatttacaaagctccttcatttttgtcaccaaaataatacatttgagagagatttgtagaaacaaccagcctggggctgagatcctgggcagaaatttcccgtgagcatcaaaaggcgtcagtcaggccgcagctctggctccagttcccgaggtttgttgtctcctcacccccagctgccaagcatccccccaacacacactgatgggcccagcggtggagggggggttgggaccgggatgggtcacggggccctgaaggggtcccgcaattaaggtccccgagcccccggggttaaataaaggggctgccttttggggg

SEQ ID NO: 63961 - DNA, 629 bp, Homo Sapiens
  misc_feature (613)..(613): n is a, c, g, or t
ataaaaaacaaagatgctcccataatactctcagatagtgaagaagaagaaatgatcattttggaaccagacaagaatccaaagaaaataaggtaacaaatttctggtttatttcaaatgtatacatatactcaacacttatagaggtttgctctctggttttactctcatcttgccacatgactataaacaaaaagacatccctttttcattagagatccatctgttctgtgatttttttaccttgtgatttataaaaattaggacctaaatctataatataaacttcttggatgccagtcttactcatagctgacacattttagatcctactggaaaactaagaaatgcctcttatttcaataatccaaaacttaacatactcttagtaaattcttactttgctttattcacagaacacagaccaccagtgcaaaacaagaaaaagcaccaagttaaaagcccagtgaaaagaagataaaagaagagagctgccaattaaagctaacagttgtatatctgtatatataactattaaaagggatatttattccattctgagaaccctgggtattttttattcacaaatccattataaaatctagcaggattntaaaaatagttttttg

SEQ ID NO: 63962 - DNA, 398 bp, Homo Sapiens
ggccggggcgtggcagggccctctctgtgcctctcctcccaagtaggaaggggctccgggtggctgctctgggactgggcacccacaagggctcagtgggcccaaacccttgaaatccgtgaaaccgggtggtcccaagagctagaaactcaggaaaccccaggtgctcagggccccgcgtctcgggggctccgtggggcagacccctgctaatatatgcaattctccctcccccagcccttccctgacccctaagttattgcccgctcacctctcccaggccccaggccgcggagctggcagggtggcgcctgcggtttctatgtatttatagcaagttctgatgtacatatgtaaaggactttttttaaatatatgtgccttttgcctacttccca

SEQ ID NO: 63963 - DNA, 531 bp, Homo Sapiens
  misc_feature (353)..(353): n is a, c, g, or t
  misc_feature (417)..(417): n is a, c, g, or t
  misc_feature (423)..(458): n is a, c, g, or t
  misc_feature (483)..(483): n is a, c, g, or t
  misc_feature (498)..(498): n is a, c, g, or t
tcccttgtaggaaatgtccatacaagcagtcattctctgggtatatgatatgatcttgactaccttatctggtgtaaagatttgaagttggccttttattggactaaaggggaactcctttaagggtctcagttagcccaagtttcttttgcttatatgttaatagttttaccctctgcattggagagaggagtgctttactccaagaagctttcctcatggttaccgttctctccatcatgccagccttctcaacctttgcagaaattactagagaggatttgaatgtgggacacaaaggtcccattttgcacgttagaaaatttgtgtccacaaggacaagaacaaagtantgagctttaaagctccataggaaacttgttaaatcaacaagagaagtgttaatgctgcaagtantcctcnnnnnnnnnnnnnnnnnnnnnnnnnnnnnnnnnnnncaagccaaaataggaatattaagangaggggactgggtangtgagaatatcagctccggtttgggatggtggg

SEQ ID NO: 63964 - DNA, 620 bp, Homo Sapiens
  misc_feature (25)..(25): n is a, c, g, or t
  misc_feature (127)..(127): n is a, c, g, or t
  misc_feature (221)..(221): n is a, c, g, or t
atgggtcagaggaaacaacatttgntttataacttcgtcttgataggctgtagtgtacatgggatgtaaaacaaacaagtgtatcaaaggtggatgattcttttagagtgaagtttgagagtaaatntcacttacgtttctcatagataatcaagagttggctgtgtattgactgaaagatgggtaattattttaaatatgcatttacacacatttaggtntcagaagatgcttagggaacaatggataccaatgatagaaaatgatacctttacaggggcagaaaaatccccactcttccttattgcctcttcagaaccctttagaaagtataaaatattgcctccaacatgctgaaaaagagtatctatgcataagtatcagagaagtccctcaagcaatcagtaggtgtgttctatttagagagagtttaaagttctcttagcatcagacaacttgattcctaaggtttccagtgtgtcaccaacaaaaagtgcattgatagggacctttgtctcttcctccctttgattaattgcccggcatcacagtttactagattaccaagtgttacatcatattaaataaaatgtagcagaaccatctgcatcaataaaaaa

SEQ ID NO: 63965 - DNA, 384 bp, Homo Sapiens
ttccccaagcccagagatgtccacctgggctggactgccctcaagcttatactagagaagagcaactgacctgccctacttgtgtggagtcaggagggtttctggcattttccacacctgtccactccttggagctggtttctcccattgctttttctaaatctggttctttttctctttacctggggcctggcttttctgagattgtcttagggttgagctatttgggtatcctgggtttgagtgttaggggatggacataaaggcaaaagagtgatgagaagagaatggagagaatttgaataaaaggtgggaaaggagagcactgcttctcttgacttgtttatcctagtcctacctgatccattcagggctcgtgtgcta

SEQ ID NO: 63966 - DNA, 213 bp, Homo Sapiens
tgcgaggcactcagctttttgaggacaactatgccctggccgtgctagacagtggagacccgctgaacaataccacccctgtcacaggggcctccccaggaggcctgcgggagctgcagcttcgaagcctcacagagatcttgaaaggaggggtcttgatccagcggaacccccagctctgctaccagacacgatttagtgtatggcgttctg

SEQ ID NO: 63967 - DNA, 387 bp, Homo Sapiens
gaaagtcagaatgttaacagctgtgatatatcctgcagggcttttgcagtttcttctgttctgtgttctgaaatcctgggtagagaatggctgaggaggagattaccagagaagttgctttgctcagtgctttgccccaggattgcctcaaatctgagtggacttcatcctttgcggcggctctgagcctggcccatcttcctattcccacgtgtagctagtgtctagtgtcagctttgctcaatgtggtggaaacattttgcagaactgttgtagaaagctgccttatagttggcttgacaaagcataattctctcataacaaactttcaaatcattacagtagcttagctactttagttgatgtgaccgagtatcggtagtacgc

SEQ ID NO: 63968 - DNA, 410 bp, Homo Sapiens
ctccattcaggttgaagtagcctcaaacagtaatttactttttgataataggctgttgtttttcttaaataagcttaaaacaattctatctgaaattggtagcatgggttcacttggctacaactgagcaaaatagatgcaactttcttttaatggggtgctgcctctttaggactgactgtactatccactgacactggtttggcagttggtactgctgaacatttttatacatgctaccatgaagctatatatgttagtattgaagaagctaacgggtatactatcatttttgatgtgtgggctgattataatttcctgtatttcctgtacattgggatgaaactgctttagcaaagtccacagatcagaaaccagacggtagtgttttgaagttgaaaccagtaaaa

SEQ ID NO: 63969 - DNA, 595 bp, Homo Sapiens
gggagggtgtcgcctgcagccaagttcactgtcacgggggaaggagccaccagccagtcctcagatttcagagactgcggaggggcttggcagacggtctttaccaagggctgtggtggcattggccgagggtcttcggttcttcccagcacaagctgcccttgctgtcctgtgcagtgaagggagaggccctgggtgggggacaacttcagagtgggagcacatcccaagcagtgcccatgttagcaggagcacagtggatggccttgtgtccctcgggcatgacaggcagaaacgagggctgctccaggagaagggcctcctgctggccagagcaaggaaggctgagcagcttggttctcccctctggcccctggagagaagggggagcattcctagacccctgggtgcttgtctgcacagagctctggtctgtgccaccttggccaggctggctgtgggagggtctggtcccacgccgcctctgctcagaccactgtgtgggagtgcacagcacagctgcgggtaaagtgtgagagcttgccatccagctcacgaagacagagttattaaaccattcaaatctctgtggtca

SEQ ID NO: 63970 - DNA, 635 bp, Homo Sapiens
tggaccagggtggtaagtgtctgcacatctgcctgtccctgtatcagcggctacccaccttccaaaccactcaggacagtacccgtggcactgggcccgcagaagcaagggatgacttggttctttggaagtaatgtcgtcttgtgacattggcctgggacaatcattgtgggtaggtagttattgatcgtgtactagataacccattggttctttgcctcatcctctcatccatgggtcagagttgaattcttatgtctatagacttccaatcagaagtctcactggtggggctgggggtgggggcaggcaggaggcatggatgggaacctgagtaggtagtgtgtccaagagatcagcacaacctttgcaggctgacttgctaagtctgacagtgactaacttgtgagcttactgcagtcagtcacagaggctgttctttttcacacaccccttcatgcctggctttccccatatccacatgcagagggcgtgctcatgatctctacagggttgcgtgatatgatggtctttggtagctgtctactgggtaacgcccctgtgtcatctgtcctttctcaggtgatgtcggcgacctacgtttatcctcctctccttgttatgtctcttctcct

SEQ ID NO: 63971 - DNA, 238 bp, Homo Sapiens
tcggctgatctagaggaccccatcgcgaatcacactgagtcaagccgtttgagtgcattgaatgcgggaaattctttagtcgaagttctgactatattgcacaccagagggttcacactggtgaaaggccttttgtgtgcagtaaatgtgggaaagactttatcagaacctcccaccttgttcgacaccaaagagttcacactggagaaaggccatatgagtgcagtgaatacgcgaa

SEQ ID NO: 63972 - DNA, 435 bp, Homo Sapiens
cagaaaagatgtacatacagatcctgtaagatacccataaggtgcagcgccagccccctgtcagctgcagatgttactttatacaggcgttccacctgtcctgccgccacatcctagacatgctcagtgcgcgccgccaggtgctccagaccgacatgctgtcggctcagtgtacggcaggctgtgctaccagtctatacagcatcctgggcagcaagtggagtgagaccctggataagcacctggcagtgactcacttcaccgaggaggtgggtcagctgttgcagcactgcaccaaggaggagtttgagcggaggtatagcaccctgcgggaactggccgacagctggattgggccttatgagcaggtccaactctgattattctcgatgcccagagatgctcatgcgcctgtgcgcactcacatcgacccat

SEQ ID NO: 63973 - DNA, 528 bp, Homo Sapiens
caagaaaagcagctgtttttcctgttatcatgcgagctttattcgagagcaaaactccatctgcgctcattcttacaccaacccagagagttagccattcagatagagagacaagctaaagaattgatgagtggcctgccacgcatgaaaactgtgcttcttgtagggggcttacccttacccccacagctttatcgtctgcaacaacatgttaaggttatcatagcaacccctgggcgacttctggatataataaagcagagctctgtagaactctgtggtgtaaagattgtggtagtagatgaagctgataccatgttaaagatgggttttcaacaacaagtgcttgacattttggaaaacattcctaatgattgtcagaccattttggtttcagccacaattccaactagcatagaacagctagcaagccagcttctgcataatcctgtgagaattatcactggagaaaagaacctaccttgtgccaatgtacgtcagattattttgtgggtagaagacccagcc

SEQ ID NO: 63974 - DNA, 607 bp, Homo Sapiens
atactaaatatgagtacataaaattctatctttgataaatttatttttatgccctacttaatatttgcatcagtataatatatatgagtgagtcttacagaaagatatgcttccataatatgaaatagattattcaataattgagaaacttgtatgtgtaatcatgagagtataagaatctggattatctaacattgttagccctgtgtatgtacagttcaaaaagttcatttataaaagtagtttcctgttcctagtgtgatgtatcacaaattgtgctgaggttattttagtatgtgtgtttcattcccgtgcttctgttctgaagtcctggaatacagttttcagtgtaattaattcaactgcacttaacactaatgtccgtgttggtatagaaatgtctaaatcctatactctagttgaggaagatcttccataattttatggtattacacagggaaagctatgactgcaggatcagtctaactatactattaggtgcatgtattctcttttcactaacttatacttgtctatctagaatacaggtcttccagtcagctggtcatttaccaggtgtggacttaagttgctgggcttgcagtaa

SEQ ID NO: 63975 - DNA, 410 bp, Homo Sapiens
ggtaccgcgcgagcatacggcagacagatgcaagaccatttttctccaagccatgggggactgtttggagggaaagccccctctctccctcctcccctcgccctcggcctggttctgcagcgtggaccgacctcattcatcgcctgccccctacccaattctgagcacacggtactgcagcccccagttcctccctagccttccatccctctgtccaccccagggggcaggtaaccccgctactcacactccacttgatgctgtctgtacagggttcatattttgtagcgaaagtcgtttttgtcccagccggcgatcggagtgggccttttctttctttttgttcattcttcaccttttactgtcttcctttcctccccttctagtagtccccagtttctattattgct

SEQ ID NO: 63976 - DNA, 427 bp, Homo Sapiens
aagacaaacactaaacaatacaaccatgaaattgatcaccgggattgcaaatctaattgggaaacgagttgagcaaacagcttggactgtttggagttgttgccttactttttaatatgtatttataaagtattccagcaaaagaggatgtagcctctgggaaaaaacaaacatgttacagtgttttttgtagattctcgttctatatctcatcacagcgccagccctgtttttagccggaaaggattcaggataaacattattatgcattctgaattggatgcatattcctaactactgtatttgttaccaaaagtggttctacaaatgctactgaaaaaaatctggaaattcctaatgtcctgagtattaataataaagtttaaaaatgcttttatatcaaaggtgcatcgtgaccaaattgttt

SEQ ID NO: 63977 - DNA, 913 bp, Homo Sapiens
  misc_feature (471)..(525): n is a, c, g, or t
  misc_feature (661)..(715): n is a, c, g, or t
gtcaagcagaactggattccaaagttgaagttttgacctataaaaaggcagatactgatctgcttccagaggagattggaaaacttgaagagaaagtggaatgtgctaataatgccctgaaagcagattgggagagatggaaacaaaatatgcaaaatgatatcaagttagcatttacagatatggctgaggagaatatccattattatgaacagtgccttgctacgtgggaatcattccttacatcacagaccaaccttcacttggaagaagcctctgaagataagccttaatcccattgaggatttctgtttgatctttgggagacagcatttattaaccaaagttattctttctggatctgccgtgtccttataaagtggatgaaaaatgttttgtacccatctggaaaaccaacaacttgaaatctcaggtattccaggtcactgacatgaatttgaagatatatcnnnnnnnnnnnnnnnnnnnnnnnnnnnnnnnnnnnnnnnnnnnnnnnnnnnnnnnctggcttggttttaattatgttcttaaatttgtgcgccaataattgcatatagattttttttcttaaatatttgactgtggaacatgccattttaaatatgttgtaaggactgttttaataaaaagtttagtatgnnnnnnnnnnnnnnnnnnnnnnnnnnnnnnnnnnnnnnnnnnnnnnnnnnnnnnngaccgcgcattctcctacacacctcaaaaacccctccacctttgtccccccgccctcgcccttcaaaaaaacctttccaaaaccttttcttggggcggcccgggcccccttaggggaaaggggaaacctgggcccaaaccttgttcccccaaagaaaaccccgggcacaagaaataggggttttggaatctccccccc

SEQ ID NO: 63978 - DNA, 362 bp, Homo Sapiens
ggggggcttttttttcctccctcttttccccttgccccctctgcagccggaggaggagatgttgaggggaggaggccagccagtgtgaccggcgctaggaaatgacccgagaaccccgttggaagcgcagcagcgggagctaggggcgggggcggaggaggacacgaactggaagggggttcacggtcaaactgaaatggatttgcacgttggggagctggcggcggcggctgctgggcctccgccttcttttctacgtgaaatcagtgaggtgagacttcccagaccccggaggcgtggaggagaggagactgtttgatgtggtacaggggcagtcagtggagggcgagtggtttcggaaa

SEQ ID NO: 63979 - DNA, 437 bp, Homo Sapiens
atcattttctagcaataactgagagcccagttaattttaagaatttcacacatttagccaatctttctagatgtctctgaaggtaagatcatttaatatctttgatatgcttacgagtaagtgaatcctgattatttccagacccaccaccagagtggatcttattttcaaagcagtatagacaattatgagtttgccctctttcccctaccaagttcaaaatatatctaagaaagattgtaaatccgaaaacttccattgtagtggcctgtgcttttcagatagtatactctcctgtttggagacagaggaagaaccaggtcagtctgtctctttttcagctcaattgtatctgacccttctttaagttatgtgtgtggggagaaatagaatggtgctcttatctttcttgactttaaaaaaattattagaaaccc

SEQ ID NO: 63980 - DNA, 498 bp, Homo Sapiens
taggtagtgtattttgagtggcatcagtctcactcatcttggtgccccggtgtttacaagagccagatggtgtcagaggagtacgcagttgtatgcagttatggttggggggaatgtttgtgagggtcttgaactatttatgagatgatcttgagcttctaattttcattgatgaaattgtggtggtttacagagacctaagagctcattctgtcaacagaaacactaatctgtacagagcgctgtctcaggtcatgcattgtcctccaaacccaaaggtttttttcagggtttggctagagagcgagtattgtgattttgctgaaaagacaaggtgtgaaggagcaacttcagttgacacaaaatttgaaaatgctcacagatcagggaggtgatttcccaaagtaattgcccaagaacctccgttttggaaaggatcccttttctgtagaatactttgcctcgatatataagcatacagatgcactttaaatgaaa

SEQ ID NO: 63981 - DNA, 992 bp, Homo Sapiens
gggcggtccgcgagcgcgggcgggcggctatgggccggggcctggctgcgcggctgggccaagggcccgcgatggtgatctgctgtgcggccgtgaactgctccaaccggcagggaaagggcgagaagcgcgccgtctccttccacaggttccccctaaaggactcaaaacgtctaatccaatggttaaaagctgttcagagggataactggactcccactaagtattcatttctctgtagtgagcatttcaccaaagacagcttctccaagaggctggaggaccagcatcgcctgctgaagcccacggccgtgccatccatcttccacctgaccgagaagaagaggggggctggaggccatggccgcacccggagaaaagatgccagcaaggccacagggggtgtgaggggacactcgagtgccgccaccggcagaggagctgcaggttggtcaccgtcctcgagtggaaacccgatggccaagccagagtcccgcaggttgaagcaagctgctctgcaaggtgaagccacacccagggcggcccaggaggccgccagccaggagcaggcccagcaagctctggaacggactccaggagatggactggccaccatggtggcaggcagtcagggaaaagcagaagcgtctgccacagatgctggcgatgagagcgccacttcctccatcgaagggggcgtgacagataagagtggcatttctatggatgactttacgcccccaggatctggggcgtgcaaattttatcggctcaatttcattcgtacaagtttctcctctaaggcaaagcccgagaaaaggccatcatgatccccgagaggcccatttgtaccgcaaggaggcttgaagaaacgatgtggaaccagcttgctgatggagacaagctggggacccgtcatgggcttgctccagagccgtccaagttcattcactaacgggacaccgtgaaagcttcccaaagaccttgccctc

SEQ ID NO: 63982 - DNA, 469 bp, Homo Sapiens
  misc_feature (39)..(39): n is a, c, g, or t
  misc_feature (121)..(121): n is a, c, g, or t
ctaagaaaaaatttaaagctccccagagcaaggccttgnagccagcttttcagagggaaaagaagttagaacagtgccaaagaacctgggcctatcagcgtgtaagggggcctgcccctcnatctgcgaaagaagagcccagacaccgggaacccctgacccaggaggctggaagtgtcccccttgaggacgaagcctccagtgacctggacctggagcaactcatggaagatgttgggagagagctggggcagagcggggagctgcaagcacaagcaacaagtgatggcgaggacttccccgtggcgctgtttgggaagtagctggtgctcctctgctccctctttttctcccttctctggggcgcaggagggagaagttgctaagtgctgggtctgttcattggctatgaggttcaaatgtgtgtggtgcagtttctgtgttaataaagcaggttacagtcaaaaaa

SEQ ID NO: 63983 - DNA, 435 bp, Homo Sapiens
  misc_feature (253)..(253): n is a, c, g, or t
  misc_feature (310)..(310): n is a, c, g, or t
  misc_feature (325)..(325): n is a, c, g, or t
  misc_feature (397)..(397): n is a, c, g, or t
  misc_feature (407)..(407): n is a, c, g, or t
caggggttactggcagcgcagaaggctcgaggtctgttcaaggacttcttcccggagacggggacgaaaatagagctcccagagctcttcgaccgtggcacggcgagttttccccaaaccatttactgtggcttcgaccccacggcagactcgcttcatgtgggtcatctacttgcgctgctgggcctgtttcatttgcagcgagcgggccacaacgtgatcgcgctggtgggaggcgccacggcgcgcctgnggagacccgagcggccgtaccaaggaacgcgaggcgcttggagacagagcgcgtgcnagccaaccgcgcganttcttgcgccttaagggctttgaaggcccttggcggcttaatccaccagcaagctttttcacttgatgggcngctccctggnggggcagctttcacttgtgcttgggaca

SEQ ID NO: 63984 - DNA, 307 bp, Homo Sapiens
ctttccctcttcccctttggacataactttctgttgaagctgttctttggctggttggttttagtactgtaaactgcttctgagcaaacacggaaatttagcaaaattatgtaaacttgatcctgaagttttagaatggcaaataaatgtacaattgtttacataacagaaaaggctaagcagaaagtaaatttcaatatgtcagtatagaggctctactttatgtagacttaaattaatgtgagatatgtaccttcatattcagaaatctggatgtttccttcatacattaaactattaataagca

SEQ ID NO: 63985 - DNA, 590 bp, Homo Sapiens
  misc_feature (215)..(228): n is a, c, g, or t
caggaagtcctccgatttcctttggtctttccaggagattggactacacattgtaaagactgactgggtttcaactagtcaaaaagcactttcttctgttttcaatccctgttcgatttgtgcttctgtgcttgtaggagagatggccagggtggcagccctcatgcaggttgaagtatatgtagcctcagcctgatattcttggtgcgaaggtnnnnnnnnnnnnnntaaataaaaccattggcctggttgagggcgtgaccaccaagacatatatgttgtgcccgtgttcatcctgtgtatttatactgtatatgtagagtctagatttatatactgcaatgtaaaatatatatatatttaccttttttaaagacaatggaaattccaagtagctaaaacttagcttcatttatttaatgccactttaaatgtcttaaatttgtttcctggtggacagccgggtaatgcttttagctgctcgcatgcttgtctttctgcatctccatcatctgtttaccttttggttaaactaataaactagtttgggacttggctggcatgtgctgccagacccaaagggaaaaaaa

SEQ ID NO: 63986 - DNA, 852 bp, Homo Sapiens
ggcgcaaaggttactcccagacccttttccggctgacttctgagaaggttgcgcagcagctgtgcccgtgctagtctagaggcgcagtgaagaggaagccatcgcctggccccggctctctggaccttgtctcgctcgggagcggaaacagcggcagccagagaactgttttaatcatggacaaacaaaactcacagatgaatgcttctcacccggaaacaaacttgccagttgggtatcctcctcagtatccaccgacagcattccaaggacctccaggatatagtggctaccctgggccccaggtcagctacccacccccaccagccggccattcaggtcctggcccagctggctttcctgtcccaaatcagccagtgtataatcagccagtatataatcagccagttggagctgcaggggtaccatggatgccagcgccacagcctccattaaactgtccacctggattagaatatttaagtcagatagatcagatactgattcatcagcaaattgaacttctggaagttttaacaggttttgaaactaataacaaatatgaaattaagaacagctttggacagagggtttactttgcagcggaagatactgattgctgtacccgaaattgctgtgggccatctagaccttttaccttgaggattattgataatatgggtcaagaagtcataactctggagagaccactaagatgtagcagctgttgttgtccctgctgccttcaggagatagaaatccaagctcctccttggtgtaaccaatagggttatgttattcagacttggcacccatgtctaccaaagtttacaacttcaaaatgagaaacga

SEQ ID NO: 63987 - DNA, 678 bp, Homo Sapiens
  misc_feature (552)..(552): n is a, c, g, or t
ttggcagaagcagggaggatatgacagaggcagaacagattatatttgatcatttttctgatcctaaatttgttgagcagttaattacttttctatcattagaagacagaaaaggaaaagataagtttaatccacgacgtttttgtctctttaagggtatattcaggaattttgatgatgccttcctgccagttctgaagccccatttagaacatttggttgcagattcacatgaaagcacccagcgatgtgttgcagaaattatagctggtttaatcagaggttctaagcactggacatttgaaaaggtggagaagctttgggagcttctgtgccctctgcttagaacagcactgtccaatattaccgtagaaacttataatgactggggagcttgtatagcaacatcctgtgaaagcagagatccccaggaaacttcactggctttttgaactgctgctggaatcaccattgagtggtgaaggaggatcctttgtagatgcatgtcgactttatgtactacaaggtggccttgcccagcaagaattgganagtgcctgaactattgcacagactactgaagtacttgggaacccaaactcacccaggtttacaaaaatgtcagagaaagaataggaagtgtgctgacctacatattcatgatagatgtatctttgc

SEQ ID NO: 63988 - DNA, 432 bp, Homo Sapiens
  misc_feature (201)..(237): n is a, c, g, or t
  misc_feature (293)..(293): n is a, c, g, or t
  misc_feature (321)..(321): n is a, c, g, or t
  misc_feature (345)..(345): n is a, c, g, or t
  misc_feature (367)..(367): n is a, c, g, or t
  misc_feature (375)..(375): n is a, c, g, or t
  misc_feature (406)..(406): n is a, c, g, or t
tctcaaaaggccttttaagcagcagagactgggctaaatactggaactgaattccacttttctgcctgctcatttgctgccaaagaccacttggggctccttgtctagaatgctctaagacgaaatttggccagacacagggttccttgattgttctgttcaactaatagagaacctacattttgccttcttaatatcgannnnnnnnnnnnnnnnnnnnnnnnnnnnnnnnnnnnngcccttaggagcttagctcaaaagttcaagctaaccctttgacactactagtggcntttaagtaacagtaatcctttgacactnctagtgtccatttaggagcttaancccaaagtcgactaacctttgncaccgctngtgcgttcaagaaagggtaggggatggagtncccttaatgcagggtcagcaaacttt

SEQ ID NO: 63989 - DNA, 424 bp, Homo Sapiens
  misc_feature (211)..(211): n is a, c, g, or t
tccagagtcagatctaagctccagcacgcctgaagatgtgttgctactctgacatcccgagtttctgtccacacattgcatgcacagcgccccacacattggatactgttgttcacgataatttctcccgttttccagagcatttaacatagcttggaggcgtaaaatggctctgtattttaataacacagaaacatttgagcattgtatnttctcgcatcccttctcgtgagcgcttagacctttttctattttagtcggattttgttttggaattttgcttttgtatgaacactcagcagaaaagtacttacttcttgccagttatctattaaccaaaacctttgatttgtagttttaaagattaaccctcaaagttctcttcataattgccttgacattttgggttgttctgttctgttaa

SEQ ID NO: 63990 - DNA, 1123 bp, Homo Sapiens
  misc_feature (1094)..(1094): n is a, c, g, or t
tccggaattcccgggatcgcagccaggcgcgcactgcacagctctcttctctcgccgccgcccgagcgcacccttcagcccgcgcgccggccgtgagtcctcgtgtgctcgcccgccggccagacaaacagcccgcccgaccccgtcccgaccctggccgccccgagcggagcctggagcaaaatgatgcttcaacacccaggccaggtctctgcctcggaagtgagtgcttctgccatcgtcccctgcctgtcccctcctgggtcactggtgtttgagggttttgctaacctgacgccctttgtcaaggaagagctgaggtttgccatccagaacaagcacctctgccaccggatgtcctctgcgctggaatcagtcactgtcagcgacagacccctcggggtgtccatcacaaaagccgaggtagcccctgaagaagatgaaaggaaaacagaggcgacgagcaaagacaataagattgcagctgcaaagtgccgaaacaagaagaaggagaagacggagtgcctgcagaaagagtcggagaagctggaaagtgtgaatgctgaactgaaggctcagattgaggagctcaagaacgagaagcagcatttgatatacatgctcaaccttcatcggcccacgtgtattgtccgggctcagaatgggaggactccagaagatgagagaaacctctttatccaacagataaaagaaggaacattgcagagctaagcagtcgtggtatgggggcgactggggagtcctcattgaatcctcattttatacccaaaaccctgaagccattgggagagctgtcttcctgtgtacctctagaatcccagcagcagagaaccatcaaggcgggagggcctgcagtgattcagcaggcccttcccattctgccccagagtgggtcttggaccagggcaagtgcatctttgcctcaactccaggatttaggccttaacacactggccattcttatgttccagatggccccagctggtgtcctgcccgcctttcatctggattctacaaaaaccaggatgcccaccgttaggattcaggcagcagtgtctgtacctcggttgganggatgggccatctccttcaccgtgctacc

SEQ ID NO: 63991 - DNA, 456 bp, Homo Sapiens
  misc_feature (14)..(14): n is a, c, g, or t
  misc_feature (27)..(27): n is a, c, g, or t
  misc_feature (44)..(44): n is a, c, g, or t
  misc_feature (55)..(55): n is a, c, g, or t
  misc_feature (66)..(66): n is a, c, g, or t
  misc_feature (102)..(102): n is a, c, g, or t
  misc_feature (125)..(125): n is a, c, g, or t
  misc_feature (225)..(225): n is a, c, g, or t
atttagccaaggtncggattccattcntaaggggaatatttctnccctcttattntttccgggtgncctgaaaatgttccctttaaaaatagattatcaggnggatacaccagggacacaaaatntgttgcttgtgaaaatgcagagtggattaagcttttctttttcaaggctctgcaacaaaacaggtacatttttatttcagtaaaaacactgctttttttntttgcctccgtcacacacacgagtaacataggatagatatgtgtatgtgaacatgtggctcttgttcccagttgtgtaatggatgcattcccttaaagtttgcagtaaagtgaatgtttattaagcaaattgtttttccccagtgacttctactgtaaaaatggcattgtctttcagtaggctctgaatatagtatgttcccatattctttggtaagatgaccaatcaacc

SEQ ID NO: 63992 - DNA, 499 bp, Homo Sapiens
tttggctatttattaaaactttgattttattttgtgatctgtgtcaaactgcctcattctcagtgcaggtgatccctcctccccagaaacaagaactgacaggtagggtctttgtgaagtcatggcttccacaaggccccagggaaaccccacacagttctgagagttgatgggaatcccagcaaagatggggtgggtgggagacagtgacaagaaggggtggtggtcaccagtcaagaggctgggggttggaaaaccctgtctttggccttgctcagctttggggctgccatgttcatgatggagatgggggactgaaatttcccctgacctggaagtaccccttcggccaggcatggctttgattctctgctaagggctcagctgagagaggagcaggaaaatgtcatgggctggcttcttcacaaggcattgctgctgatgctccggagtccaacaccacgggcaaattgctccagcaggcccccgatggcaccgg

SEQ ID NO: 63993 - DNA, 1264 bp, Homo Sapiens
  misc_feature (756)..(765): n is a, c, g, or t
  misc_feature (768)..(800): n is a, c, g, or t
  misc_feature (1156)..(1156): n is a, c, g, or t
gcggccgccgctcttggccccgcaaacgcaccgccactcacacctgcagctacgcgggctgcggcaagacctacaccaagagttcgcatctgaaggcgcatctgcgctcgcacacaggtgagaagccctaccactgcaactgggacggctgcggctggaagtttgcgcgctcagacgagctcacgcgccactaccgaaagcacacgggccaccggccattccagtgccatctgtgcgatcgtgccttctcgcgctccgatcacctggcgctgcacatgaaacggcacatgtagccgggacgcccccgcccacctgcgcgcggccgtggcgggtcccacgcgccgggggcggccccctcccaaactgtgactggtatttattggacccagagaaccgggccgggcacagcgtggctacagagggtctccctcgatgacgacgacgacgacgccaccaccccagcccccgtctgtgactgaaggcccggtgggaaaagaccacgatcctccttgacgagttttgtttttcaaaatggtgcaataatttaagtggcatcttctctcccaccgggtctacactagaggatcgaggcttgtgatgccttgtgagaaataagggccttaatttgtactgtctgcggcattttttataatattgtatatagtgactgacaaatattgtattactgtacatagagagacaggtgggcatttttgggctacctggttcgtttttataagattttgctgggttggnnnnnnnnnnaannnnnnnnnnnnnnnnnnnnnnnnnnnnnnnnngcactggtctggttgcttggaactggggccttggggcacttgggaggaggggggagcggagagtttgatggagggcagccccactaaagcatcgtgtgcagtgggtcctgcgtctgccagcaccgggactgccagctgctgtgcctgcctgccaggaacctgtgggtttttctgtaaatttagacactgcattttaggactgagggagggttatttacaggttgtctttgagccataaatcgcctctttgccccacagctggggaaagtgctggtcccactgacgtgggcctccatcctacggtttggaaacaaaaactttaaaaaagttaactttaaccttcctttccctggtancacacactgaaatgttaataacataataaacagaaactcactcacacaacagagaattgaaaaacagcaatcatacgatcattgtagtatcaaggaacgaacagtaga

SEQ ID NO: 63994 - DNA, 705 bp, Homo Sapiens
ggtgtttgatcatttagtttttaacaggctgaggcaacatggatcagtgtgtgtccccctcaggaatgtatccacagtggccttccttgctggtgggcagtgtatcctgatggcagggtacaagtaccattaatgaagggtctgcaacataaagccttaaaaagacacacactaagaaaactgtaaaaccttgaacattgttatttatattttttaaaatggaaaagatcactatgtttgttgtgctaaccacttatttgattctgttttgtggtggacatagatgattacgtttgagctttgtattttgtgaaaaccttaatgaaatgaattccaaagatagtcacgttgagcgtgaagactttttttcttacattcctgtcttatttttaccaacacgagcaggcattctgcgcttccactggactgagtatgggggagtcctgctcccctcctgtctcacaccttccccaggaggaaggcctcatgcactgcggttattgcatcatttcctagtgcttcatgtcattatcactggtggggaaacaaagctaaattttattaacaaagacaactctcagacctatataataggaggaggacgtccagaatccaacaaaattcaaacggagcccatgctgttctcctgaacaagatttgggctaaatacggcctgtttattgaggctgttttaatgatgcttta

SEQ ID NO: 63995 - DNA, 530 bp, Homo Sapiens
  misc_feature (494)..(494): n is a, c, g, or t
tctgtactacccaacaactaaatggtttagattgtttagctcatgttaataggatggttgtgtattataaaaaacgagttacgtgtgtgtgtgcacgcatgcacgcacatgtgctggcttaaaggttgttaatgcaaggtttggggtcccctttaacactggtgaaagctacggtgctctccccagagatatgtcttgtcagcctctctagttccccttggcctgcatgtacaaacttctaccctagaagctctctgccatccgatgtattctaatagatttgtaaggctattaatttgaagtaactccttgctcacagtgattcttgcttctctgagacctgctcccagtccgatactgtgggcttcagaagccatgactccccaactctgcctgtatcaccggttgaatggacaactaacccgagctggaccaacacaattctctccagagacttttgattttacttttaatgtagagacaggggctcaacnttgttgcccacggctgatgttgaacttgacgtgagg

SEQ ID NO: 63996 - DNA, 977 bp, Homo Sapiens
gatagccgctgccgccaggaactcaggccggctcctgttccttcaagagtgctggaggccagggttgaaatacaagtttaatgttcctcgtcgggcaaaagataaggatccgatctcccccggcccggtgtgcagcaggagcgaccaaccccgacccgggttaaaactcccagggactcttcgctgctgccacctcttgttctctcccccgttcccactcggggtctccctcagggccgggaggcacagcggtccctgcttgctgaagggctggatgtacgcatccgcaggttcccgcggacttgggggcgcccgctgagccccggcgcccgcagaagacttgtgtttgcctcctgcagcctcaacccggagggcagcgagggcctaccaccatgatcactggtgtgttcagcatgcgcttgtggaccccagtgggcgtcctgacctcgctggcgtactgcctgcaccagcggcgggtggccctggccgagctgcaggaggccgatggccagtgtccggtcgaccgcagcctgctgaagttgaaaatggtgcaggtcgtgtttcgacacggggctcggagtcctctcaagccgctcccgctggaggagcaggtagagtggaacccccagctattagaggtcccaccccaaactcagtttgattacacagtcaccaatctagctggtggtccgaaaccatattctccttacgactctcaataccatgagaccaccctgaaggggggcatgtttgctgggcagctgaccaaggtgggcatgcagcaaatgtttgccttgggagagagactgaggaagaactatgtggaagacattccctttctttcaccaaccttcaacccacaggaggtctttattcgttccactaacattttttcggaatctggagtccacccgttgttttctggcttggcttttccagttgtcagaaagaaaggaccatcatcatccaaactgatt

SEQ ID NO: 63997 - DNA, 404 bp, Homo Sapiens
  misc_feature (238)..(238): n is a, c, g, or t
  misc_feature (257)..(257): n is a, c, g, or t
  misc_feature (304)..(304): n is a, c, g, or t
  misc_feature (382)..(382): n is a, c, g, or t
ccagaggtagggaaggaaacaatcccgacccggagtggacaggtgaggaggggaggacttgcctcgccgaggccgcatgcgaggagcgtgcccaagggcgaaggtccagggaacccggctcccgcgcaccgaagacggccgccatgccggcccgttgtgtggccgcccactgcggcaacaccaccaagtctgggaagtcgctgttccgctttcccaaggaccgggccgtgcggctgcntctgggaccgcttcgtgcngggttgccgcgccgactggtacggaggcaatgaccgctcggtcatcntgctctgaccactttgccccagcctgttttgacgtctcttcggttatccagaagaacctgcgcttctcccagcgcctnaggctgggtggcaggcgccgtg

SEQ ID NO: 63998 - DNA, 526 bp, Homo Sapiens
ttttttcaaaggggaagagtagcatgtttgtacctaggatggaccaagagatgtttgcccagaggagggggttgagcaaagcgacaggttaatagtaaaacaattaagatgacaaggaaaattactgggcttaagatttctaactacatttacttccttgacgaacgcttcggccgtgcgtagactggtcagcttccggggtgacttagagcagggctgtggtcactttcactggcatctgggtcctgtcgtaggatcagccggtttggatggtctgggtcttgctggctggtccacttgtcctgggctgctggtttcagccgacgtggtcgccgcggaacttcaagggtccttcctacccgcgttgctgagagtctgggtttacgcgtcacctcgggcgggacccgatcctccgctcctgaggcccccacaatgaagcagtcgacgcgtctccccaagaaaggtaaccgccagcctctcttgtacggaagggggctgcctgcgtgggatgcaatctccctcgtgc

SEQ ID NO: 63999 - DNA, 796 bp, Homo Sapiens
cgccaccggcatttcaatagtcattcaggatggaggactgcttgtatttggggacaataaagatggatccagaaatactactttgaggactcattacatcctgatccaggatggtgggtcgctttcatattggagcagaaaaatgccgctataaatccaaagcgacaattaccttgtatggcaagtcagatgaaggtgaaagtatgccaacatttggcaaaaagtttattggtgtggaagctggcgggacactggagttacatggggcacggaaggcatcgtggacgttgttggcaaggaccctgaattcctcaggcttgccctttgggtcctatacctttgaaaaggacttttcccggggcctcaatgtgagggtcattgaccaagacacggccaaaattttggaaagtgagagatttgatacccatgaataccgcaatgagagcaggcggcttcaggagtttctgagattccaggatccaggtcggattgttgccatagctgtcggggattcagccgctaaaagtctcttacaaggaaccatccagatgatccaggaacggttgggaagtgaactgatccaaggactgggctacaggcaagcttgggctttagttggtgtcattgatggtggaagcacttcttgcaatgaatccgtgagaaactatgaaaatcatagcagtggcgggaaggctcttgccccaagagaattttatactgtggatggccagaagttctctgtgacagcttattagtgaatggattgaaggcgtttctctatcacgattccgggtga

SEQ ID NO: 64000 - DNA, 732 bp, Homo Sapiens
  misc_feature (594)..(627): n is a, c, g, or t
tgctgtttcctgctcgaggtgatcctgtgcaccaagaggtgtcggtgggcgcacggaagaacgcttttgcactgctcgtggagatgggccatgcgtttcctaaggtttggctcgaaccaggaagaggccctgcagtgctacctcgtcctgatctaccctggcctggtgggcgcggtgaccatggtcagctgcagcatcctggccctgacccacctccttttcgagtttaaaggtctgatggggaccagtacagtggagcagctgctggagaatgtgtgcctgcttctggcctcccgcacccgtgacgtggtcaagtctgcactgggcttcatcaaggtggcagtgactgtcatggacgtggcgcacctggccaaacatgtgcagctggtgatggaagccattgggaagctttcagatgacatgcggcggcacttccgcatgaagcttcggaacctgttcaccaagttcatccgcaagtttggatttgagctggtgaaaaggctgttgcccgaggagtaccacagagtcctggtcaacatccggaaagctgaggcccgggccaagaggcaccgagccctgagccaggctgccgtnnnnnnnnnnnnnnnnnnnnnnnnnnnnnnnnnncccgcccagggcaaaggtgacagcattgaggagattttagctgactcagaggacgaggagtaagccaattggtgggtcagacataagggacctctagacagcaca

SEQ ID NO: 64001 - DNA, 285 bp, Homo Sapiens
actgtttttctctcttgccaaatgaggcagtctctgagtgacggtgactgtggccttgaagcctggaggactgttgggcatgtagactggcaccttgaagattcaccattgtttaaataaaatcaagcaaatgcttttttaccaagagcccgagcctcgctctaagggacgcagtcctagaggcgtgcctttggggcttgaagagcacactgtgggacgcacgtgcttctgattaaaggaatctcagatctcaattacgcttccattggtgggtcagaacataag

SEQ ID NO: 64002 - DNA, 425 bp, Homo Sapiens
atccccgcggaaccctatccattgttattgttcaattatatcatcagcaaattctatagtcacatgggctcaaagatctgcctcatccaatcttgttccctaggtcaaggaacccagagccagggtacctgggaggcatggtcagcatcgccagtgtacatatattctgtgcccatactaccactaacgcttccagctgaagaggaggcagaaaaccgttacattgcacagggccatgaaaggaaaggcttcactacttttacatgttaccttaagaccaaagatccagcagagtctaaggaaatatcctaatcattactgtgtaatgttacttttttgctattcagtgtcttgagattgtgtggaaattcaaggtgacctgatcttgtcacatactttaattttctgatccacatttgctgaaa

SEQ ID NO: 64003 - DNA, 848 bp, Homo Sapiens
  misc_feature (46)..(46): n is a, c, g, or t
  misc_feature (688)..(688): n is a, c, g, or t
ttggtcccgaagcctccaaccacctgcacgcctgccagggcctctntggggcagccatgaagtccctcgtcccgctcctttgtcttgctcagctctggggctgccactcagccccacatggcccagggctgatttatagacaaccgaactgcgatgatccagaaactgaggaagcagctctggtggctatagactacatcaatcaaaaccttccttggggatacaaacacaccttgaaccagattgatgaagtaaaggtgtggcctcagcagccctccggagagctgtttgagattgaaatagacaccctggaaaccacctgccatgtgctggaccccacccctgtggcaagatgcagcgtgaggcagctgaaggagcatgctgtcgaaggagactgtgatttccagctgttgaaactagatggcaagttttccgtggtatacgcaaaatgtgattccagtccagactcagccgaggacgtgcgcaaggtgtgccaagactgccccctgctggccccgctgaacgacaccagggtggtgcacgccgcgaaagctgccctggccgccttcaacgctcagaacaacggctccaattttcagctggaggaaatttcccgggctcagcttgtgcccctcccaccttctacctatgtggagtttacagtgtctggcactgactgtgttgctanagaggccacagaggcagccaagtgtaacctgctggcagaaaagcaatatggcttttgtaaggcaacactcagtgagaagcttggtggggcagaggttgcagtgacctgcacggtggttcaaacacagccccgtgacctcacagccccaacccagaaggtg

SEQ ID NO: 64004 - DNA, 1557 bp, Homo Sapiens
  misc_feature (754)..(754): n is a, c, g, or t
  misc_feature (889)..(889): n is a, c, g, or t
  misc_feature (892)..(892): n is a, c, g, or t
  misc_feature (1002)..(1002): n is a, c, g, or t
  misc_feature (1015)..(1015): n is a, c, g, or t
  misc_feature (1027)..(1027): n is a, c, g, or t
  misc_feature (1054)..(1054): n is a, c, g, or t
  misc_feature (1124)..(1124): n is a, c, g, or t
  misc_feature (1156)..(1156): n is a, c, g, or t
  misc_feature (1159)..(1159): n is a, c, g, or t
  misc_feature (1230)..(1231): n is a, c, g, or t
  misc_feature (1313)..(1314): n is a, c, g, or t
  misc_feature (1376)..(1376): n is a, c, g, or t
  misc_feature (1414)..(1414): n is a, c, g, or t
  misc_feature (1460)..(1460): n is a, c, g, or t
  misc_feature (1491)..(1492): n is a, c, g, or t
  misc_feature (1495)..(1495): n is a, c, g, or t
  misc_feature (1546)..(1546): n is a, c, g, or t
acttagaaaacaggatatacaaaaacagcacttaccaggaagtagtgaggaagataaggcagacggtgtatttataaatggatgtgctccttagtatattagcttccctatttgcttaaaagtacaggctccctaagagaggatggagagggagagactgaattgttagtaggtctaaacatcaaagaaaacatttttattagttacttatggaaaatcatctattacaatgataaccttcaagtgacttccattatggctggacaggcggtgagctcagtggattgcagtggtgtgctggtgattttgcacagtgagctctgcggaaggggtcaggctcaactgctgatgtgtctcacacgtagcagacaaggggtggctgactggcttctttggcctcaacatggtgtatgtcgggagtgacgcaatccgctgtctgcgtctcacggccccacccggccggctttgagaatcactgatgtgccctaattacccgccgcgggttcgctcagagccccggtatggcggaagacacgttccgcggataacgtgcgatcgacgtgggtgcagggggtagtggagaggcagtgagcacgcgggaagacggctggaagcgcacggcgccgcggtgcggcccgcggcgaggtgaggcgcggtatcccctactccaccgacgttgaataaaattatagtagatagctgatgggaggcgggcacctcccgccgtaaagacgtgcgtcccagcacgggtatntctcgtaagtgtaccccgcggccccgctgagcgatagggcggacgccaccgcgcatggtaagagaagaaacaagatgtgacggcacgcggcatcacgcaaatatgtttgccccgaagaccggagaaccgcacggncgngatgtaactctctcaatctcgtcacaccaccatcaactgtctgactcagctctcatgacacacaatacgtgagaaggcgatgtccgaatagtgtcacgcgtcggtatggngtggatgtggtgnagccgagcgcgnatgcacgcgacacgccactgaagacgntgcagcgaagaaagaaccagcccgcgacgatgtctttcgagggcagcccaagctgacggacgggagctangcagtgctagatgcggccgcgtagcgtcgagntangtgtctttacataggtcgtcacatgtcacgcacggcgctcgtagacggtgggacgcagcagtcatggtgcnntgtccagcgcgccgttctcgagtcacttccgagtggtgatatatgtgtgaggaagacggacggcggcggacgcacgagcaannccgcagcccgtaagtgaggagtagagagatgagccgcagatactcggtggtgagaggaagancagcggcggccctcgcggtgctgatcatggccgctggnacaatgtcgatgcacgtgacgtcggcggttccgggacgatgatggncggagggtttcgcctgcgcgccgctcgaganntantagatcgagctacgagtatcgtgccgctcggcagcggtaggcggggcgtanctgacgagacg

SEQ ID NO: 64005 - DNA, 1045 bp, Homo Sapiens
tggaccggtccggaattcccgggatccagctccgggcgtggggtgaaatctcttgattcctagtctctcgatatggcacctccgtcagtctttgccgaggttccgcaggcccagcctgtcctggtcttcaagctcactgccgacttcagggaggatccggacccccgcaaggtcaacctgggagtgggagcatatcgcacggatgactgccatccctgggttttgccagtagtgaagaaagtggagcagaagattgctaatgacaatagcctaaatcacgagtatctgccaatcctgggcctggctgagttccggagctgtgcttctcgtcttgcccttggggatgacagcccagcactcaaggagaagcgggtaggaggtgtgcaatctttggggggaacaggtgcacttcgaattggagctgatttcttagcgcgttggtacaatggaacaaacaacaagaacacacctgtctatgtgtcctcaccaacctgggagaatcacaatgctgtgttttccgctgctggttttaaagacattcggtcctatcgctactgggatgcagagaagagaggattggacctccagggcttcctgaatgatctggagaatgctcctgagttctccattgttgtcctccacgcctgtgcacacaacccaactgggattgacccaactccggagcagtggaagcagattgcttctgtcatgaagcaccggtttctgttccccttctttgactcagcctatcagggcttcgcatctggaaacctggagagagatgcctgggccattcgctattttgtgtctgaaggcttcgagttcttctgtgcccagtccttctccaagaacttcgggctctacaatgagagagtcgggaatctgactgtggttggaaaagaacctgagagcatcctgcaagtcctttcccagatggagaaagatcgtgcggattacttgggtccaatccccccgcccaaggaagcaccgaattgtggccagcaccctctctaaaccctgagctcttttaaggaattgggcaagt

SEQ ID NO: 64006 - DNA, 896 bp, Homo Sapiens
ggggagttcccgagtatcgcgagaagcgcgcttagtctgcacgccgaggtccgcgctgtgtcccgtgttttctgcgtgagaggaaaagatgctagaaccacaggagaatggcgtgattgacctaccagattatgagcatgtagaagatgaaaacttttcctcctttccccacctccagcctctccagagagacaagatggtgaaggaactgagcctgatgaagagtcaggaaatggagcacctgttcctgtacctccaaagagaacagttaaaagaaatatacccaagctgggatgctcagagattaatttcagagagaggacttccagccttaaggcatgtatttgataaggcaaaattcaaaggtaaaggtcatgaggctgaagacttgaagatgctaatcagacacatggagcactgggcacataggctattccctaaactgcagtttgaggattttattgacagagttgaatacctgggaagtaaaaaggaagttcagacctgtttaaaacgaattcgacttgatctccctattttacatgaagattttgttagcaataatgatgaagttgcggagaataatgaacatgatgtcacttctactgaattagatccctttctgacaaacttatctgaaagtgagatgtttgcttctgagttaagtagaagcctaacagaagagcaacaacaaagaattgagagaaataaacaactggccttggaaagaaggcaggcaaagctgctgagtaatagtcagaccctaggaaatgatatgttaatgaatacacccagggcacacacggttgaagaggttaatactgatgaggatcaaaggaggagtcaatggattaaacgaagacattctggacatccatgtaataagctattgactc

SEQ ID NO: 64007 - DNA, 968 bp, Homo Sapiens
  misc_feature (224)..(263): n is a, c, g, or t
ggtgatatacaaagggatataaatatatacacttaaatagagaaaaagaggttgattgaattgtgcctttgagtgaacccagtttttaaataccgctgtgtttgtttcgccatggcttcagggatgctacatggctcttgcaccttttactcctctgctttatgaagtttgagttgtatttgtgcatcttaaagtaggttgaggcttgaggctgggctttcggnnnnnnnnnnnnnnnnnnnnnnnnnnnnnnnnnnnnnnnncttgtacttaaacctgcttgcttcctaccacagattctttattttccccaacactacaaaaaaacttttaaaactttgccatttcatctgtttacactctttgccactgattagcagtatttaaatcttgcaagaatattttgtgctttctttagaaacacaagagtatagatttttctcactgaaaagtgagagttacgcattgcagccatgaagggatgctaggatcaattatggcagtaccttttttcccctcctgttcttgagccagttgtctcttttgttttgggtcccacttaggattaatggatgtaaggtattttcctgtgcctttattttgtgtcattctattggaaggaggtgtaacggcagaatagcatcgtgttgggggttttccttccaacactgcaagtgatattgccaccatgtgaacctcaaatatgcaatcccagttgtgttgggtttctcggtggacttggagtgttcatctcttcatgaattgtgagcactgaccatgttcttcagttcttaattatggtgagttgacaaataccaactactgctttcttttaggtggctataaaatttcttactgtcaggaggacattgacattatattctgtccactgaacgtcagagatcagcaggcacgtactgggtagaaaagtgcttatacttctctaacctaaagggagagggaaaccc

SEQ ID NO: 64008 - DNA, 1261 bp, Homo Sapiens
  misc_feature (1033)..(1033): n is a, c, g, or t
  misc_feature (1173)..(1173): n is a, c, g, or t
tgcgataggtaatatagaccagtggtaaaaaagcaggctggtacgcctccggatatccgggatatcgtcgacccacgcgtccggcctgttaattcaagagcttccctttcttgcagagaacaagtctgcccagattccatgctttctataactggaggacctggcaaacctgccgcatgctgcacacatctacctacgtacacatatacaatagtattgatgattctgaacaataacagggtaaaacagttggtttgccatgttaaaaactgatttacagtaacttacaacaactgtacttctgtggattagcaaatcatgtgtttaaacaaatcccatatgttgggcaacagttcaaataagcacggagaagtgttgcccaaacttggttctctgactcttatgtatttgtaaggctgggcttcaaaatcaaaacaaaaaccccaaaaacagcaggcaaatgctttttaactctgacaccgttgccataaatccctgatactcaaagtctaacaagaaagacatggaaaattagcagcccattttcagaaagatcaaaatgatctagggttctaattgcttttgcatcctattcttacaaagtgatgtcccaacagggaacagtaggagctggagtgggatctccaagtcccagtttgagtgtgggatgtgcttccagcagtgccttccctttatgaaagacatcacatggcatccagggccaggcaggcagctttgaggtgcctttacgagaaaaccgagctggggctgggaagaggaccagttattgacactgatgtgcaatgaagtgacaagatgagaggcagaatcgtaagagctttgaatttgaagtgagtttgggtccccccataagttatttattccttttttctgtggaaatatatttattttactggggagcgctaacatctggatcgtaacatgtgcagaatgtatgggaggaatggattctcttgaaggaatgtaaatctgagttaaaaggggggcccagccaggcccccaggtctttagngggccgccttcgcgtcgagacccaaagcgcggggccccggttcccgtctcgttccaaaagaggaagaggtgggcgaggagaggctgggagctagaaaaagtgttcttaaacccaggctttttgggcgcggggggccccantagggaaaaggggaaccggggccattagggggtctccccaggggagacccgggggcaagggataaggggggttgggattcccccccac

SEQ ID NO: 64009 - DNA, 436 bp, Homo Sapiens
caccccaagaattgaaaaccagacaaactacacaatagatgcttctgtcagtaagaaagcagctgatagcacatcacagtgtggaaaagccactggcagtgattcaagtggtgtcattgatctcacaatggatgatgaagagagtggagcttcacaagaccccaaaaaactaaatcacactcctgtatcaaccatgagttcttctcagcctgtgtcacgaccattgcaacccatacaaccagcaccgcctcttcaaccatctggggtgccaacaagtggaccatctcagaccaccatacacttactacctacagctccaactaccgtgaatgtaacacatcgtccagtattgctcagcggcgctgagctaatacaggaccatagaaacaccaaacccagtatctcaataactgccagtcctaatgatattccaata

SEQ ID NO: 64010 - DNA, 253 bp, Homo Sapiens
aggcaagaagtgttgccggtagggtatgtgtgctttctttgccttcctatttcctttcaaagaaatctcttgtaaattacaaaactgtgaattgggttgccaaaaactgttgcccttcgttagatgcttcaaacagtgtaaatcctatactgcaccctgtccacctctgctccctcctccgtcccctgagagtgaggacctcatccgaccatgtaattaccattcgcttgctattaaagagcctttcaaactc

SEQ ID NO: 64011 - DNA, 650 bp, Homo Sapiens
  misc_feature (35)..(35): n is a, c, g, or t
gtgtcactctgaggatccccacactgggttcgagnttcccccaaaaccaaaaaggtagtcacaaatgcatcctttataagtccagtctggcaggggctgtcttagtgaaatgagaggacctataatccccagaagaaactaatctcaatattactagattgaaagttctaaaatgctttgacacaaaaggctggagtcatcctgctacctgtttccttatttttagtcagcttaaatcactgatagctgaaattattcctctcttagtgggcgtggagagggtgaaggaagatatccttgtgttctagttgctcaattcattcttactgcagctgctgcatctcctcctgtcctagtttctagatgacgtttgtctttatgaactacactgctacctcttgatttataaactaatgatctcttttttaccttagtatctagttacagaatggttgaatgacaaagcagagaagcaagagtgccctgttgagtgccctttacgtatcacaacggatccaactgtactggcaacgacccttaacatgttaccaggtcttatccattccccgttaatttgcaccaccccaaaaattaattcgctttggtccacctttatcctgagggcgtgaaagcccttttgctatggacat

SEQ ID NO: 64012 - DNA, 936 bp, Homo Sapiens
gcaacgaggacgggggagtgcgactgcgtctcgggttgcatggccgagaagcggcacacacgggactccgaagcccagcggctccccgactccttcaaggacagccccagtaagggccttggaccttgcggatggattttggtggcgttctcattcttattcaccgttataactttcccaatctcaatatggatgtgcataaagattataaaagagtatgaaagagccatcatctttagattgggtcgcattttacaagtgaggagccaaaggacctggtttgttttttattctgccatgcactgacagcttcatcaaagtggacatgagaactatttcatttgatattcctcctcaggagatcctcacaaaggagttcagtgacaattagcgtggatggtgtggtctattaccgcgtcagaatgcaaccctggctgtggcaaatatcaccaacgctgactcagcaacccgtcttttggcacaaactactctgaggaatgttctgggcaccaagaatctttctcagatcctctctgacagagaagaaattgcacacaacatgcagtctactctggatgatgccactgatgcctggggaataaaggtggagcgtgtggaaattaaggatgtgaaactacctgtgcagctccagagagctatggctgcagaagcagaagcgtcccgcgaggcccgcgccaaggttattgcagccgaaggagaaatgaatgcatccagggctctgaaagaagcctccatggtcatcactgaatctcctgcagccttcagctccgatacctgcagacactggacaccatttgctgctgagaaaaactcaacaatggtcttccctctgcccatagatatgctgcaaggaatccttagggggcaaaacacaggcatctaagctaatgttgaagatgaagcgctaagcttcca

SEQ ID NO: 64013 - DNA, 456 bp, Homo Sapiens
ctgatgttatggtcagctttgccttttttttcttccaattttatctaaacagttgcagagatttttatatttgtagaaagcatcaagaacggtatgccagtcaggtcctggaagtaaaatggaggcacaatatagcactgactgagttgtaaagcctcctgcctggagacttcagttatagctgtaataattaatcttatttataaaagccactccactaaccttttctctccaactgtaaacacagagacagctttgggaataagccaaaaacagggtgatctcattagattttgaagatatatgactcctttgggctacatttcatattgatcaatttctaggtatttttcactggcccaaagtattgcattcccttaacagcaagcacaagttctctatatcacttgtttttggttgttgttgttgttgtcgtcgttgttacacattcggggg

SEQ ID NO: 64014 - DNA, 441 bp, Homo Sapiens
agaatgtgtaacaacgacagaatgtgtaacaacgaccagacaaatacaccctgaatattaccgtctatgaccttgggataccccagaaggctgcgtggcgtcttctacatgtcgtggttgtcgatgccaatgataatccacccgagtttttacaggagagctattttgtggaagtgagtgaagacaaggaggtacatagtgaaatcatgcaggttgaagccacagataaagacctggggcccaacggacacgtgacgtactcaattcttacagacacagacacattttcaattgacagcgtgacgggtgttgttaacatcgcacgccctctggatcgagagctgcagcatgagcactccttaaagattgaggccagggaccaagccagagaagagcctcagctgttctccactgtcgttgtacacagttctcgtctcgctt

SEQ ID NO: 64015 - DNA, 1064 bp, Homo Sapiens
  misc_feature (1023)..(1023): n is a, c, g, or t
ggggactggctgtgaggcggtcctgcctcgctgccttcagtccctagtgtctgggtccccgccctccagccgcctttgagtcgtgcctgggtcctcgcccttgcctcagaaccgcgaagaaaggaagctcgcgtgtttgctagaaaacctagttgggagtgcgaggcagagaacgttcagcacctttgttcctcccgaaccctcgggacagaggcagggttctgagggcagggattccccctcgtcttggccccaccgcccgggctgggcactaaactcgggccgcggcggggcgagcgaggcgggctccggagggagctgacgcctgatgatggcgccagtccaacatgtttaccgtggctgatgtggttgagtcaagatgaactgggcaaaaagctataccagacgtttaaggatcggggtatactggatacactcaagacacaacttggaaaccagctaattcctggagttgattgcacccctggtattgaggtggaagaaacttgccagcctcggtcccatttccagtacaaaggggacctcccctcttaataggcggccttctaaactcctttagcggggcccatccccttcacaacagaatggggggctatggaattattcgacttgtctggggtttcctttccaaaaaagggggttctgccacaaagaaaaaagggcattttactatggcgggggaatcctagttacgcagttagtgtgaaaaggcccggccccttatttcccgggtcctctacgaaattcgcctggggtttccagggacccgggataaaggaaaatccgacgaaggggtgttcccggatggcgtgctgttttacggggaattgggcacgaatgttccctgcaagcgtaaagagagggggcggaaaatgggggaaaacgttcgcaaagagggtcccgaccgtcttgaccccgagaattggccgccgggctctgaaaaacgcctcccccgatgtgaatgcgggggggtcaccccttcccccgaacggctctatcccncgtgcacgcggcacagagcgtgttccgaaagactttttagg

SEQ ID NO: 64016 - DNA, 1002 bp, Homo Sapiens
  misc_feature (590)..(590): n is a, c, g, or t
ccacgcgtccgcggacgcgtgggtggagcgggccccagcagagccctcctaccgtgctcccatggagaagcttttctacttacctcatgtctgcagctatacctgtctgtctcgagtcagacctatgaggaatgagcagtaccggggcaagaaccctctgctggtcccgttactatatgacttccggcggatgacagcccggcgtcgagttaaccgcaagatgggctttcatgttatctataagacaccttgtggtctctgccttcggacaatgcaggagatagaacgctaccttttcgagactggctgtgacttcctcttcctggagatgttctgtttggatccatatgttcttgtggaccgaaagtttcagccctataagcctttttactatattttggacatcacttatgggaaggaagatgttcccctatcctgtgtcaatgagattgacacaacccctccaccccaggtggcctacagcaaggaacgtatcccgggcaagggtgttttcattaacacaggccctgaatttctggttggctgtgactgcaaggatgggtgtcgggacaagtccaagtgtgcctgcnctcaactaactatccaggctacagcctgtaccccaggaggccaaatcaaccctaactctggctaccagtacaagagactagaagagtgtctacccacaggggtatatgagtgtaacaaacgctgcaaatgtgacccaaacatgtgcacaaaccgggttggtgcaacatggactacaagttcggctacagctattcaagacacagaacaagggctggggtatccgctgcttggatgacattgccaaaggctcttttgtttggatttatgcaggcaaaatcctgacagatgactttgcagacaaggaaggtctgggaatggggtgatgagaactttgcaaatctggaccatatcgagagcggagaaaacttcaagaagggatatgaaagtgatgcccccctggtctctgaaagt

SEQ ID NO: 64017 - DNA, 881 bp, Homo Sapiens
  misc_feature (743)..(743): n is a, c, g, or t
ctgattctgtatcacatgagacaccaaaaactggaaatgtagtcacacccagtacagtaccatttttatgaatttaaaaatagtcttataattttaattgtttgtgggtatttttctactggtataaatagcttctaattaataaatcgatcaaaggttgttactcagtatacatgaaattttttgcaggaaaagaaaccagaaatacagaataattcatagaaatcatggttctcaagtatttgttcaattagctttggggaagaaatgccaaatccactttgaggatgagtcttacgacacagatccacccacatgttgctcttatctggaatttgggacaaagcaatgcacaggccctcattcctgatgtggcgccctccagacatggctgcccaggaaggacggccactttagaagtgggacgtatcaccagtaagcttgaatgattaggatcgcaggtggctactgcattctgccgttcgtgaccgtgttctagcctgtagaccacccagctaccttcattcaccagtttttatccttcaccttttccagtatcgtgttagccactagttcttgagttttttggctatgatgtgtacgtttatgtatgtcattcatggactttcaactagaaaaggtaatgataaggttttctgaagaccatttgtaaattgtccatttaaccatttttcagcttgctttgaaacaaaagtcacacctactatttttctatgaattanggaatgaaggggagatcattcagttttacttttctttttggtgaaattttgtaccccggatgcagttggcacttttcctaaaacagaatgttttcccacttaggtgtcagaatgtaccttttgacttccctaagaagc

SEQ ID NO: 64018 - DNA, 515 bp, Homo Sapiens
tttgttttgttttgtttctctgaggcccatgggtgggaggaagtataaagaagtgtaaacaggaaagccagctgggcctggagttccaagtgcccatatttcatcagcttcctctccataactgtggcagggacacttaacccttccctggctgtgagaagttattctctgagggctggtgagcagaatgggaagatctaagaggcagctcctttccttgcctggttcctttgtccctgggaattgcaggccaaggattctgagccatggagaagacagaagctcagcacaacccccccaaattcagtcccttcccagggctagtctccccagcatggacttctcagcttgggggaccaacctggtcgatctcggaagacagggctagcaagaatgagctcccctcttttaagggaggggatactggtaaccctccccctttttggagtttttccgagtaatcggattttcgagcgctgcacgatctgccctccgtgagacttactgattgctgc

SEQ ID NO: 64019 - DNA, 887 bp, Homo Sapiens
atatgatgaacagagaaactgcacatgaaagggaaatgcaaacggcaatgcagataagccaatcgtgggatgagagcttgagcctgagtgacagtgattttgacaagccggagaaattatattctcctaagagaattgacttcactccagtttctccagcaccttcacccaccaggggattcggaaagatgttcgtgagcagcagtggattgccaccaagtccagttcccagtccaagacgattttcaagcaggagaagtcagagtccagtcaagtgcattagacccagtgttcttggtcctcttaaaagaaaaggtgaaatggagacagaaagtcagcccaagagactcttccaaggcactaccaatatgttatctccagatgccgcgcaactgtctgatctcagttcatgttcagatattttggatggcagtagtagcagcagtggcttatcctcagacccgctggctaaaggcagcgctaccgcagagtctccagtagcatgctccaattcatgctcttcgttcatcttgatggatgatctctcacccaagtggtgttatcaaggagaagaaattcctgccttgaccagatgtgtggagcatctacaaatgaatgaatagttatttacacacaaaccactgtgtacaaaagcgtccatggagctgtcagtgtctcgagtggtattatgaggcctcaggtgccttggggtacattgtcatgctataagggatgtatatcataaggtatggggggagaggggccttatgtgaatgattgccacatactgtgtctgttgctgctttttttcccgatcctttttggcattggatttggttgttttgccagtggggaatgggggtttagttattgggttgctgccacaa

SEQ ID NO: 64020 - DNA, 1097 bp, Homo Sapiens
  misc_feature (1007)..(1007): n is a, c, g, or t
  misc_feature (1011)..(1011): n is a, c, g, or t
  misc_feature (1017)..(1017): n is a, c, g, or t
  misc_feature (1023)..(1023): n is a, c, g, or t
gagatagaagaattggagcgagaactgaaaggaaaataatagaagaaaacatcacctcagctgcaccttccaatgaccaggatggcgaatactgcccagaggtgaaactaaaaacaacaggattagaggaggcggctgaggcagagactgcaaaggacaatggtgaagctgaggaccaggaagagaaagaagatgctgagaaagaaaacattgaaaaagatgaagatgatgtagatcaggaacttgccgaacatagaccctaccgtggatagaatcacctaaaaccaatggccatattgagaatggcccattctcactggagcagcaactggaccgatgaagatgatgatgaagaagactgcccaaatcctgaggaatataatcttgatgagccaaatgcagaaagtgattacacatatagcagctcctatgaacaattcaatggtgaattgccaaatggacgacataaaattcccgagtcacagttcccagagttttccacctcgttgttctctggatccttagaacctgtggcctgcggctctgtgctttctgagggatcaccacttactgagcaagaggagagcagtccatcccatgacagaagcagaacggtttcagcctccagtactggggatttgccaaaagcaaaaacccgggcagctgacttgttggtgaatcccctggatccgcggaatgcagataaaattagagtaaaaattgctgacctgggaaatgcttgttgggtgcataaacacttcacggaagacatccagacgcgtcagtaccgctccatagaggttttaataggagcggggtacagcatccttgcggacatctggagcacggcgtgtatggcatttgagctggcaacgggagattatttgttttgaacacatttctgggaagactattccagagacgaagatcacatagcattgatcattgaactgctggggaaagtccctcgaaaatacgctatgtttgggaactactcccacggagtntttncaccanaaaagnagaaactgcgacacatcaccaagcttgaacccctggagcctcctttgatgtacttgtggaaaaagtatgggctg

SEQ ID NO: 64021 - DNA, 188 bp, Homo Sapiens
ggtactggtttagtgtgaatctacatagaataaatatacttcactttcatgtcatcgacatgaatgacacaaaagctacttcataatactactttacaatagttttcaacatttccatatggtgcgacccctttgctctcatcaattttgggtgtcatgagaacaataggtatcccgttggacatgat

SEQ ID NO: 64022 - DNA, 346 bp, Homo Sapiens
tggccccgcaaatgcagcaggaaggatccaggctaagcgggctcccctcccactcccccaggtgaccacggacctgtaccaggttctagctgccaagggctaccagctggagtgtcgaggggtggtcaaggtgaagggcaagggggagatgaccacctacttcctcaatgggggccccagcagttaacagggcccagccacaaattcagctgaagggaccaaggtgggcattgagtggactctgtgctcactgggtggagctgtggcagggggcactgagcctccagaccctgctaaccacaaaagggaacatcccagcaggctgtgcttggatcatgctcgtctg

SEQ ID NO: 64023 - DNA, 473 bp, Homo Sapiens
agttcttttgaaagagatcatcttggtggatgacttgagtgacagagtttatttgaagacacaacttgaaacttacatcagcaatcttgatagagtacgcttgattaggaccaataagcgagaggggctggttagggcccgtctgattggggccactttcgccactggggacgtcctcactttcctggattgtcactgtgagtgtaattccggttggctggaaccgcttttggaaaggattgggagagatgaaacagcagttgtgtgtcctgttatagacacaattgattggaatacttttgaattctatatgcagataggggagcccatgattggtgggtttgactggcgtttagcatttcagtggcattctgtccccaaacaggaaagggacaggcggatatcaagaattgaccccatcagatcacctaccatggctggaggactgtttgctgtcagcagtaacgtccggt

SEQ ID NO: 64024 - DNA, 942 bp, Homo Sapiens
  misc_feature (216)..(216): n is a, c, g, or t
  misc_feature (220)..(221): n is a, c, g, or t
  misc_feature (227)..(228): n is a, c, g, or t
  misc_feature (234)..(234): n is a, c, g, or t
  misc_feature (267)..(275): n is a, c, g, or t
  misc_feature (317)..(317): n is a, c, g, or t
  misc_feature (345)..(358): n is a, c, g, or t
  misc_feature (452)..(460): n is a, c, g, or t
  misc_feature (581)..(624): n is a, c, g, or t
  misc_feature (855)..(855): n is a, c, g, or t
ggaggaggaagacgacgtatcgttcgttccattcatccactctgtgccttgtcagcctttgaaaggcttggttgctcccaggctgctgttctcagggaccttaaaagggacctggttagtcttggggcagagagtatctacttgggcactctcttccaagaaagaccttgtctccattttcaattagacaactgcttcgttgtgtgtgttctgggnaagnnatcctnntcttanaaatggaaatggcttgtttgcaacctgggtttnnnnnnnnnggggggcgggaaggacgggttgcgttgggtcagggacggcancccgccctttttggtgtggggggggcgnnnnnnnnnnnnnnatcccgcccattggtgattcttggtcggcgggatgaattgtttattacccccagccgacccccaaatgtgcggggccgccccggccggcccgcnnnnnnnnnagttattttttttgcctctctccccaccgtcgggcccgctttgccgcccccaacctggccccccggtacgcgccatacccgttggccttagatcgggtccgtgccagtccggcgactttgnnnnnnnnnnnnnnnnnnnnnnnnnnnnnnnnnnnnnnnnnnnncaaacgttctcgtggggtccgctttaccccacctccgcagagttagaagattccgctagtatggccgtagcggccgcgccctgccggcaattacgcgtcggcccacgtgaatgccgccccgccacttcaccctagcacgcttcgcgcgctggtggagcgagcacagtacccgcgcgggtgacggggggcgttttcggttctctcgagcgcactccgccgcctgtttcgcgnccggccggtctgctgccttcctcgcgcttccgtcgtgcccgtgtgggccccgcgttttgtcgctgtcgctatacacagtcggcgttt

SEQ ID NO: 64025 - DNA, 1140 bp, Homo Sapiens
  misc_feature (971)..(971): n is a, c, g, or t
gcatcatttttattacaccaaattaaagttgggagttccaagatcccattccagttaatatttaaccaaggtctaaaatttgattttttttaaatctttgaatcctcccttctgcccctcatggatccttggttttaatgatatggaaacatctaattcttagaattattccgtagcttttgctgattactctgagatttcagttaagacttgtttcaaaagacagatagctgactggttcataatacattggaatagttggatccaaactaataagaataagctgtacaggaactagtgctcaatatacattgtataaatttgtggaaatctcttggatgtgaattgttacttcaagtggcttttattaagattttctcagacttacttggaggttaaagcaaacccaaatgtgtattattttgttacagagctctgctttataattttgtaataaagtttcaatactgacccacagaactggtgaggagaaagttgtggtgtttcacaaagatcttagaaggcatggggatttgcgggaaccttcgaaaagacagcactcactgggctttcgcaacaatcaaatggaacccacccgaacgctgctgtgtgcgtggggtataactgggatccatgggcgaccgcgccaataggattcttcccaatgtatatgccttattgcgccggccggaagccacaaaaaagaaacaagggagtggtgtggggtattcgctgtgaacccctttctaggcccagaccctggtttattcccattttggtgcagggccgcacctcctcgcaccccctcaaaaaaacaccccgcgcgtgagaatcatcattcccctgttgggtcgccccctgggccgccactataaaatgtttagcccgacttggtgggatcaatctgggcgtggctcaccacacaagcggatcaccctgccgtctctcgacactccagaagacaattagantaaatgcccggcgtgatgtctatcaagatcccgtgcctgggtggtgcgctaccgtatataacgaagaaccggtgtgcctaaacgccgctatggaaagcgcgcatatttatggaagagaaataatcgtaccccgcggtacgtctctatccgcaacagcgggtagatcccc

SEQ ID NO: 64026 - DNA, 918 bp, Homo Sapiens
  misc_feature (415)..(433): n is a, c, g, or t
aggcgccttttcctgtggggactgctcccgggtggtcacatctcctgttctcaagaggcacctgacaggtcttcctggactgccgctcaagaccgcagtgcaagagtgaaggtcaaggtacggggccaggccagagcacgcacgcactcctagctcactccaacatagcgaagctgttgcggcgcagcatttcctccctgctgaggttctgccgccggtgaagatgggagctacgaagtgaagagtgtcctcggaaaggaagtggggttgttaaattgttttgtccagtccgtaaccgcccacccgaccagctgcattggattggaggaaatcgagcttctgagtgcaggaggggcctctgcagaacactagcggttgccgcaggatctgtgaactttgcaatgtggctgcaagnnnnnnnnnnnnnnnnnnnatttggggtagttatttgttaactatggacacagtgaacgtagtttacgatcttgaaatgaaacttagatttttttggggaaatgttcagatacagttttgtgaactgtaaatcaaaatacctttttctacagtttatcttttattttctgcaaatttaggaacatatttactcgttttcacattgaatcttaagtttaagctcttcatttggtatttaggcaatatatgagaaaaaaattttttttgttcatttgtaattttaacaagttgaacattttaccatgattgaacatgtttttattacagtatttaacattcccccaaagaataccctgcaaagtgtaaacctttgtcccatactgtgatattactgttctgctacaataaatgtcaaacctaagcactttgcagttcactacttttgggaaaatgttctagggaactgtatcacaggtgaaactgttacccataaagtgtagctct

SEQ ID NO: 64027 - DNA, 828 bp, Homo Sapiens
gagaaagtgaaggacttcaggaacagaaagaaaatccccatgccactagcaactccatttttatcaactggaaggaacatgccaacgaccagcaacacatccaggtttatgaaaatgggggttcacagccaaatgtcagttcacagttcaggctacggtatctggttggaggactgagtggtgtggatgaaggcctgtcatctactgaaaacctgaaaggatttattgagataataattccattgctaattgaatgctgggttgaagctgtacctccacaactagctactcctgttggaaatggtatagaacgagaacctctacaggttatgcagcaagttcttaatattatttcccttctgtggaaactctctaaacaacaggatgaaacccataaattggagtcatggcttcgaaagaactaccttattgattttaaacaccattttatgagtcgttttccatatgtcttaaaagaaataaccaagcacaaaaggaaagagccaaataaaagcatcaagcattgcacagttctctccaataacatagatcatctcttactgaatttaacactgtctgatatcatggtctccctggcaaatgcgtcaactttgcagaaggattgcagttggatagaaatgattaggaaatttgtaacagagacccttgaagatgtctctaggctaaatagtaagcaactgaacagattgctgggagtatcctggaggttaatgcaaatacagccaaacagagaggacacagagactcttattaaggcagtttatacattatatcagcagaggggccttatccttccagttcggactt

SEQ ID NO: 64028 - DNA, 358 bp, Homo Sapiens
ggttgtgattttttgttcttgttgtttatatgaaaacactcaaaatgatgcaaccaaaagggaaaaaataaaaatcaaacaaccttcagctttatttttctttaaagccagtcatcatctcttgataaaggagaggttaaagcaaaccagcctcagcggaccactcttctctccaaggaaatccccgggaagagttagcctggatagccttgaaaacaaacaaatcaaacacaacacaagaaaactcaaagaatgtgtatggtatcatgtatctctctgtggtggttcattccaccaggacgtatgcatattcaacacactgccttattacataactgatctattattatcgctcatt

SEQ ID NO: 64029 - DNA, 585 bp, Homo Sapiens
agattggaagatgtgcttgatatgttcaaataggatctactctgaaaacgaaacttggttttggtcctgtgaggactacttgtttgtccacctcctccaccaaaggaattaggaagttaagagaaggggaagaatatggaggataggagagggtgatgatgctttagcccattaaggaagaaaagttccccttactcttacaaaaggtgattgcaccacttaaaaaaggataggtagaaaatctggccattttatgtgttatttttttcctgcataccagtgccccctggaaagatggggatgctcatctcagagacagcctcttcacctgtcctccgtctctccattacagagccacaagccaagcttgagttactggttaatttccttgaagtcaatagagactctctgggtcctcatccccatgcatatatgtctgggagaagcaagcattctccaaaacagggctgttgctttcttcctggccgcatatgtgactgtcttcccctagactgatggtatacttttgagaggggcggataaaggtttgcaaactttaatgggcataaggatcccctagaagca

SEQ ID NO: 64030 - DNA, 421 bp, Homo Sapiens
aggaatgtgtaactacggaccctggcttcctgtgacctccgggagactccatgcttgggcaaggcagagtgacccttcccctggcaggcgggggcatgagtctgccacggggaacacaggtttccttgcacctggccctttaccctgtcagctttgctgttttcatgtgctctgacgccctccccttaggtgcatccaagctgcaatgcccacttcctcctggcaggggggacccgcaggcaccttctgctcagaggtgcacttgtctggtggccctgctccttcctggtactgtttgacctttctgtgtgtttgttttaaatctcttgcatggtaaatagctgcattttgttactgataagagtgagtttatatccatctgtcatatcttttgcgtcattttacaccttctggtccgctt

SEQ ID NO: 64031 - DNA, 264 bp, Homo Sapiens
ggcagatcggctaacggcatgaagggtatgtagcccggcctgcggaacccggggctccaggtctggggcagctgggcacaggtttacagaccaggaccgaacacgcagccgggggtgggaaagctgcctcagccaggctgagcctctcaactggtgtggggaaatcctgtctttccaaaagtccaaggagcgcgggtcggaggagacaaactcttgggaaataaccctttcacgactttcttttctgccgttaggccgatctga

SEQ ID NO: 64032 - DNA, 1039 bp, Homo Sapiens
ccgggcggcgcgcgatcgaggtcgggtcgccgtccagcctgcagcatgagcgcccccagcgcgacccccatcttcgcgcccggcgatgaactgcagccccgcgtggggggcggcgcccgcggcctacgacgcagcggacacgcacctgcgcatcctgggcaagccggtgatggagcgctgggagaccccctatatgcacgcgctggccgccgccgcctcctccaaagggggccgggtcctggaagtgggctttggccttggcattcgaaccttcaagggtcgcagaaggccgcccatggagtagacgcttgggtatcactcgatgtgcaagtgacggctgtcttccagcggctccgggactgggccccacggcagacacacaaggtcatccccttgaaaggcctgtgggaggatgtggcacccaccctgcctgacggtcactttgatgggatcctgtacgacacgtacccactctcggaggagacctggcacacacaccagttcaacttcatcaagaaccacgcctttcgcctgctgaagccggggggcgtcctcacctactgcaacctcacctcctggggggagctgatgaagtccaagtactcagacatcaccatcatgtttgaggagacgcaggtgcccgcgctgctggaggccggcttccggagggagaacatccgtacggaggtgatggcgctggtcccaccggccgactgccgctactacgccttcccacagatgatcacgcccctggtgaccaaaggctgagcccccaccccggcccggccacacccatgccctcctccgtgccttcctggccgggagtccagggtgtcgcaccagccctgggctgatcccagctgtgtgtcaccagaagctttccgggcttctctgtgaggggtcccaccagcccagggctgatcccagctgtgtgtccccagcagctttcccagcttctctgtgagggtcactggtgcccactgcagggcccctgaggtgaagtaaccgccggggcttgggctgggccagtccgccatgg

SEQ ID NO: 64033 - DNA, 824 bp, Homo Sapiens
  misc_feature (475)..(514): n is a, c, g, or t
ggggataagactgcgaggttccaacagcatagcaatcctccaagccgcagctggcactgtccggcaccagaggggctgctgacaaacacgtcttctgcagctggcctgcagtctgctaacactgagaagccctctctcatgcaagtgggaggatataataaccaagccaaaacctgttctgtttctaccctgagtgcaagtgtccacaatggggcacaagtgaaggagctagaagaaagcaagtgccaaattccagtccactctcaagagaacaggataactaagactgtttctcatctgtaccaggaaagtatctccaaacagcagcctcatattagtaatgaagcccacaggagccacctcactgcagccaaaccaaagcgatcatttatagagtcaaatgtgtgaaccttaagaaagccccatttgtggaatttggaaacgtgtgttgactcctggtggtaaattaaatagnnnnnnnnnnnnnnnnnnnnnnnnnnnnnnnnnnnnnnnnctttggggtggatctgatgccattgatatatctaaaatgtgggataaaacttctttaatagctagaaatccccataaataagaatgctaaacagaattgaaaattatatcaactttaaaattttaagaccagcccagaaagacattaaatgactcctcacttatgaaaattgttttggcttttgccactttccctccttggcctttgctatatgggtaaaatcacagaaccttactttagagaataaatatggcctaattggtccagaagtaacagggtttaactccttgaccaaaggaatggaacatcc

SEQ ID NO: 64034 - DNA, 1169 bp, Homo Sapiens
ctgctggaacaagcgtccctgcacttctttgtcacagctcgcatcaatgagaccaggatgttctggccaagcaaaagtccaccgtgctaaccatccctgagatcatcatcaaggtccgtggcactcaggtagttggttctgacatgactgtgacagttgagtttaccaatcctttaaaagaaaccctgcgaaatgtctgggtacacctggatggtcctggagtaacaagaccaatgaagaagatgttccgtgaaatccggcccaactccaccgtgcagtgggaagaagtgtgccggccctgggtctctgggcatcggaagctgatagccagcatgagcagtgactccctgagacatgtgtatggcgagctggacgtgcagattcaaagacgaccttccatgtgaatgcacaggaagctgagatgaaccctggcatttggcctcttgtagtcttggctaaggaaattctaacgcaaaaatagctcttgctttgacttaggtgtgaagacccagacaggactgcagagggctccagagtggagatcccacatatttcaaaaacatgcttttccaaacccaggctattcggcaaggaagttagtttttaatctctccaccttccaaagagtgctaagcattagctttaattaagctctcatagctcataagagtaaccagtcatcatttatcatcacaaatggctacatctccaaatatcagtgggctctcttaccagggagatttgctcaatacctggcctcatttaaaaccagacttcagattccccactcagccttttgggaataatagcacatgatttgggctctagaattccagtcccctttctcggggtcaggttctaccctccatgtgagaatatttttcccaggactagagccaacataatttttatttttggcaagccggaaaaaggattctttccatttggcgccggcggccaagcaaactgccgtgccaattgtgattttacctgttttacagaggtgtgccccctttttacacccttgccgtgtggtgaactacacccttcagggagaattaaaacggtcgccctacgctattagagcgtagtggcgcggcatagagtgtacagtgccgatatagagaaacaatctacattaaccctggtgggcaccgagaggccgaaat

SEQ ID NO: 64035 - DNA, 235 bp, Homo Sapiens
tttactattttgacgaggatgggacctgtttggcccatgaattcaattgactcattggccccatcacaagagatcagtgactcaatgctcagcacccagctggcaatgtgcccaggaccccctgcacttcccaagcagtgagcgcacacccaatgggtaagcccatgaacccagtttatgacactgcgttgggcaaaactcctgtccccagcactgagcatggcctaagcccccc

SEQ ID NO: 64036 - DNA, 1610 bp, Homo Sapiens
  misc_feature (573)..(581): n is a, c, g, or t
  misc_feature (645)..(705): n is a, c, g, or t
  misc_feature (866)..(866): n is a, c, g, or t
  misc_feature (926)..(926): n is a, c, g, or t
  misc_feature (1034)..(1034): n is a, c, g, or t
  misc_feature (1066)..(1066): n is a, c, g, or t
  misc_feature (1074)..(1074): n is a, c, g, or t
  misc_feature (1210)..(1210): n is a, c, g, or t
  misc_feature (1407)..(1407): n is a, c, g, or t
  misc_feature (1446)..(1447): n is a, c, g, or t
  misc_feature (1452)..(1452): n is a, c, g, or t
  misc_feature (1570)..(1570): n is a, c, g, or t
taggggagacaccttttaggtacactgcctgtcgccaaaacgataaaataaaaagtaatcttttagcaatccccagtgttccttcactatttcgcttcctgcattagcaaattttacttacagtcaaaagtgcagatttatactcctgacgtgtctcattcacagctaaataataggccataggacttttggtaggtttaaacttttaattctgtatttcatgattataagtcttgctagaattttttctaatctttagtagatttgattaaataatgattcacagaatttagtaacagaatcaaactaagccatgtatgagggtaatcgagatgaggatattaactcaaaagaaatagggtgatttttaaaggattaataaaattctgaaatgttaggtacaagaacgacaaaagaacacgcccacgcgagacactgacgtaggagcgcccccgacgcgcgcccgcgcacaaccaaccggcgaactaagtctggggggtgagggtggcagggggcgccgtagggaacacgttagaaaatcaaccactcactgttgagctttgtgccggccgnnnnnnnnngccaccctcgaacagaacatttgtttagtaaccccccctccgtcgcggagcgcccgcggcccgnnnnnnnnnnnnnnnnnnnnnnnnnnnnnnnnnnnnnnnnnnnnnnnnnnnnnnnnnnnnngcagaggaagcggctcgcgcgggcgtaggacggtcggaggtgcgcgcgggctgtccccccagcgccacccacaagaagaaaaagaacaccctctgtaccatgagagcgtactcagatctacgctgcggagagctgcgcgtagctgtggaacacaaaacaantgtaaccccgatccactcaagtgcaagtagacttctctgatcgccgtcaaggatgatttntccacctaccattctcacgtgagatgtggggaggatctcccatcacgtctcacaacagccgccaccagcgaggaaacacaatacaatccgaaatcgcgacttcgcgantgcgtttatttcatctattaactatatattgntggtgggntgaagttcgtggtttgtctcgcccgcgtgctacggcatgcggacgagcctcctatatctcccctcctcccattccggtacgagaaacctgacgatggcgaggtggcgggtcgccataatgaacccacccccacgcnacgcgctgcccctactcctctctccctgctcgcgtccccccgctccacaccaagtcgcggcttttacccacgtcgcccgcgctacgaacagcccgcaccgacgccgactatgacttgtgcgatgcaacaactcacccccacaccatgacgcccccgccgccaactacaccctgccggactatgcgcccgcgctcacncgcccttactgtccggccgcccgccgtcgtgcgtggagnncctgntcaacacaacatgtaccagctacccgcgccgccccgccgcagtgagacggtgccacatacgacgacgagcaaacccgcgcggacaactagagagacaatcaccgtagcaccctaactnagcttcctcgcccccaacgtcggccttttcatctatccga

SEQ ID NO: 64037 - DNA, 599 bp, Homo Sapiens
tccgttaagatcgagcgagagcctgtggctgaccagccagttgctgaaaccacattctacctcctccccacctgacatgtagcccattctttctccgccagtatgtgaagggtcatgctgctgatgtgtttgaggcctatactcagcttctaacagaaatggtactgaggcttccttaccaaatcaaaaagattactgacaccaattctcgaatcccacctcctgtctttgaccactcgtggttttactttctctccgagtacctcatgatccagcagactccatttgtgcgccgtcaagtccgcaaacttctgctcttcatctgtggatccaaagagaagtaccgccagctccgggatttgcacaccctggactctcacgtgcgtgggatcaagaagctgctagaagagcaggggatattcctccgggcaagtgtggttacagccagctcaggctccgccttgcaatatgacacactcatcagcctgatggtgcacctgaaagcctgtgcagagattgccgcccagcgaaccatcaactggcaaattctgcatcaaagatgactccgtcctgtacttcctcctcgttcatctacggca

SEQ ID NO: 64038 - DNA, 557 bp, Homo Sapiens
ggcctatgtatgaggtatgtatgcttgtcttgttctacgtataggaaaatgaagctgagagaagtgaagtcacttttatgaggttcaacagtacaggatggagccaggatttttatctgggtctgtctgactttaaaacacatactcttctcctagcatattctgcctcacaggtgcttagtctttgcctttgtagcatttacagtacagctggagacccatgatgattacatataaagttcagttagaaaagatgggtagttactttattagtgttcatctgtggagtatcagaatagcagtcagccaactctgtctcatgtcatccttcattacttttccccatctccctactcaaagacttgcctctattaagaattttgtcattcttctgtgaaagggtagtgtaagttatataagccctcagcgatacatgcacaaagatgttctagttaggggctaatttggcaagagaaacagtttattaatgtttttgaaaagataagtcatattcatacttaataccattttgtatttgtggtaatttttaatattgg

SEQ ID NO: 64039 - DNA, 1634 bp, Homo Sapiens
  misc_feature (569)..(601): n is a, c, g, or t
  misc_feature (987)..(1010): n is a, c, g, or t
  misc_feature (1129)..(1141): n is a, c, g, or t
  misc_feature (1379)..(1379): n is a, c, g, or t
  misc_feature (1493)..(1493): n is a, c, g, or t
gctagtctttcatgtgaaatgtgaagctgccatgttgccttttctcttagtaggataactagtagctggtacataatcactgaggagctatttcttaacatgcttttatagaccatgctaatgctagaccagtatttaagggctaatctcacacctccttagctgtaagagtctggcttagaacagacctctctgtgcaataacttgtggccactggaaatccctgggccggcatttgtattggggttgcaatgactcccaagggccaaaagagttaaaggcacgactgggatttcttctgagactgtggtgaaactccttccaaggctgagggggtcagtaggtgctctggagggactcggcaccacttgatattcaacagccacttgagccaaatataaaattgtatttacagctgatggactcaatttgagccttcaaacttgtagttatcctattatattgtaaactaatacattgtctagcattgatttggttcctgtgcatatgtattttcactatgtgctcccctccccagatcttaattaaaccagattttgcaattcgcnnnnnnnnnnnnnnnnnnnnnnnnnnnnnnnnncttgctcggccgctctcgagacctcaaaaaagctttcaaaaccattctatttggcccccgcgcccccgaaggaaagggaaaatggcccacacctcgctccctaggaaatcctggccatgaccagcggtttgaatcccgcacaaccaaaaaacgcctcgcgccacaacccagggtcctcgaacaactccaaatgcgagtcctgaggccctccctgggatctataaacagggagtccacacgaatctcgatattacgttagccccccgcccctgccacttttccccaggaactgtccgacatataataaaggaatttatgtccgaccccgcagacccctcaaaaaatggggatgaaccaaccccggaatcccccataggagtattctnnnnnnnnnnnnnnnnnnnnnnnngctatctccctcctttccccctgggtagaaaaaaacccggggcccacaccacccctcttttccacatactcgtctcccccccggtttaaaaattgtcaccaacttgggttgagaaaaannnnnnnnnnnnnatgaggcatttagtgtgttttccacccaacccagctacgacaactccacagtctccttccacaaataaacaacccgcgctcctttgcggatggatcaaatacgaaggcgcgctatacgattatctcttcccacaccgctcataaccaacggtcgcccactatctgtcgtggggggtgaaaaaaaccacaataggtgggtcatgcaaaatatcttgcgttagcgtgaaagtatgttganttaacacggggagcccgccccgaactaccatgcaagaacccccgccgaaaaacgagacttttgtgtatcgccgtgatgtcggggcggtggggaacactcgccggcgggtggcanagcgcgggggtggcacaaagattgattaccccgcaataagaccggcccgatcgtgcaacacggcgcgtcttcattctcgcgccacaacccctatattattgttctcatcagcgacggttctttgtacgacaatgcacacgg

SEQ ID NO: 64040 - DNA, 541 bp, Homo Sapiens
agagccccatgacagtcgtggaatctgtgggttgaggcttccaaacttcctgggaaggacgggacagaattggacgaaagtttcaaggagtttgggcttccaaacttcctgggaaggacgggacagaattggacgaaagtttcaaggagtttgggaaaaaccgcgaagtcatggggctctgtcgggaagacatgccaatatttggtttctgtccagcccatgatgatttctacttggtggtgtgtaacgactgtaatcaggttgtcaaaccgcaggcatttcaatcacattatgaaagaagacatagctcatccagcaagccgcctttggccgttcctcccacttcaagtattttccttcttcccttctctgtccaaaagcaaaggaggcagtgcaagtggaagcaaccgttcttccagtggaggtgttcttagcgcatcctcatcaagttccaagttgttgaaatcacccaaagagaaactgcagctcagggggaacaccaggccaatgcatccattcagcaaagtagagttccccatgg

SEQ ID NO: 64041 - DNA, 671 bp, Homo Sapiens
cattccagcatgggatgtcgctgttggtcggggcactgcggcccagatcatgccacctcctctaacaagtggctgagtggacaccccacacattctacccagggccgtgagtggccagatcggggctcagaagtctctgaatcttcacagctggtcacgttcagctcggtcacttcctgtaagattccaggcaccgcatgcactgacatgagtgcgtgtgggcccgctgggtcctgcctgggagccttccctggatgttcattttttgcaggtctgtgtttgtcttggagtaaggattattctcgcttgctggggtcatggtgttttggcctctcctggcctggactctcaaaaactcatcatccttcataggtctgaaggcttctacgttcccaccagcaggtggaccatatgaactcaaaactagttgtggcagagggaccctgaagagatctacccctggtgaatgcccccaggagtgggctgttctcacacctggtgcccagcctgtgccctcgcaggtcttggtgcctccactcagctcaattccagtcttctggccatgccccgctgtgtccctttctctctccttagtgcctagctgtgcaatgtttgcctctcataacatgtgctcagctgaccccatatctaagtcgggccgagctgatgta

SEQ ID NO: 64042 - DNA, 551 bp, Homo Sapiens
cctccagcgaagggcctcctgcagccagtgaagctcagcagggcagaactgtacaaggagcctaccaatgaggagcttaatcgccttcgggagactgagatcttgttccactccagcttgcttcgtttacaggtagaggagctactaaaggaagtaaggctgtcagagaagaagaaggatcggattgatgccttcctacgggaggtcaaccagcgggttgtgagggtgccctcagtccctgagacagagctcactgaccaggcatggctcccagctggggttcgagtgcccctccaccaagtgccctatgccgtgaagggctgtttccgcttcctgcccccagcccaggttactgttgtgggcagctaccttctgggcacctgcatccgaccagacatcaatgtggatgtggcactgaccatgcccagggaaatcctacaggacaaggacgggctgaaccagcgctacttccgcaagcgtgccctctacctggcccacttggctcaccacctggcccaggaccccctctttggcagtgtttgcttctccta

SEQ ID NO: 64043 - DNA, 938 bp, Homo Sapiens
  misc_feature (58)..(58): n is a, c, g, or t
  misc_feature (418)..(449): n is a, c, g, or t
aaccccagccactccagcaagcaccagcagcactgcccccaccagttggctataaccnctcatctcccccaaattacagcccttcctacccgcccatcacccgctcacagtacgactacaccgaccaccagaactcaggctcctactacagccacgcggcaggccagggcaccggcctttactccacctttacctacatgaaccccgctcagcgccctatgtacacccccatcgccgacacctctggggtcccttccatcccgcagacccacagcccccagcactgggaacaacccgtctacacacagctcactcgaccttgaggaggcctcccacgaagggcgaagatggccgagatgatcctaaaaataaccgaagaaagagaggaccaaccagaattccctttggacatttgtgnnnnnnnnnnnnnnnnnnnnnnnnnnnnnnnncttcttcttcttcttccttaaagacatttaagctaaaggcaactcgtacccaaatttccaagacacaaacatgacctatccaagcgcattacccacttgtggccaatcagtggccaggccaaccttggctaaatggagcagcgaaatcaacgagaaactggactttttaaaccctcttcagagcaagcgtggaggatgatggagaatcgtgtgatcagtgtgctaaatctctctgcctgtttggactttgtaattatttttttagcagtaattaaagaaaaaagtcctctgtgaggaatattctctattttaaatatttttagtatgtactgtgtatgattcattaccattttgaggggatttatacatatttttagataaaattaaatgctcttatttttccaacagctaaactactcttagttgaacagtgtgccctagcttttcttgcaaccagagtatttttgtacagatttgctttctcttaca

SEQ ID NO: 64044 - DNA, 522 bp, Homo Sapiens
  misc_feature (173)..(186): n is a, c, g, or t
tagtgaggttggaagataccctatcttttttattcaaaaagcacaatcaatctttgtttgaaaatctatataaagtacaacttgcttttagcatgattattttcctaaataaaaagacaaagaatttacttactttatgttaattacgggcatgaagcaaaaggttttctttnnnnnnnnnnnnnngtgcagtgatgtagggctgtggttagttaaccgtactgagttatccatctagcatctgtggcttgctggaagggtagtattaactatttaacatgtaatggtgtacttcactcttacctagcacgctgtcttctcattgctttgggggagggagggtctctctgctggcactgtctaacttgcttacctgctgactttgcagtttgcttgtgctatgacatttattgtaggtgctatttagggtaggcttaaagtgctgggtggtgatttgagttcaaacaataaaaaattgtatttttttcaatattgtataaacaatagtgttctaattacctt

SEQ ID NO: 64045 - DNA, 735 bp, Homo Sapiens
tcaggggagcgacaatctattggctaggtagcgagcgctgggtgttgaattcggcacgagggccgcgcgggccgctgtcgtcccaacccccgccgcctcgtcgcgcgcggggcctccgcgcccccggctgctgctcacgccccgcccgggagccagattttgtggaagtataatactttgtcattatgagatgtcgtctctcggtgcctcctttgtgcaaattaaatttgatgacttgcagttttttgaaaactgcggtggaggaagttttgggagtgtttatcgagccaaatggatatcacaggacaaggaggtggctgtaaagaagctcctcaaaatagagaaagaggcagaaatactcagtgtcctcagtcacagaaacatcatccagttttatggagtaattcttgaacctcccaactatggcattgtcacagaatatgcttctctgggatcactctatgattacattaacagtaacagaagtgaggagatggatatggatcacattatgacctgggccactgatgtagccaaaggaatgcattatttacatatggaggctcctgtcaaggtgattcacagagacctcaagtcaagaaacgttgttatagctgctgatggagtattgaagatctgtgactttggtgcctctcggttcccataaccatataacacacatttccttggttggaactttcccatggatggctccagaagttatccagagtctcc

SEQ ID NO: 64046 - DNA, 379 bp, Homo Sapiens
attgactgaacaaaagggagaacagcagattcagaaagctcgcaagtctaatgtgtcctataaaaacccatctctgatgcctaaggaaccgcatattcgggaaatgaagatctacatcgataagaaatatgagactgtaataatgcccgtgtttggcattgcaacaccgtttcacattgccacaatcaagaatataagtatgtccgtggaaggagattatacttacttgcgaatcaacttttattgcccaggcagtgctctgggcaggaatgaaggcaacatctttcctaaccctgaagcgacttttgtcataggaaattacataccgagcatcaaatattaaggcacccggagaacagacagtaccagccttgaacct

SEQ ID NO: 64047 - DNA, 356 bp, Homo Sapiens
ccctattatggtatgaccagtgagagcgatttgtgtcctttcttatgaaccttcctgattttttaacttagatttctcactaagtttcctgagttattagtaagattgctccctaaatgtaaccagggatttttccattatgttcccttttataccatttaggtgtgagttccttagcttctgcctataggaacataagtaatgaaaggtcatctaggtgtgtgtttggaatttttttcttttgttttttggaaaatggaaagaacaaggcaaggaaggaaaattaatggggaagctgaagggaggaaatgttacagtaatccactgagatgtagtttagtcaaacatatataggg

SEQ ID NO: 64048 - DNA, 671 bp, Homo Sapiens
  misc_feature (192)..(232): n is a, c, g, or t
ctccctatttattgtttgaccaccaaaagaaataggcacgatattgttccatagcacgttattcctggcttttgttaccagtaaaatgaatgactttgctgagacaatacttagtgtagcaggtacaagttataaaagtgattcattacaactaagataaggaagaaaacaggaaaacagcacttgcccttnnnnnnnnnnnnnnnnnnnnnnnnnnnnnnnnnnnnnnnnnccttgtcacagctcagaataaccaattccatccagggatcatattagcgatattggcactgtaatggtcgtttttacatttattttctgttccgcattcacttaacatgtgcgttaaaaggaacaaagctagctggaggtagcaaagttttgaacttgaatcagggattgctaagaaaacttacaactaatgaccacagaaagtaagttctttgtcttctgtctgatacagctagatgtgattgtagccgtggtgcctgggcagatggtaaacaaacatgctgtcctcttatgacaatatgtgcagagaaggccccaaacgctggggtgagaggaacgccaggctgttccagtcacggacgatttggaagccacgaaccaacaacagctctgcatgcctttacactcatcttgtcaaactataatagaggatccttgtc

SEQ ID NO: 64049 - DNA, 926 bp, Homo Sapiens
gcggccgcgtcaagccgggggggcgctggcgcgaggccgcctggcaactctgcgactactacctgccctacgcgctgggcggcggctacgtgctctcggccgacctggtgcactacctgcgcctcagccgcgactacctgcgcgcctggcacagcgaggacgtgtctctgggcgcctggctggcgccggtggacgtccagcgggagcacgacccgcgcttcgacaccgaataccggtcccgcggctgcagcaaccagtacctggtgacgcacaagcagagcctggaggacatgctggagaagcacgcgacgctggcgcgcgagggccgcctgtgcaagcgcgaggtgcagctgcgcctgtcctacgtgtacgactggtccgcgccgccctcgcagtgctgccagagaagggagggcatcccctgagccgccgcggcccggccctccgggacacctgcttcacccggcggcgccttggggcaggtgccgagcgggcgcactacgcccgggccccaaggcccccgtcccgcagccacgcttgtggtcgctgcgtcccggtctgcgtttgggagacccctggggggttgccggggcagcgcgccgtgtccaggtggaggtgcccgttcctggacctcagcgagcctgagccgggcccggccgcacgctgacccccgtgctgtccccgaccggctcacggggctgggctccgatcttccgtgtctcttatcagtggcgtttctcacgtctgcgtctcagatctaacgtggttcacattcaaatcccgcgttccgattgggaaaaaaagaggaagaacaaaagcgaaaagaggggcggaccagcagagagagagatccgccgcgagggggcgccagaggtttcggccgagatacccagggaatcttgtgtgcacagacgtgggggccccat

SEQ ID NO: 64050 - DNA, 758 bp, Homo Sapiens
ggccttttatctcggtgctgccgggggaggcgggaggaggagacaccaggtgtggccctgagcgccggcgacacctttcctggactataaattgagcacctgggatgggtagggggccaacgcagtcaccgccgtccgcagtcacagtccagccactgaccgcagcagcgcccttgcgtagcagccgcttgcagcgagaacactgaattgccaacgagcaggagagtctcaaggcgcaagaggaggccagggctcgacccacagagcaccctcagccatcgcgagtttccgggcgccaaagccaggagaagccgcccatcccgcagggccggtctgccagcgagacgagagttggcgagggcggaggagtgccgggaatcccgccacaccggctatagccaggcccccagcgcgggcctttggagagcgcgtgaaggcgggcatccccttgacccggccgaccatccccgtgcccctgcgtccctgcgctccaacgtccgcgcggccaccatgatgcaaatctgtgacacctacaaccagaagcactcgctctttaacgccatgaatcgcttcattggcgccgtgaacaacatggaccagacggtgatggtgcccagcttgctgcgcgacgtgcccctggctgatcccgggttagacaacgatgttggcgtggaggtaggcggcagtggcggctgcctggaggagcgcacgcccccagtccccgactcgggaagcgccaatggcagcttttcgcgcct

SEQ ID NO: 64051 - DNA, 766 bp, Homo Sapiens
aaggctcgaaaagggggaatgacttctaacatctgtaaaatttgtctcatctttgaatttctttaacattatttcaaaatcatctcatgagcgccgtgtgtgcctctttgtgaagccctatttagcaatttcaggggagtcaaaaaccttggaacttccttctccactaacccaggactaaaaatggacaggctgacctcagtgtttacaaattcagaattttgataggggtagatatggagaaagacctatttcctgggtctctgctgtgtagtctccttcaggcttattgtgctcagtgaacatccagtgctgggtgcagctccatcaccctcttgtgtgtttacatgtctctttctatgataagagggttgtgttggtggcacctccactactcttttctgtttgttgagtttgaattgtgtaacatctttgatcagtgggtgtatctgtaatgaaggaggttcaagaggctgtgctttccaagtgatagtctataggagtgtttaatttcttgcagctccatctggttgctgcatttgaagcatggcattaatttgtatttgccctgttctttgacctaaagttgaagggtttagagtttttaacctgatctgtagagcagagaggttgaaagcacttaactcttgtttagtatcctcattgccttgctgcctgggtatctggcccctttccataaacatttcttttcagttcatgtagttctttaatagaaagctgctattatgtatatacaagaggggcc

SEQ ID NO: 64052 - DNA, 985 bp, Homo Sapiens
  misc_feature (816)..(816): n is a, c, g, or t
  misc_feature (913)..(913): n is a, c, g, or t
  misc_feature (933)..(933): n is a, c, g, or t
  misc_feature (954)..(954): n is a, c, g, or t
  misc_feature (966)..(966): n is a, c, g, or t
gcaagtaactatacggccttatggtagcgaggcctgggtggcgaattcgcacgaggcagtggcagaccacaggcaggtcagaggcacgtctgggtcccctccctccttcctatctggcgactcccagatcctggccatgagagctccgcacctccacctctccgcctgcctctggcgccctgggctctgtgcgaagctgctgccgctgctgatgtgcgcaactctgggccgcagaggcggcgctgctcccccaaaacgacacgcgcttggaccccgaagcctatggcgccccgtgcgcgcgcggctcgcagccctggcaggtctcgctcttcaacggcctctcgttccactgcgcgggtgtcctggtggaccagagttgggtgctgacggccgcgcactgcggaaacaagccactgtgggctcgagtaggggatgaccacctgctgcttcttcagggcgagcagctccgccggaccactcgctctgtatgtccatcccaagtaccaccagggctcaggacccatcctgccaaggcgaacggatgagcacgatctcatgttgctaaagctggccaggcccgtagtgcctggtggcccgcgtccgggccttgcagcttccctaccgctgtgctcagcccggagaccagtgccaggttgctggttggggcaccacggccgtccggagagtgaagtacaacaagggcctgacctgctccagcatcactatcctgagcccttaaagagtgtgaggtcttctaccctggcgtggtcaccaacaacattgatatgttgctggactgggaccgggggccagganccttgccagagtgactctggaggccccctggtctgtgacgagaccctccaaggcatcctctcgtggggtgtttaccctgtgggctctgcccagcatncagctgtttacacccagatntgcaaataaatgtcctggatnaataagtcatangctccaattgattccagat

SEQ ID NO: 64053 - DNA, 567 bp, Homo Sapiens
aaagatatctcaaaactattatttactacagtgtatttcacttgtcttgtgtgtctgaacacacagaagctaattagcaagtttttaagaagtatttaaaaatcttactaggattgacattttttctgaattctgtataaatagcttatagtgagaagtactgtgctcaaattttacatttttttcctttgcaaattctgtaatttcactcaacgattaagtctaccaaagaacacactgcatgtaaaagatgtattacaatctcaaagccagtaaaagaaatcttgcttcactgttcacctgctacaagtaagagtttggtgctggtagaaacatttgactctgatgtctattttattctacataagagccatatgtaatgtactgtaacaaaggagcttcttgtccccttggtcttttaattaaaagaaattccaactgacttttaaactttgttcttgtccaaagttgccatttcttttttttccccagaaatatttggaaattattggaggaatatgcaccccagatgaaaatgttcagtttgtacccatttttccttaacca

SEQ ID NO: 64054 - DNA, 355 bp, Homo Sapiens
aaaatcgagctcggcccctcttgtatatacatccagttggcaggtagagaagctgttgggtctgaaggaagccggatgttttgcccaccttccgggtctggcagtgccaacagtcaggaggaagctcatttcacacgacatgatttctttgaatctttgcatagaggtcaagcttttcacatcctgaacaacaccaccattcagtttaaactggagaagatccctatagagagagtatctgaattgactttttctcttagcccagatgacctgggaacttctagcatcatgaagattgaaggaaaatttgtcaatccagttcaggtggtgttagcaaagcatgtatatacaagag

SEQ ID NO: 64055 - DNA, 502 bp, Homo Sapiens
gcggccgcattcctgcaggggatgactgtgaatggcttcatcaacacagtcatcacctccctggagcgccgctatgacctgcacagctaccagagcgggctcatcgccagctcctacgacattgccgcctgcctctgcctcaccttcgtcagctacttcgggggctcagggcacaagccgcgctggctgggctggggcgtgctgcttatgggcacggggtcgctggtgttcgcgctgccccacttcacggctggccgctatgaggtggagttggacgcgggtgtcaggacgtgccctgccaaccccggcgcggtgtgtgcggacagcacctcgggcctgtcccgctaccagctggtcttcatgctgggccagttcctgcatggcgtgggtgccacacccctctacacgctgggcgtcacctacctggatgagaacgtcaagtccagctgctcgcccgtctacattgccatcttctacacagcggccatcctgggcccagctg

SEQ ID NO: 64056 - DNA, 1008 bp, Homo Sapiens
gaaacagttgttgggaaggtcttggaaattactgaactaccagatggaataactcgcatggaagctgaaaagctttttggggaactctttaaaattggcgccaagatccggtggctccgggacccccagtcccaaccacgtcggtcaccccctctgctgtggcagtggggacaacactgccaaccctgaacgctctaaacctagtgacttggcctccacctacaccgtcttagccacattcccctccatttcagctgcacagaatgcactgaagaaacaaattaactcagttaacaagtttaagctgagaacaagcaagaagcactatgactttcacattttggaaagggcaagttctcagtaacagccacctttggacccttcgcctttatggttcccctgccctctcccatctttgattggcttggtatttggagcttctgttaacattatagagactcctaggatgtgtgttcatggcattatagcttttgaagaaaggccagtgatccagcaaagggggaaaaatatgcatttcaccccacatgactaggaatccacatcagaatgatacagagttagcaggtttttctaaggaaatgccattcaaatgcctcctaacttttatagttattttgttttatatttctaaattcttgtatcagatccaaagctctattgcacagcaaattattcttcaaaatgattataaccagttgcaccctgtatttctttttgcagccagcacaatgtgacccaacttaaaatttgggggaaaaagaatgcaggagtgaaataaccaagtcaaaaccatgtactatctccttgggggttagggatgctaagaagagcccacaaatagaggattactcttcccctgaatctctaaactcagaaacaattaccaaaaaatacataactcttccttgtagggccctttccttattcatttaggtagtgtgaacattaagtataaaataaattatgttctttatgcctcttaaacca

SEQ ID NO: 64057 - DNA, 475 bp, Homo Sapiens
tacggaggttaggatgctacttgctgcaaacaagccctactttggccaacatcctgcttatttctcaaaaaggagggacagtgaaaaccaaaaacgacattgggacatgctgctcaaggtagttatatatacgataagttgtatatatgatcactggtagcctaccaaagctgtagaaatctaggactgtgctaatcagtatcaaaccaaagatttctatctcttcccgaaagagagggtatgtgcaccagtctacagttccaaaggactgcaacaaatgtagatggttctgtcctcatccctgagatcagttctactgaaatggcaacaacaactccaaatacatctctcccttcttgaaatccctaaagcactatcgcactcctaaatgcatttctccacaagttagcacttgattgtatactgtcttttaatccttcattgtttcatgtatgaagtttttaatcacccccaa

SEQ ID NO: 64058 - DNA, 2040 bp, Homo Sapiens
  misc_feature (930)..(1000): n is a, c, g, or t
  misc_feature (1306)..(1306): n is a, c, g, or t
  misc_feature (1315)..(1315): n is a, c, g, or t
  misc_feature (1382)..(1382): n is a, c, g, or t
  misc_feature (1396)..(1396): n is a, c, g, or t
  misc_feature (1459)..(1459): n is a, c, g, or t
  misc_feature (1464)..(1464): n is a, c, g, or t
  misc_feature (1691)..(1691): n is a, c, g, or t
  misc_feature (1695)..(1695): n is a, c, g, or t
  misc_feature (1753)..(1753): n is a, c, g, or t
  misc_feature (1764)..(1764): n is a, c, g, or t
  misc_feature (1794)..(1794): n is a, c, g, or t
  misc_feature (1798)..(1798): n is a, c, g, or t
  misc_feature (1824)..(1824): n is a, c, g, or t
  misc_feature (1915)..(1915): n is a, c, g, or t
  misc_feature (1923)..(1923): n is a, c, g, or t
  misc_feature (1948)..(1948): n is a, c, g, or t
  misc_feature (1983)..(1983): n is a, c, g, or t
  misc_feature (2012)..(2012): n is a, c, g, or t
tttaattctcgagaccgaagtatggggggacggtgaagcaggcaagtgaaacagggacaccatgtgttgtccaaacaaaaattttgttacatcgaaatagtaacaagtattcaaataacccataaacaagtggatgttgcaaaaaaaggactagaagtttgtgtaaaaatagaacctatccctggtgagtcacccaaaatgtttggaagacattttgaagctacagatattcttgttagtaagatcagccggcagtccattgatgcactcaaagactggttcagagatgaaatgcagaagagtgactggcagcttattgtggagctgaagaaagtatttgaaatcatctaattttttcacatggagcaggaactggagtaaatgcaatactgtgttgtaatatcccaacaaaaatcagacaaaaaatggaacagacgtatttggacactgatggacttaagtatggaaggaagaaaaataggtgtataaaatgttttccatgagaaaccaagaaacttacactggtttgacagtggtcagttacatgtccccacagttccaatgtgcctgttcactcacctctcccttccccaacccttctctacttggctgctgttttaaagtttgcccttccccaaatttggatttttattacagatctaaagctctttcgattttatactgattaaatcagtactgcagtatttgattagcaaaaaaaccacctgcatcacggcaaacagtcccctcgggctcccgtgccgctctgcggccgccgaggcgtgctggaatcaatcctgggcggcgcctcgcgcccccaaaaaagcttcacaaacatttggtgttggcccgggcccccccaggagagagcccaaccgcgaccccagccgcgttcgctaagcaagccccccggacacggcacgctggctnnnnnnnnnnnnnnnnnnnnnnnnnnnnnnnnnnnnnnnnnnnnnnnnnnnnnnnnnnnnnnnnnnnnnnnagcgccctctcgttggcgtccccttcccgcgcgccccctcttcaccgaggaatggcgcccaccggtgcccccttcgcatttctctaacctcctcgcccctcctctgtcctcctcgtctccgctccccagcaccgaggcgataggagtgggtcgtcgcggtcttcccgcgttcccatcccctctcttttctcgcgcccacgtacggaagcggcgcgaacggctgcttcgtcgaccgccgcacgcgcgcgccggtcttggctcgcggtaagaatctgtctatacgagatcggccgtcgcgtccggcgngcgcgctcnctccctcgtcaccgccacgcaccgcacttgcctaccagacgctgcacccccgctgcgtccgctcccncgcctcacgcacgncactgctacattctgcgctgcttatgacgcccgcgcgtcctggcgcgtcacggcgacgaggcngactngtcttccgcagtgagacctggcgcctcccccgcatatatcgtctacgtctacttgctttaatatcaacatggccgccacggcatgccgcacgacagcgtgtataactatcgcacgcgctcgaccctgtcagcgcggcccgtccgtgctatcgcagcccaacgacgtacaccccacctacgcgcatgacttctcaccatgatcgacacgtctcgcgctccgctgcgtntccntctccacgagcacacgataccgtatcgtgccgtaggccggtactgcgccggcatgctntgagaggacancgcacgccatcggcggttggattccaggcntatntgccggacgcagtgaccacggcagangtaggaatgcgggtcgcaccggcttaggcagcagcacggcgccatgccccggtacctcccggccgacactgcatccctaccgccgctcctngacgtctngctaaggtccagtccatccacgggngttggatgcagggcaacgtgagtcaacgagggccncccacagtaccacgtacttcacagacctncgtcatgactggaacctctgacaacttt

SEQ ID NO: 64059 - DNA, 368 bp, Homo Sapiens
aatatttcttggaatcatattcagagtctggggctgtgtgttgagcagccttaaggatgctagacactcatttagtgcccagggagtccagcgaatgacgtctgtggccaagcgaggtctcaggtgcaaagcaaaaggaccatttaaagtaaaatagcttggattcaatcatgtgacttttaaattggctcagaaagcaattttgtaatttcagagagtgttttgagccatggccacgttgtcattgtgagtctatagcttgactccttggagaacaatattcatttggttgtggagactgatttgctgggagaaatctgtcctgttactttctggtcatcccaggttctgacttttaccaggggcaa

SEQ ID NO: 64060 - DNA, 460 bp, Homo Sapiens
aagctgagactgaaaatcaagagggaagaggtgaggaaggcccacccctggggctgggcagtgtagacctgccaccgtgtgaagaaaaatgaaagcacagatagcctaagactgcacaggcctgtgcccacataccttatagcacaggcccaggtggatcatctcatgctaacaccccacatgtgctggtggatccacttccatggatccactcacatgctgcaggcatgcagtagactcacccacagcccactctctggacaccaatcctgggaggtgggagctggaatggggagcaatgagaggagggagtgagactgttggcttaggaagggtggtacctctccctgcatcatacccaggaacttccagctccaaaatattggggtacagctcaccacccccccactccgccaacccattcctacctcctctagtgcagggacccaagttagatgat

SEQ ID NO: 64061 - DNA, 1155 bp, Homo Sapiens
  misc_feature (13)..(13): n is a, c, g, or t
  misc_feature (81)..(81): n is a, c, g, or t
  misc_feature (853)..(853): n is a, c, g, or t
gatttgtgaacanttttaacctctggagaaaacctagctaggaagagaaacttcacggcaaagtctccactgatgtatgantggtaccaggaatattatgtaggggctgctcatggcctggctggaatttattactacctgatgcaggtattcagagaggaaaagtatctctgtgatgcctatcagtgtgctgatgtgatctggcaatatgggttgctgaagaagggatatgggctgtgccacggttctgcagggaatgcctatgccttcctgacactctacaacctcacacaggacatgaagtacctgtatagggcctgtaagtttgctgaatggtgcttagagtatggagaacatggatgcagaacaccagacacccctttctctctctttgaaggaatggctggaacaatatatttcctggctgacctgctagtccccacaaaagccaggttccctgcatttgaactctgaaaggatagcatgccacctgcaactcactgcatgaccctttctgtatattcaaacccaagctaagtgcttccgttgctttccaaggaaacaaagagtcaaactgtggacttgattttgttagcttttttcagaatttatctttcattcagttcccttccattatcatttacttttacttagaagtatccaaggaagtcttttaactttaatttccatttcttcctaaagggagagtgagtgatatgtacagtgttttgagattgtatacatatattccagaacttggaggaaatcttatttaagtttatgaatataaccatctgttactgttctaaaaatgtttaaaagaacctcaatacagataaagataaatatgtgnctattattgggtattacacttcacttctctttaatatttttcctccaactggagggcagacaattttctgacttgcttttctctaggtggttcattttgaaaggggacagaaatataactaaatgcttccaggagaaaaattccaagagttacaatctggacttggtacctaaatatcattttttaaattcttgatgcctatttggactagaggtaaacatactttcagattggcctgtttttgtcggtaaggcatacagccttcagaagccaacatttttaatcaaaaccttataaaacat

SEQ ID NO: 64062 - DNA, 540 bp, Homo Sapiens
tccaatggttgtaaccttgctgaaacatttgatcgcgttatatatgcttttaatggaatgcagccaatgttttccaacgtcagctgcaaaataaggagtaaaaattaaacttcacaaaatatttacccgtcttgttgaagatttgcaagaggaactgagcagcagattaccctgtgctgtggaagagcacccagtaggtgaggcctctatactagctaccttctctgtaacagaagggaagaaaaaagttcctgtggctggctgcagagtccaaaagggacagttagaaaaccaaaaaaattttaaactaacccgtaatggacatgtaatttggaagggctcattaacctcattgaaacaccataaagatgacatttcaattgtcaaaacgggaatggattgtggtctcagtttagatgaagacaatatggaatttcaagtgggagacagaattgtttgttatgaagaaaagcaaattcaagccaagacttcttgggatccaggattttaaaattacattaaaaatgtaaataactcaaa

SEQ ID NO: 64063 - DNA, 487 bp, Homo Sapiens
ccctcttgctccattctcgggaagcctgttgataaagccatgagtgaatctggcccagttcacctggatctgagcctttcaggttgcccttccctccagccccctccaggagtctctacagaagatacatcaggcataaatatggcctggaagggccagaatcatctggtgacttggggctgttgtgtgagttagagaatgaaggcttgggtggaaagacagacagaggcaacctctgtccactgtcctacccctggatggtcatatggtggggacagggcaagtccttagaccaactgtctggatcaggccccagaactactgcccagttctgctgaggtcctggcccccaggctgtgtggcagcctgtgattcccaacagagcaaaccagaggaatggacactgtgaagtctgcccagatcccctcctcaatgtgacccacctggcactgctgagaagcccagcagctcagagctgtgccctcac

SEQ ID NO: 64064 - DNA, 1120 bp, Homo Sapiens
  misc_feature (1014)..(1023): n is a, c, g, or t
  misc_feature (1065)..(1078): n is a, c, g, or t
tataaagcttaaattttatatcattttaaaatgtcttggtcttctactgccttgaaaaatgacaattgtgaacatgatagttaaactaccactttttttaaccattattatgcaaaatttagaagaaaagttattggcatggttgttgcatatagttaaactgagagtaattcatctgtgaatctgctttaattacctggtgagtaacttagaaaagtggtgtaaacttgtacatggaattttttgaatatgccttaatttagaaactgaaaaatatctggttatatcattctgggtgtgttcttactgacaccaggggtccgctgccccatgtgtcctggtgagaaaatatatgcctggcacagcttttgtatagaaaattcttgagaagtaactgtccgctagaagtctgtccaaatttaaaatgtgtgccatattctggttcttgaaaataagattccagagctctttgatcgcttttaataaactgcaagttcattttaaatgaagggccagcatatatacttgcaagataattttcagctgcaaggattcagcaccagttatgtttgaatgaaccctccttttctctgagattctggtccctggaaatccctttctgctagtggtgagcatgtaagtgttaagtttttaatctgggagcagggcataggaagaaaatgtcagtagtgctaatgcattttgcactagaacgcttcgggaaaatattcatgcttgccatctgttcatttctaaatttatattcataaagttacagtttgatacaggaattattaggagtaattcttttctgtttctgtttataatgaagaacactgtagctacattttcagaagttaacatcaagccatcaaacctgggtatagtgcagaaaacgtggcacacactgaccacacattaggctgtgtcaccattgtgtggtgtacctgctggaagaattctagcatgctacttggggacataatttcagtgggaaatatgccactgaccgannnnnnnnnncctctttgcagtggggctaggacagttgattcaacaaagtannnnnnnnnnnnnnctcagtcctaatttgaacaggtcaaagatgtgttcaggcatt

SEQ ID NO: 64065 - DNA, 442 bp, Homo Sapiens
cggggacggacacaccagcccctcagataccacttggccactcccgctgaggccactcccactgcgtggctgaagcctcgaggtcaccaggcggaggcgcggagatgcccctgcatcagctgggggacaagccgctcaccttccccagccccaactcagccatggaaaacgggcttgaccacaccccacccagcaggagggcatccccgggcacacccctgagccccggctccctccgctccgctgcccatagccccctggacaccagcaagcagcccctctgccagctctgggccgagaagcatggcgcccaggggacccatgaggtgcggtacatctcggccgggcagagcgtggcgtgcggctggtgggccttcgcaccgccgtgcctgcaggtcctcaacacgcccaagggcatcctgttcttcctgtgtgcggccgc

SEQ ID NO: 64066 - DNA, 383 bp, Homo Sapiens
gactgtcctagttctgtccgaacacatgaaagaactcatactggagaaaaaccctatgaatgtaaagaatgtgggaaagcattcaattatgccagttccattagaatacatgaaagaactcataccggagaaaaacccctatgaatgtaagcaatgtggaaaaacgttcagttattccagttcctttcaaagacatgaaagagctcataatggagataaaccttacgtaaagaatgtgggaaagctttcatttatcacacaaccttccgaatacctgtgaaaatgaatagtggaggacaggtctacaagtatctacatatctaaagaatatgggaaagtcttcagtttgctttctgggtttcagacttgtttgggagctcacc

SEQ ID NO: 64067 - DNA, 442 bp, Homo Sapiens
aggtgcaagtgccacagggcccggcagactttgggagctctggctgtggacatttttgtctgctgtggacactgagaaagttcgccatgagctctgcttggccggggatcgagacagtagccaagctccccggcgagaggccccaatgccgtctggggaacgtttagaggcgtggcactaggagtgcacatctgtgagcatgacaagcttatcctcccatggtaacagaagtccaggctgaggctgattctggacgctgtcctttcagcacacgcagagcaaagatcgttggaagccccagtgtgggagatgctcctcagggaggaagccatgtgagggggctggctctgtgcgggtgagtggtcccctcctccatcagcctgacagccgctcgggttctaaggagtgactcctgtcctgcctggatcaatagatctctaga

SEQ ID NO: 64068 - DNA, 547 bp, Homo Sapiens
  misc_feature (12)..(12): n is a, c, g, or t
aagaaacaaccnaaaccatccagctctggatgtgaagtaaaatagtgctttttgaaatggagaggaaaaacttgggaggaagaggcctgctgtgggggcatcggagccagccatgtaagaatcagagctgctccttcctgtgaatcctaggtggccctatgtcttctgtggagttacagtataaagcagggagctaattaagagtattaaaacttaaaaccattttttgactctgattttaagtacatttttatatgtcagttgctgcccttcacactaccaggccctgcagccacagtgttctgttggagaaacttggggaagtgttttctgaaccagttctttttcttggggtagagcgtgaaatccagacctgtttttgaaaggacagcacaggaggagaaaagtgactgggacgatgcttcctctcatccaaaacacatgcagagtcacatcctcatcctagtgtttggcagtttgagaccgctaccctgaacttaagagctttaaatatgagggttgtgtttctgggggggttatttttttg

SEQ ID NO: 64069 - DNA, 491 bp, Homo Sapiens
  misc_feature (22)..(22): n is a, c, g, or t
  misc_feature (46)..(46): n is a, c, g, or t
gctcggtacccgtgtgacatcngcacgggcagtgtgagtgcaagcncggcatcactggtcagcactgtgagcgctgtgaggtcaacactttgggtttggcctgaaggctgctaaccctgtgactgtcatcctgagggatctctttcacttcagtgcaaagatgatggtcgctgtgaatgcagagaaggctttgtgggatatcgctgtgaccagtgtgaagaaaactatttctacgatcggtcttggcctggctgccaggaatgtccagcttgttaccggctggtaaaggataaggttgctgatcatagagtgaagctccaggaattagagagtctcatagcaaaccttggaactggggatgagatggtgacagatcaagccttcgaggatagactaaaggtagcagtagagggaagttatggacctccttcgtgaggcccaggatgtcaaagatgttgaccagaatttgatggatcgcctacactagtgga

SEQ ID NO: 64070 - DNA, 600 bp, Homo Sapiens
cgggacggagatacaactcgtcaacgaatcaaattcagtgatgacagagtatgcaagagtcaccttctcaactgttgtcctcatgatgtcctttctggaactagaatggatcttggagaatgtctgaaagtccatgacctggctttaagagcggattatgaaattgcatccaaagaacaagattttttctttgaacttgatgccatggatcatctgcagtcattcattgcagattgtgatcgtagaacagaagtggccaagaaaagattagcagaaactcaagaagagattagtgctgaagtagcagcaaaggcagccccagcgaggagaagtcaaagctccgtgccccttccagcacaaaagcaagtccattgaaccggtggctttttctgtcatctagctcctaaaaacaaaaacaaaggtaaattcctggagttcaacctaagtgttttgggtcaaaggtggggtcaaaggtgggctgtacaagtgttcatgaattgggaggccggagaaaagacactgagggtttgcagagagggtcttctgttctggagtctagttctattcagtctctctgagaggtgggtcagaacataaggt

SEQ ID NO: 64071 - DNA, 673 bp, Homo Sapiens
gggattccagctacccatttgcccataaagaatccattggttcggaactggggaattcctttgcatcaaatattagaattaaagaagaacctttggatgatgagtatgaccaaaccatggcaccacagcagggactactagaccaaattaaagatggaacctgaccatgctcaagagtataatcatggccaacagccaaaaactcaagagggggaactgaaaattagtgctgtgttttcagtcagtggcagccctcttgctccacagttgactactggctttcagccctcactggcgtcatctggcatgaataaaatgcttccttcagttccagccacagctgttcgagtttcctgctctggttgtaaaaaaatcctccagaaggggccaactgcttatcagaggaaagggtctactcagctattctgctcccacactgtgcctcactggatatacagttccacctgcccgcccaccgcctcctctcacccagaaaacttgttcaagttgctccaaagaccttttaaatccaaaggatgtgatcagtagcaccccaggtttcaacacacaccataacttggtccagctctttagagtaccacgaatctttaaccaatcagccataacaataacagaaggatctgtgattgtactgagcagctcctttgtgcgc

SEQ ID NO: 64072 - DNA, 332 bp, Homo Sapiens
aggttcttggcataactaggaaacagcattagccatcttgaacctattgtgctcaggaaggaaagcaacagggaaatcttggaagtaaaggctccctgcaaagcatcacaaatgctttacaatgtgtgattaaaggactgctggttttttatagtgagaatcccctgaagtctcagctgccaaaagaataatactagtggaggttccatcacaggaatccccatttccttctcacttcacaagctcctctgatcttgccaatgtgatgtttaattcaaaacagcgcacttacagcctttattttatacttatttagatgagaatcctctagg

SEQ ID NO: 64073 - DNA, 676 bp, Homo Sapiens
tccactagtgtaggctgacaaggctacggtaccaataataaagctcacagatcaggagactgaagtgaaagttgacatcagctttaacatggagacgggcgtccgggcagcggagttcatcaagaattacatgaagaaatattcattgctgccttacttgattttagtattgaaacagttccttctgcagagggacctgaatgaagtttttacaggtggaattagctcatacagcctaattttaatggccattagctttctacagttgcatccaagaattgatgcccggagagctgatgaaaaccttggaatgcttcttgtagaattttttgaactctatgggagaaattttaattacttgaaaaccggtattagaatcaaagaaggaggtgcctatatcgccaaagaggagatcatgaaagccatgaccagcgggtacagaccgtcgatgctgtgcattgaggaccccctgctgccagggaatgacgttggccgggagctcctatggcgccatgcaggtgaagcaggtcttcgattatgcctacatagtgctcagccatgccgtgtcaccgctggccaggtcctatccaaacagagacgccgaaagtactttaggaagaatcatcaaagtaactcaggaggtgattgactaccggaggtgggtcagaacataagg

SEQ ID NO: 64074 - DNA, 513 bp, Homo Sapiens
tcaaagctcactccccgataactggctttttcaagagacttatatctcatgctcttggctatactgtgaattactgataatgttgaacaaacctgtgaaagacatacattagccctttaagatggccaggagctaagcttgagtctcctttactgaatttcgttcttagtgcaggttacttgtagattctagtcttcacaggctccctggggctcttaactagtcacactgggagtcatgaatgtctttccaataattcagggaattctagagatcctcaaactgtaaggtctattcatactcaacacaaggaaaaaacctcattaaaattaatgactaatcaggaggcaacgtaaccaaaagcacagtgaatgaaagttttcatggtaggttcaacatgggtttattgctagaaagatccaggggatagctttaggtttaacttcggctcagcaacgtttctttctactcgtttatttcagtaatagctataggtgggtcagaacataaggt

SEQ ID NO: 64075 - DNA, 607 bp, Homo Sapiens
cagcgggagctggagcggctacaggcagccctgagacagacagaagccaggagattgagtggagggagaaggcccaggacttggcactctccctagccgcagaccaaggccagtgtcagcagtctgcaggaggtagccatgttcctacaagcctctgtcctggagcggggctcagaacagcaaaggctgcaggatgaactggagctcaccagacgggctctggagaaggagcggctactcacccacttcccctagctactcgcccacttcccctagctactcgccaacgtctcccagctactcgccgacatctcccagctactcgccaacttcacccagctattctcccacttctcccagctactcacctacctctccaagctattcacccacctcccccagctactcacccacttccccaagttactcacccaccagcccgaactattctccaaccagtcccaattacaccccaacatcacccagctacagcccgacatcacccagctattcacctactagtcccaactacacacctaccagccctaactacagcccacctctccagctactctccaacatcacccagcattccccgagaaatctg

SEQ ID NO: 64076 - DNA, 449 bp, Homo Sapiens
  misc_feature (381)..(403): n is a, c, g, or t
ggctgctggccggtagtgactggtgggcgcgctcgaggactccaaggtgcgtcagcccgggggcagacccttgggtcgggcggggatcttacgcttcccttacccgcccccttttgtctttcacctcagccccgccggctgctgtgggagcggcggccgtccctctcctggaggtcgtctcctggcatcctcggggccgcaggaaggaagaggaggcagcggccggagccctggtgggcggcctgaggtgagagcccgaccggcccctttgggaatatggcgaccggtggctaccggaccagcagcggcctcggcggcagcaccacagacttcctggaggagtggaaggcgaaacgcgagaagatgcgcgccaagcagaannnnnnnnnnnnnnnnnnnnnnngagggggcagcagcgacgccgctgggaagccccccgcgggggctct

SEQ ID NO: 64077 - DNA, 653 bp, Homo Sapiens
aacaggctggtaccggtccggaattcccgggatgtctggtgcccccgccgccgcctgcatcgccgccaccgccgctccgccacgaccaccgccgcctcctgccctgcagccaccgccaccgcctgtgtcgccgccgcctcgggaccggctgtatgattaggccacaatcttcaatgagtaaacatattcctcaattctgtggtgttcttggtcacacatttatggagtttctgaagggcagtggagattactgccaggcacagcacgacctctatgcagacaagtgaactgtagaaactgattactgctccaccaagaagcccccataagagtggttatcctggacacagaagtgttgaattgaaatccacagagcattttacaagagttctgacctggatggggtaaacctcagtgcacttcttttctgttggcctcagtattactggattgaagaattgctgcttcttgttaggaggttcatttcacttatcattacttacaacttcatactcaaagcactgagaatttcaagtggagtatattgaagtagacttcagtttctttgcatcatttctgtattcaatttttttaattatttcataaccctattgagtgttttttaactaaattaacatggctcgaatgaaccg

SEQ ID NO: 64078 - DNA, 845 bp, Homo Sapiens
  misc_feature (684)..(684): n is a, c, g, or t
ggctttgagttactttttaattggtccatgtctcttccctgcaatatggttttgaagaaagctgttgacagtctactttgctcaatgtgtcacgtacacccaaactatttttctttgctcatgggctggatgggaattacccctcctccagtgcaatgtcatcatagactgtccatgacagatgatagcaaaaagcaggatcttagttcgtctttaacagatgactctaaaaatgcacaagcacctctcgcattaactgaatcacatttggctacccttgcttcctcttctcaatctcctgaagctattaaacaattactagactcaggtttgccttctcttcttgtgaggagtctggctagtttctgctttagccacatttctagctcagaaagcattgcccagtcaatagatatttcccaggacaaactcaggcgccatcatgtcccacaacaatgtaataagatgcctatcacagccgacttagttgctcctattcttaggtttttgacagaagttggcaatagccatattatgaaagattggcttggtggttctgaagtcaatccactatggacagcacttctgtttttattgtgtcactctgggtccacttctggaaagcataatttaggtgcacaacagaccagtgcaagatcagcttctctttcttcagctgctacnacaggactgactactcaacagcgcacagcaattgagaatgcaactggtgcgttctttctacagtgcatttcatgccatccctaataatccaaagctgatggcacaggttcctttgtggaactattttccgaaatcttcctcaagaagggaacccttccaac

SEQ ID NO: 64079 - DNA, 680 bp, Homo Sapiens
aaacaagcttttgggcccctgggctgacccccccacccgtcatgtgtggggttccccacagctctaatgttcctcctggacatcctggacttccttttcgtcagccacgcctatcacagcatccttgacccgtggggcctctgtgcagctggtgtttggctttgagtatgccatcctgatgacgatggtgctcaccatcttcatcaagtatgtgctgcacctccgtgacctccagagtgagaacctctgggacaacaaggctgtgtacatgctctacacagagctgtttacaggcctcatcaaggttctgctgtacatggccttcatgaccatcatgatcaaggtgcacaccttcccactctttgccatccggcccatgtacctggccatgagacagttcaagaaagctgtgacaggtgccatcatgtctcgccgagccatccgcaacatgaacaccctgtatccagatgccaccccagaggagctccaggcaatggacaatgtctgcatcatctgccgagaagagatggtgactggtgccaagagactgccctgcaaccacattttccataccagctgcctgcgctcctggttccagcggcagcagacctgccccgagtccagaattgccccgagtaccagaattgccccgagtccagaatgccgagatcctctagagt

SEQ ID NO: 64080 - DNA, 273 bp, Homo Sapiens
ctagaggatccgctcggggcaattctgtactacttcagtgatttcttgctgaaaatccctgggattctgagatgctaggaaacatttatgagccttgctttggtgtgccatggctagagtcatagttcaggagtcacagaagagctggaacaagtagtccagctgttgctcatctcattttttggggggtacctcccactgtttgttttttttgaagtgttctggttttgcttttgtctttacctggtctggccctgtcatccccagccccga

SEQ ID NO: 64081 - DNA, 359 bp, Homo Sapiens
gcacctaacaagattcatatttgcaggcattcaaaagtgcggcagaagagtgaggtggacattgttgttagcgaagacttgagtggaacggtgaagttttcaagctctttaccctaccccaataatcttaacagtgtcctggctgagcgactggagaagtggctgcaactgatgctgatgtggcacccccgacagaggggcacggatcccacgtatgggcccaatggctgcttcaaggccctggatgacatcttaaacttaaagctggttcatatcttgaacatggtcacgggcaccatccacacctaccctgtgacagaggatgagagtctgcagaggcttgaaggccaggatccaac

SEQ ID NO: 64082 - DNA, 853 bp, Homo Sapiens
cacgaccagtcttaaatatctacccatggaataaagagctgtatttgatcaggtacaacaactatgaccgggctgtcatcaataccgatccttatgatgtcgtccatcgctggtatacagcacaccggactctaacgatagagttgagtagacctgagaatgagttttgggtcaaactaaagcctggcagggtcctatttatagacaactggcgtgtcctacatggcagggaatgcttcactggctaccgccaactgtgtggctgctatttaacaagagatgatgtattaaacactgctcgcctcttggggcttcaggcttaaaattgacagcatctggattatgaatacacctggcaccctggctaccagaatttcatatgggcagaataatattgtgtcaaactctacttcagattgtctccttatcccatcccacaaaacagaatctgtccgtttctctagtaagggagacttgttggagaggcgggactctgagttatctaatgtcagacatctagtggggcagctctcttcctcatgttataacatggatccacttgttttatttaaaccttttaatataattttggtcagtctccttcagaaatataatctccatattgataggaaagcaataattgccatgaggtaacgatttttttcccaagtagatcagttagaaagaaatgcattctagaaataacaaaaatcctgataaagcaacaatttgcaaaatgtttggtcttaggacaccttaacactcttaaaagttattgaaggccccaaggagttcttgggtgtgggttctatctattgatactaatgtattttaggtattaagactggtcctg

SEQ ID NO: 64083 - DNA, 383 bp, Homo Sapiens
agaccattcgcaacaacaattcctcccgatttggaaaatacatggatattgaatttgacttcaagggatcccccctcggtggtgtcatcacaaactatctgcttgagaaatcccgattagtgaagcagctcaaaggagaaaggaacttccacatcttctatcagctgctggctggagcagatgaacagctgctgaaggccctgaagcttgagcgggatacaactggctatgcctatctgaatcatgaagtatccagagtggatggcatggacgacgcctccagcttcagggctgtacagagtgcaatggcagtgattgggttctcggaggaggagattcgacaagtgctagaggtgacatccatggtgctaaagctgttgtaa

SEQ ID NO: 64084 - DNA, 1019 bp, Homo Sapiens
gcaagactttgatgagattgttcacttttgtctatgtaaaatcccaaatccttgagaataaaaaagggggaggtttaagtcacttgttgcaatgccctttttaatagaggcaataaatctaaaggccataaatttagagtgacttacagaagatcgaactttggagtgtggcagagtaagggatggaaaccgggccctccagttcactatcagtagcttttgcactggtctgcccttcctaaattaagtatgcacttcaatttgatgagtggaaacagtctatctgggcagtaaccagggagctttgtgcctagtagattgcttctgttctgcacttctttggtttcccacctcaatgtaaaaaatagctagcaatgaagtccagaagttgtcaatggttcatccccagaagaatgcataatgtccaaagttgtatgtgtatgatgtcttcaatggtattaagttatttcaaattcttagttcacctacataaatcatttctaacaagcatcttcttaaccaactttatgcacagtgtatgtttgtaagtgcttctgcacgaatgtttatacatgactgtttccatagtacttatgtttttaaaaatattcagtcatttcctactataatcctcatgtatccatgtaactgactcaaaaatacttcagccacagaaagctaaaactgagcaaatctcattcttcttttccatcccccttgcatgtggctggcatttagtaatgattaataatatggccagctgaataacagaggtttgagacgcaattctttctcaaggaagtcagctaagctgggtctacttatggacaaacatcttaatgtgggggaaaatctgatattttgacaatggtaaatttcccacttaagctagcctaagcattgttaagacattcaaatctccccccatgggcttctggggcggtccctgggtttataagcaatggttaaaattggttgggcgcacactttctcacaaataagattcctcccattgggac

SEQ ID NO: 64085 - DNA, 1225 bp, Homo Sapiens
  misc_feature (781)..(781): n is a, c, g, or t
cttttccctcccgcggctctctacctctcgccgcccctagggaggacaccatgggcccactgatggttcttttttgcctgctgttcctgtacccaggtctggcagactcggctccctcctgccctcagaacgtgaatatctcgggtggcaccttcaccctcagccatggctgggctcctgggagccttctcacctactcctgcccccagggcctgtacccatccccagcatcacggctgtgcaagagcagcggacagtggcagaccccaggagccacccggtctctgtctaaggcggtctgcaaacctgtgcgctgtccagcccctgtctcctttgagaatggcatttataccccacggctggggtcctatcccgtgggtggcaatgtgagcttcgagtgtgaggatggcttcatattgcggggctcgcctgtgcgtcagtgtcgccccaacggcatgtgggatggagaaacagctgtgtgtgataatggggctggccactgccccaacccaggcatttcactgggcgcagtgcggacaggcttccgctttggtcatggggacaaggtccgctatcgctgctcctcgaatcttgtgctcacggggtcttcggagcgggagtgccagggcaacggggtctggagtggaacggagcccatctgccgccaaccctactcttatgacttccctgaggacgtggcccctgccctgggcacttccttctcccacatgcttggggccaccaatcccacccagaagacaaaggaaagcctgggccgtanaatccaaatccagcgctctggtcatctgaacctctacctgctcctggactgttcgcagagtgtgtcggaaaatgactttctcatcttcaaggagagcgcctccctcatggtggacaggatcttcagctttgagatcaatgtgagcgttggcattatcacctttgcctcagagcccaaagtcctcctgtttgtcctgaacgacaacttccgggataatgattgaggtgatccgcaagcctggaaaatgccaacttataaagatcttgaaaatggaactgggactaacacctatgcggccttaaacagtgtctatctcatgatgatcaaccaaatgcgacgtcctcggcatggaaacgatggcctggcaggaaatccgacctgccatcatccttctgacagatggaaagtccaatatgggtggctctcacaagacagctgttgtaa

SEQ ID NO: 64086 - DNA, 381 bp, Homo Sapiens
ctcttgtatatacatgcttttccctctgtacatgtgattttctttcatccccgctttccaaagctaactctgactcatccttcagactgcatcttaatgattacttccttctggaagactcccctaattttcacaactagatgagctctcccttatatgttgaaaacaagtatttcttgtgtgaacagaaatgtttaatgtctgccttcccaactcagccacaagctctgtgaggatggggactcagtctttgcatccctcagagcctagcatagtctcagttaatacgtgatagctggagcgtgacatttcattaggaacagtgaggctagttgagaaattatacctcaccagtatataggagagatgtatatacaagag

SEQ ID NO: 64087 - DNA, 546 bp, Homo Sapiens
ggaacccggcagtgatgtgggacctaacttgaagttaacctgtggtggtgaggttggaaccagttggattatgatttattttctacactcttgtacggaatgcagagctgttgtatcctgatgaatctactgctaaatatagtcatttggaataattttaagtattgatcttaaaacttgtaccacaacaagagtgtctaaaaagcacggcaagctcattacgttcttacgaacattcatgaagtctcgtccaacaaaacagaagctgaagcagcggggaatcttgaaagagagggtgtttggttgtgacctgggggagcaccttctaaattctggttttgaagtgccgcaggttcttcagagctgcacagcattcattgagagatatggcatcgtggatggaatctatcgcctttctggtgttgcctccaatatccagagactacgccatgaatttgactctgagcgcgtacccgcacctgacgaaagagccgtatgttcaggacatccattctgtgggttccctttgtaagctgttgtactggc

SEQ ID NO: 64088 - DNA, 1113 bp, Homo Sapiens
gtgctgaagagatcactttaacaattggccaagcatttgacctggcatacaggaaatttctagaatcaggaggaaaagatgttgaaacaagaaaacagatcgcagggttacaaaaaagaatccaagacttagaaacagaaaatatggaacttaaaaataaagtacaagatttggaaaaccaactgagaataactcaagtatcagcacctccagcaggcagtatgacacctaagtcgccctccactgacatctttgatatgattccattttctccaatatcacaccagtcttcgatgcctactcgcaatggcacacagccacctccagtacctagtagatctactgagattaaacgggacctgtttggagcagaaccttttgacccatttaactgtggagcagcagatttccctccagatattcaatcaaaattagatgagatgcaggaggggttcaaaatgggactaactcttgaaggcacagtattttgtctcgacccgttagacagtaggtgctgacatcaagaacaagaaatcctgattcatgttaaatgtgtttgtatacacatgtcatttattattattactttaagataggtattattcatgtgtcaatgtttttgaatattttaatattttgaaaattttctcagttaaatttcctcaccttcactattgatctgtaatttttattttaaaaacagcttactgtaaagtagatcatacttttatgttcctttctgtttctactgtagatgaatttgtaattgaaagacatattatacaaatacctgccttgtgtctgagttctatttagttagcatcttgaaatttgtattccttttccagagggctagtttattaatgatttcccaaaagccataccttaaagataacttttttaaatccgaagagacatgcccatgtcaaacttaaacaggtttctggtttttaaaccaaccaacatgtttactatttcactgggacagaatatcaattttttaggaaaaaaatactggtcccccatcactgggcgaagaatgccaaaccttttaacacataattggcccacaaggggccaccttaaattttcctcaaccgagggaaaaaaata

SEQ ID NO: 64089 - DNA, 301 bp, Homo Sapiens
attacaggcgtaagcccagccgatgtggtttcattttagttgagtttaggatgttttccagttaaaaaaattcttcttgacacatggctctttttaaatgtatgttatttaattcctaaatatttggggattttgcttatctttctggtagtttctgcaataattccattgtggtcagagtacattaagacttgaattatttacatttattgagatttgctttgtggcccagaatatgggctatcttggtatgagttacatgttcacttgaaatgtatataccagaggagcgagctcgatt

SEQ ID NO: 64090 - DNA, 827 bp, Homo Sapiens
  misc_feature (790)..(790): n is a, c, g, or t
gggaagccagaatttctcttgcttaggacacttgctcgatgcctgattttgtgggatgatattttaccaaattccaagtgggttgacagcaatgttcctcaaattataagagaaaatagtatctctctcagtgaaatcgaattgccgtgctcagaggatttgaatttggaaactttgtcccaagcacatgtctacataattgcaggagcctgcttgtctctgggttttcgatttgctggctcagaaaacttatcagcatttaactgttgtgcatcaatttgccaaagattttatgacttattctgtctgcacctaatgcttctgttacaggtcctcattaacctaggaaacttgtcgtgagcgtggtgctgctgtctctcgccatggtcatggctggctcaggaaacctaaaggttttgcagctttgtcgcttcttacacatgaaaacgggtggtgaaatgaactatggttttcacttagcccaccacatggcccttggacttctatttttgggaggaggaaggtactctttgagcacatcaaattcttccattgccgctcttctctgtgccctttatccgcacttcccagctcacagcactgaacaccggtatcatctccaggctctccggcacctctatgtgctggccgcggagccccaggcttctagtgccctgtggatgtggacacaaacacgcccctgctatgcccctcttaaaagttacctacaaaggccactcagtggggatgaacaaccccaaagaagaattgattgggtccctacccttcnttccaaaaactccatcctttttaagcgcatataaagt

SEQ ID NO: 64091 - DNA, 714 bp, Homo Sapiens
cctcacaaatatgatgtgaaactacaaaatgaagataagatcatcagtaacgtgccagcagacagcttgattcgtacagagcgcccaccaaataaggagatagttcgatactttatacggcataatgcattacgagctggtactggtgaaaatgcaccttgggtcgtagaagatgaattggtgaagaaatactctctgcccagcaagttcagtgactttttacttgatccatacaagtatatgactctcaacccttctactaagaggaagaatactggatccccagacaggaagccctcaaagaaatccaagacagacaactcttctcttagttcaccactaaatcctaagttatggtgtcacgtacacttgaagaagtcattgagtggctcgccactcagagtgaagaactcaaagaattccaaatctcctgaagaacatctagaagaaatgatgaagatgatgtcgcccaataagctgcacactaactttcacattcctaaaaaaggcccacctgccaagaaaccagggaagcacagtgacaagcctttgaaggcaaagggcagaagcaaaggcatcctgaatggacagaaatccacagggaattccaaatctcccaaaaaaggactgaagactcctaaaaccaaaatgaagcagatgactttgttggatatggccaaaggcacgcagaagataacacgaggggtaccgagc

SEQ ID NO: 64092 - DNA, 386 bp, Homo Sapiens
acaacatatcttttccaagaccaagtgcgaaatagtaaagggaagagctagctcggtagcggtcggccacagaatgccacgagctttgaattatgggacgaagaattggaacacatggaaaccctgtgcagactcccgcgacatcttccctcctctccaagtcccttcccacagaccttgcgccccacacgattattccccaggggccgagcaggacgacttgggtcccactatccggactcagcggtgcccccacaaaagcgtcccaaaaactccagctggggcagccctggggccgatgctgaaaagttgtcagaggccctcgggcagtcccgagatctaccccaggccagagggcctgaccctccctaaatgcgacgttctcc

SEQ ID NO: 64093 - DNA, 753 bp, Homo Sapiens
gctggtactggcccgagtcttagatctcaggagtcctgacgcagtgtcttgggcgctaacggcggcggcggccgttgtgtttagactccagaactccccacttgccgcgttctcgccgccgcaggctcccgggactgatggtgccccgcctgctgctgcgcgcctggcccctggggccccctgcggttggtccgggagcccccagtcggccctcagctgccggctccgggcccggccagtacctgcagctgcacatcgtgcccaccatgcactaccatggacagcctgcccagtgctgcctattcccaaacttgaagacaccattaggatgatacctcagtgcacatgaagcctctcttgaatgatggccagttcatggaaaacatgaacaattttttgcaaggagttttgacaaattggggatttggaaacagaactgcatgaagcagctggttgctctggacaaacagaataaaacatacaagctacatttcgggacccctggttttgatatgtacctatcttgctctgagactccgttgttctgaactttaatccatttatggctttcaatcctgacccaaaatctgagtataaatgaccagctcacccgggcaacctacatgacttgtttctgccatccggtttctgaagacactccgggctggccttctggagccagaagtgttccacttgaatcctgcacaaagtgacactatcacccttcacgagactcatacgcttattgacgtt

SEQ ID NO: 64094 - DNA, 340 bp, Homo Sapiens
tgtcgaaggcaagacagttggaagggaagtcttgcagcctggtgcgaatgaaggttctacagaaagtcaccagaggaaggacagcggggattttcagtttgattgacaccctgtggcccccagcgatacactctgaaaacacctggccgcgaccagccctgtgaagagataaaaactcatctgcactcactccagccttgtgttacatcactcacagctcatccaaatctgggacaaattgatataattgacgaagaccccatttataagctttaccagcctccagttacccgctgcttaagagacattctccagatgaatgatcttggtacccgttgca

SEQ ID NO: 64095 - DNA, 442 bp, Homo Sapiens
ttttgtgcatccgaagtcaacaaggtggtgatcctggacccgaaggggtccctccttggagacttcctgacagcctaccacggcctggaaaagccccgggttaccaccatggtggatggcaggtacctggtcgtgtccctcagtaacgggaccatccacatctttcgggtccgttctccggacagttaaaggggctaggactagggtgagagggagtggggagggagagggcaggaaggaggcagagctgtccgtgggaggtggaggccgaggacattttcctgaagggcaggggttggcaacttttcaacatggagtgccaaactgctaacccgtcttctagtgtgtgagaatagggaccaaggtggtggcgtgaccttaactctcagaagcagaggaggcaggtgggtggagggggatgcacttaccgaatagctcggta

SEQ ID NO: 64096 - DNA, 1627 bp, Homo Sapiens
tgctgcccatattggaatcatggttggctctttcaccatccctgggggctatttcagttcagtctggtttgttgttggcatgataggggccgccctcttcatcctcattcagctggtgctgctggtagattttgctcattcttggaatgaatcatgggtaaatcgaatggaagaaggaaacccaaggttgtggtcctgctttactgtctttcacaagcgccttttatatcctgtcaatcatctgtgtcgggctgctctatacatattacaccaaaccagatggctgcacagaaaacaagttcttcatcagtattaacctgatcctttgcgttgtggcttctattatatcgatccaccctaaaattcaggaacaccagcctcgctccggcctcttgcagtcctccctcatcaccctctacactatgtacctcacctggtcagccatgtccaatgaacctgatcgttcctgcaatccccacctgatgagctttattacacgcataactgcaccaaccctggctcctggaaattcaactgctgtggtccctacccctagtccaccatcaaagagtgggtctttactggattcagatgattttattggactgtttgtctttgatctctgcctcttggattctagcatccgcacttcgacttatagccgagtaaacaagctgaccctcgtcggggagtgacatcgttatccttggtgaaaaaactacccctgccgcttctggataaaaattatggacggcccttccggtcgctcgtggaccacttacaaagacccgtcttgcctttacccgttacccccttattccccacctctatggccattcgcattgcgcctacaatggtgcacgtccttcaattccttcgtgccgacactttagggccccaggcccccagtaagcccactttgccgtccactaattccttggtacccaacgcaaaaacggaggacagcctctccgataaagcgcgcggttcagacccacatataggagagcgccaatccaatcaggcagaatcgccagtgccgctgagcgggacattattgtaaaaggagatgcgcggggctccacgccatatttgtatcggtgcatgatccacgtcacccctcggggatgtttaagaatccacgccccaccggtcaaaaaaagaggtcacctcccatactaaacccgcgatgacccccgaacacttctagctgtcaatagacgccctcctccaggggtaaatttatatatccgccatccggcaagaaatatccttagcaatataggaccgatcgctcatgtctatgaacacctccccagaccgacgctaaagagctccctgctagatgttaatcgctcgcccctcgtgtatataccaccatgttgtaccgtattttcaccctatccccgagtacacacttacacagccatttgacccccctccccgattttatattgtaataagccccttctgcgatatacgcgctatttctcctcccagcggggattgttgaactgcgtattatataaacatcccttctttcaggacatctcctccccgtatattctacgagtcgcccccttgtatatattgagctcccgcacactgcgaggggtcagtttttggc

SEQ ID NO: 64097 - DNA, 467 bp, Homo Sapiens
cggcaggtgagcgaaggatcccaacgttgtatgagtcgaaccacggtcgggggacgggaataacctggcaagcgtcaaagctgggccgtcaaacaagtcttgtcgtggtgccagtagcatgtctggaccccaacagctaatgattcctcaaacattagcacagcagaatagagagaggccccttcttctagaagaacagcctctacttctacaggatcttttggatcaagaaaggcaagaacagcagcagcaaagacagatgcaagccatgattcgtcagcgatcagaaccgttcttccctaatattggtaggagttttcttgagtctcaacgtatattactatgggtattagagtggcatgcgatacgcttatctgacgttaccgtcatataagcgccaaagacataaatagcaagagaaacactatttgaaacaattgtaggtgagcattgttgcagtatttgac

SEQ ID NO: 64098 - DNA, 319 bp, Homo Sapiens
tggatccaaatgccgtggagccagccccaaggagcagattgctgggctgagccgacggatcgctgaggatgatgtgacaacctcggcctgccttctccaacgccctagagcctgactttaagggcacaagcatcactgtgacgggctctggcagttgtctggcacctacagtttatccctgtggtaccacccaggagagtgccctcagaggcgccgcccacagaagtgcctgacagggaccctgagaagagcagtgaggatgatgtctagctgcacacagtcattccggccgtggtggtcgcagccatcctgctcattg

SEQ ID NO: 64099 - DNA, 527 bp, Homo Sapiens
ccccttatgttctgacccacaccgcgtggggcggagcaagatcttcttccgggctggggtcctggcccagctggaagaggagcgagacctgaaggtcaccgacatcatcgtctccttccaggcagctgcccggggatacctggctcgcagggccttccagaagcgccagcagcagcagagcgccctgagggtgatgcagcggaactgcgcggcctaccacaagctgagacactggcagtggtggcggctgtttaccaaggtgaagccaccgctgcaggtgacgcggcaggatgaggtgctgcaggcacgggcccaggagctgcagaaagtgcaggagctacagcagcagagcgcccgcgaagttggggagctccagggccgagtggcacagctggaagaggagcgcgcccgcctggcagagcaattgcgagcagaggcagaactgtgtgcagaggccgaggagaccgggggaggctgcagcccgcaagcaggagctggagctggtgtgtcagagctggagttcgctg

SEQ ID NO: 64100 - DNA, 1015 bp, Homo Sapiens
  misc_feature (816)..(966): n is a, c, g, or t
atatagttgctgtttctttaaatgaacacagcttgagtattgtgaagtgaatttgaaaaagaaatgttacttaatctgttccctaagcccatcgggttacagaatgctcagggacggcaatttggttacctgcaatggctgcttttgccagcgaggccaccattcattggtcatcttggtatttgtgtgtgaatctcactttcctcaatgtaaaaaggaatcaagtatggatttcagaggtgctcttgagattccccatacacccaagggtaataaacgtgtacaagtacagtgttcatgatatcgtgccttggtgggagtccgtggtgccacagggaaggggctcccactgcttctggtctccagggacagtgctgctggaaaggctagtgatgagcttcaccctggagctcctcccgggaccttgcaagcctctccatccagcatcttctctatcttagttgaatgccttctttctgaacatttgttttaagaattacttttataaagtcaacaatactttgcttgaattctttcttaatttacgattttttattataacacatgtatagtgatacaatgggacatgtgaagaatacagaaacagtaaccactttaatgcaataactgttatcataatattgtatttcgtggctagtcctttcctgtagatatttttaatgccatttaatgccattgtcaccttggatttatgagtgaaaagtgtttctaaaaatatagaaataatgtcagatcagagtctgatcttctatgtttgtatttaaatggattaaaagatccccggtggttccatgnnnnnnnnnnnnnnnnnnnnnnnnnnnnnnnnnnnnnnnnnnnnnnnnnnnnnnnnnnnnnnnnnnnnnnnnnnnnnnnnnnnnnnnnnnnnnnnnnnnnnnnnnnnnnnnnnnnnnnnnnnnnnnnnnnnnnnnnnnnnnnnnnnnnnnntttgggggccccccctccccccccaaaaaaattttttaaaacctttttt

SEQ ID NO: 64101 - DNA, 776 bp, Homo Sapiens
ggcaaagacgtggagagagaagtttgctttattgatattgcctgcgatgaaattccagagcgctactacaaagaatctgaggatcctaagcacttcaagtcagagaagacaggacggggacagttgagggaaggctggagagatagtcatcagcctatcatgtgctcctacaagctggtgactgtgaagtttgaggtctgggggcttcagaccagagtggaacaatttgtacacaaggtggtccgagacattctgctgattggacatagacaggcttttgcatgggttgatgagtggtatgatatgacaatggatgatgttcgggaatacgagaaaaacatgcatgaacaaaccaacataaaagtttgcaatcagcattcctcccctgtggatgacatagagagtcatgcccaaacaagtacatgacaatggatgaagtccgagaatttgaacgagccactcaggaagccaccaacaagaaaatcggcattttcccacctgcaatttcctaatctccagcatccccctgctgccttcttccgtccgcagtgcgccttctagtgctccatccacccctctctccacagacgcacccgaatttctgtccgttcccaaagatcggccccggaaaaagtctgccccagaaactctcacacttccagaccctgagaaaaaagccaccctgaatttacccggcatgcactcttcagataagccatgtcgggccaaatctgagtaactttatataaatatctcatggggttttatattttcaa

SEQ ID NO: 64102 - DNA, 1169 bp, Homo Sapiens
  misc_feature (38)..(38): n is a, c, g, or t
cctccatatccccaagaaatgagtgctttagcgaaagnacctaattcagcgtcttttgatgaaagatcccaagaagagattgggatgtggtccacgtgatgcagatgaaatcaaagaacatctcttctttcagaaaataaattgggatgatttagccgccaaaaaagtgcctgcaccatttaagccagtcattcgagatgaattagatgtgagtaactttgcagaagagttcacagaaatggatcccacttattctcccgcagccctgccccagagttctgaggaagctgtttcagggctattctttgttgctccttccatcctattcaagcgtaatgcagctgtcatagaccctcttcagtttcacatgggagttgaacgtcctggagtgacaaatgttgccaggagtgcaatgatgaaggactctccattctatcaacactatgacctagatttgaaggacaaacccctgggagaaggtagtttttcaatttgtcgaaagtgtgtgcataaaaaaagtaaccaagcttttgcagtcaaaataatcagcaaaaggatggaagccaatactcaaaaggaaataacagctctgaaactctgtgaaggacaccccaatttctaatgatggaacttctgaatggaggagaactgtttgagcgcattaagaaaaagaagcacttcagtgagacgggaagcccagctacatcatgaggaagcttgtttcagctgtaagccacatgaatgatgttgggagtggtggacaagggatctgaaaacctgaggtaaaaaatcactggatctcttaacgaaattcagtccagcccccattattaaagatctcccaaacatgggcggaaatttccgggggaggtttcccttaattttctaacttatcaaagggctggtaaaatacgactaattcggaaaataacctctcctttgaagggtttttccccattaatcctcgcggcccaaaaaaacaaccttggcctctgggttcaattttttgcccacccacatacatggaccacttagaacgagcctcgaaatacacttcggtcgggcacttctctgtggcccttcgaaataaaccttcttctacaaaccattttcttttttggcaaagggggtcgccccagtcagtttaaagtaccaatcatgtgtgctta

SEQ ID NO: 64103 - DNA, 514 bp, Homo Sapiens
  misc_feature (204)..(271): n is a, c, g, or t
tgagccaccgcgcccggccagaagcatttttgaaacgttggggttgttggagtggttggattttccctggaattgatgtgagaaattcagaagactgaatgcccaggcttactgtctacctttcactggaggcctagccgtgagaggacagaagaaggcacgtggcgaatcatgacagcggacaaagacaaagacaaagacaannnnnnnnnnnnnnnnnnnnnnnnnnnnnnnnnnnnnnnnnnnnnnnnnnnnnnnnnnnnnnnnnnnnattcaaggccacgccggagctgtaccttggaaggaggagccaaaaattatgttgagagtgatcacagtgaagacgaggacaatgacaacaatagtgccaccgcagaggagtccacgaaagaagaataagaagaaaccaccgaaaaaaaagtctcgttatgaaaggacagataccggtgagataacatcctacatcactgaagatgatgtggtctacagaccaggagacttgtgtatactcgac

SEQ ID NO: 64104 - DNA, 245 bp, Homo Sapiens
cactatgtaatactatgccttcagcgtaagagggaatgaacctgggtctgccggttcaccatcaccgacgtaagaatgattcatttttcacccctgactccaaccacaatagcttgtctcaatctaccactgggcatctcagtttgccacagaagcagtacccagactctcctcacccagtcccacatcgttcccttttctctccgcagaacacccttgccgctcccacgggtcgccggggttcc

SEQ ID NO: 64105 - DNA, 658 bp, Homo Sapiens
  misc_feature (434)..(434): n is a, c, g, or t
ctgggccagggggtccaaagtgctcagcccccggggcacagcaggacgtttgggggccttctttcagcaggggacagcccgattggggacaatggcgtctcttggccacatcttggttttctgtgtgggtctcctcaccatggccaaggcagaaagtccaaaggaacacgacccgttcacttacgactaccagtccctgcagatcggaggcctcgtcatcgccgggatcctcttcatcctgggcatcctcatcgtgctgagcagaagatgccggtgcaagttcaaccagcagcagaggactggggaacccgatgaagaggagggaactttccgcagctccatccgccgtctgtccacccgcaggcggtagaaacacctggagcgatggaatccggccaggactcccctggcacctgacatctcccacgctccanctgcgcgcccaacggcccctccggcaggcccgtatccacaaggggccgggccccaggcaggacatccccgctggccggcgaaggagatcgcacaataaaagcgtggagtatcctcctcggagaagcagaaggaaaagagagagagaggaaaagaagcgaggggcgcaccaagaagcaagcacgaagagggggagggggacgacacaaagggcaggcaggggtga

SEQ ID NO: 64106 - DNA, 554 bp, Homo Sapiens
tgagccactgcgcccggccactttcacactttttacagtgagtggtgaattagcaacagtaacactgattatccaacatatattttggaatatctactatgtgcaaggaatttttcttaaactctaaggttatgaatcactgggcaaatccatataattagagaattttaagtgctttagagcggtgtgattctactgtgctcagcctagtcaatttcgcattaaactgattatcagctgagtatcactaaggcccacccgcaccccccagcgccgcaccgagcaacccgacggcgcgaccgcgccggcacccaccgcgcggcccagggagggggagagccggcgcgggagggtcttttggcgcagcgcccagacagaggggaagcggaaattgtgtgggggccctcttgccccccaagaaaagttctctcaaaacctctccggggtggcgggcgggcccccccgcgagggaaagggacacacgggccaaaaccggcggtccccaaaagaaaaccccggggccacaccaaaaagagcgttggagcacccccgcc

SEQ ID NO: 64107 - DNA, 1149 bp, Homo Sapiens
ggagggctgctggcacccttactcaaggacattctgaaagcttcccttgcacatgtggcatggcgtgtgagctgtgtcaaggaaagggctttatttgtgaattttgccagaatacgactgtcatcttcccatttcagacagcaacatgtagaagatgttcagcgtgcagggcttgctttcacaaacagtgcttccagtcctccgagtgcccccggtgtgcgaggatcacagcgaggagaaaacttctggaaagtgtggcctctgcagcaacatgatgcccctgagtactgtgaaaaagactgttcaacatgccttatgataacaccgatttgtgtctattattggtgacattgttttagatattgggtattgtatattaaggaaaaagatggtctatattctctttattgcatatacttaatgtttcaaaagaatgcagattctgtgtttaagcacagggctgatagttgtggttttgtttacaaatgttctgttttggctgctattggttttttaaagaggttttttatacttttgtatttgaatagttatgtttcactgatgctgagccagtttgtatgtgtgtgcatatatgtgaactgtaactgacaagatgaattactcagtttctctttctctaaagcttgtttgatgaaactggttggtcctttcagtgaacaaaaatatgaccccaaatctgtttgctctggcttttatttcttcaggaagcagacttccacttaaatgccattttgtgattgtgtcaatcatacacattttatttacttcagagtttgaatagagagtacacatttcttctgcagatttatttcatgatgagtttgagttgcttagcagggcgtgtgggtcccgttgaagtgcagtttgaagcaactgcttctagatggcactctttcaggtggcacaaatttgaacctgtatttgtcatctctgttccacacactgcaatgtcaagggatgcagaagtgagtagaattccatccctgcccttgaggatcttgctttaacagatgtaaaactgaacataaagtatttgcagatttaacgaactgggggaaataatgacagtgtggatctagtaatacattaaaatcatagacattgactattaagggttaatggatcccc

SEQ ID NO: 64108 - DNA, 870 bp, Homo Sapiens
  misc_feature (828)..(828): n is a, c, g, or t
  misc_feature (838)..(838): n is a, c, g, or t
  misc_feature (840)..(840): n is a, c, g, or t
gaaagccttgtggccacttggcactactcatcagagattctgtcccttctctccacaggctgtgtctcatgtctagactatgatgaacattacattctcacattccccaatggctatggaaggcaagtgtgtccatttcctctgatcagcagtagactctgctgttccttgagacatgccccttccccctcttcctcctaactgtcaagcttacctaaaaacttttgattttgcaggtctatcctcacagtgccctgggtggaattaggaggagaatgcaatattaattgttccaaaacaggctatagtgcaaatatcatcttccacactaaacccttctatgggggcaagaagcacagaattactgccgagattttttctccaaatgacaagaagtctttttgctcaattgaaggggaatggaatggtgtgatgtatgcaaaatatgcaacaggggaaaatacagtctttgtagataccaagaagttgcctataatcaagaagaaagtgaggaagttggaagatcagaacgagtatgaatcccgcagcctttggaaggatgtcactttcaacttaaaaatcagagacattgatgcagcaactgaagcaaagcacaggcttgaagaaagacaaagagcagaagcccgagaaaggaaggagaaggaaattcagtgggagacaaggttatttcatgaagatggagaatgctgggtttatgatgaaccattactgaaacgtcttggtgctgccaagcattaggttggaagatgcaaagtttatacctgatgatcagggcagtaggcataattcagcaacaaacaatcttcnttgggagaancngtttcattccatcttctaattacatggttc

SEQ ID NO: 64109 - DNA, 415 bp, Homo Sapiens
cactatagcctgcacgctgaagaaccccttggtgctgccagcaaatctgaacggcggggagcggctagtatgctacccctacgatatggcccgcacgcctacccaggagcagctgctggccgcagccatggcagcagcccggggggaggatgaggacgaggtctccgaggcccaggagactccagaccacgccatcttccggtggcttgccatctccttcgcctccgcacacctcaccttgaccgagccctaccgcggaggctgccaagcccaggactacaccggcggcatgggcatcgtcaacggggccaagtggaacccccggaccgtgactatcaatgacttcagttacctgcataccaactgcctggagctctccttctacctgggctgtgacaagttccctcatgagagt

SEQ ID NO: 64110 - DNA, 290 bp, Homo Sapiens
aagaaattgttttttttggactggggaattttcttctgcttcactttaaaagtgggccagggcaattatcatggctgcaaggtaacttcaaaaggatggggaattgcgatcttggcatgtgtcagaagaaatgaaaacatttggtgaagagcattaatgactgtctttacaggaaaaaaagcattcaaatagacatgatttcttgtttcagtttcatcatttcctactgtgttacctaaactttctgagccccagtttcttattactaaaataaaataatgataaagatg

SEQ ID NO: 64111 - DNA, 714 bp, Homo Sapiens
caaagaactactcagcaggatgttgccagtctcttggaagagtttggtccaattgaatcaagttaatatgattcctcccaggggttgtgcctatattgttatggttcataggcaagatgcctatcgtgccctgcagaaactgagccgaggaaactataaagtgaaccagaaatccataaagattgcctgggccttaaacaaaggaataaaggcagattataagcagtattgggatgtagaacttggtgttacttatattccatgggacaaagtcaagcctgaggaactggagagtttttgtgaaggaggaatgttggacagtgacacacttaacccagattggaaaggaattcctaagaagcctgaaaatgaagttgctcaaaatggaggtgctgaaacctcacacacagaaccagtatcacccatacctaaaccattacctgtgcctgtccctcctattcctgttcctgcacctataacagtgccacctccacaggtcccaccacatcaaccgggtccacctgtatgttggtgctctccagccgcctgctttcacgcctcctctgggaataccgcctccaggcttgtgtcctggtgttcctcctccccctcctcctccaccatttttgcgcccaggattcaacccaatgcatataccaccaggttttctgcctcctggacccacacctcctataactccaccagtatcaattc

SEQ ID NO: 64112 - DNA, 678 bp, Homo Sapiens
gcctgggtggcgaattcggcacgaggcacttctgttggatgcctaccgtgtgtggcagcagggccagaagggtgtggcctatgacctgggccgtgtggagaggatcatgtcggagacctacatgctcatcaagcaggtggatgaggaggctgcgctggagcaggctgtgaagttctgccaggtccatcttggggctgccgcccagagacaggcctcgggggacacccccaccactccaaagcaccccaaagacagccgagagaacttctttcctgtgacagtggtgcccacagcccctgaccctgtgccagctgactctgtccagcggcccagtgatgctcacaccaagcctcgccctgcactagctgccgccacaactattatcacctgccctccgtcagcatcagcttccaccctggaccagtccaaggaccctgggcctccccggccacacaggcctgaagctacccccagcatggcctctctgggcccagagggagaagagctggcgagagtggcagagggcaccagcttcccgcctcaggagccacggcacagtccgcaggtgaagatggcccccacaagttccccggcagagccacactgctggccggcagaggctgccctgggcacaggcgctgagcccacctgcagccaggaggggaaactgaggctgac

SEQ ID NO: 64113 - DNA, 647 bp, Homo Sapiens
  misc_feature (182)..(182): n is a, c, g, or t
aggcgagcactgccctgcgtcatacaggacggggccctgcctgaccaggaggctgttgccctccaagtcgtccctgccgggaacagcaaagcacacaaacctccgagagacctaatggctgcatcctccgtgcagtgggcaccacgcttgccacctagaagagtgggtttggccagatgtcnagttaataacaaggatgtaagttttagaaatcacgtgggggtttgtaaacttgaggaattacagcacaaacacttccatattattaaaagaaacagactgggagcattgattttgacttttcttccaagtacttatctatgatttaagtgaaactgagcattcagtgctctgtgggagtgaaaactgcaggcccttgcacttgcccactgattcattcattcacccatccacccactcattcattcaactatccatgcactcggtcatccatccatccactcattccttcatttattcatccatctccatccatccagtcacccattcaccctcccaaggctgaggaaatgctatgaacagagaagagcgaattcaagatttcaaaaactctatatctatacagtgacatataatcatgcaaagtacatttataattatataggtaatgtgtgtatcagaaagtc

SEQ ID NO: 64114 - DNA, 1065 bp, Homo Sapiens
  misc_feature (223)..(223): n is a, c, g, or t
  misc_feature (269)..(301): n is a, c, g, or t
gtcgcgtccggttgcggcggctgacggccctggctggatcccgctagctggtgttgcggctgggctggcggtggcaggcggataacaacaaaccccggagccggagccaggggaggctggacgggacgggatgggcgacagcgggcgggactcccgaatgcccagacatgctcctccccaaatccccttccccagggagtccctcccccttctcctcctgggncacccctacccccttcaacagctccatcccttggaggctctggggnnnnnnnnnnnnnnnnnnnnnnnnnnnnnnnnntgggctctccctttccagtcatcagttcttccatggggtcccctggtctgccccctccagctcccccaggattctccgggcctgtcagcagcccccagattaactcaacagtgtcactccctgggggtgggtctggcccccctgaagatgtgataccaccagtcttaggggtccggggcctgcactgtccatcccctttaggtgtgtctggtgctggccaatcgttatgtgcaagctgcggcgacatagttccggccgcccctacggggtctactactgtgaagtgttcacggcgtttattcataccccggcccccgtatagacctcgcgccgtccgggcccgtgatacataggactgcgttcggtttttggcggttaccgtgctccgcctgctttttccccctgccgtcttgtattcggcccccctccctttcccgtttacgccccttttttgtcttcggccccctcttttccttccgttcgaataggcgcccgtgcctttccttttttcgttgtgtgcccccgtcgcccctttttccttttctgccgccccttccctgtttgttgttacgtttcctggtccgccccggggttgcccgcgcgttcctgccgtttgttggccgcgtcattttatccggcgccctctaattacgggactgcgtcgccccaacgccacgcccccttattattgcggcggtgtatttgccccgctgtgatcctgttgttctattcttctccgcctccgctcctcttctcctggcgct

SEQ ID NO: 64115 - DNA, 906 bp, Homo Sapiens
ctgactttccacgactgacgctcaggcatcttcccctactccccaacagatccccagaagacagcgtggaaggcagtgtagacagtaaatcgggcttcagttctatagccaagaagagatcagctgctgaaaccaccagtgggtaccccaggccacctgcctttgaacttggggatttgccatgtttgatcttgtcacatacttgcttttttacaagatgaactctttgtatttatgatttggggggcaatgaaaggtgcaatgcaggaactgctgctgccgagctcgctggtcacatgggggtgccaggcgggattctggaaaaccagtgcacttaaactgatcctgaagagagctgtcccagcactctggccaccaggagggccagattccccagaaactaccttttgcccaaagaacatgctcagtatttggggcatttcctcccacaaaccctgactgcttctgttacctcagggccttggtacctggatactgccacagaattggggcgggtgggggaggggcctatttttaaataaaataactgttcaaagttgggggttttttaaaaaattaagaaaaaggaaagctattctgtattgcaccttttcacaatttaatacattttcttacattttcctgtgattttcgaaactaaaccattgtgtgtcctgtagtgtcctggttgagctgccgctcagcagcttcctcggggggatttggaacacctgtgtctgtcgccgcactgcctgtgggaggggcccagagggctgctgggactggcgtctgtacacacttgtttggccttttctgtagttgatgctgtaaactctatggctttttaaaaacgatttcatgtttttatttagtattggaaatccaatacacttttttaaacacatc

SEQ ID NO: 64116 - DNA, 1929 bp, Homo Sapiens
gtctctgagctgcgtgctgagaaccagcggctgacggcgtcactgcgggagttgcaggagggcctgcagcaggaggcgagccggccgggggccccgggctccgagcgcatcctgctggacatcctagagcatgactggcgggaggcgcaggacagcaggcaggagctgtgccagaagctgcatgccgtgcagggggagctgcagtgggccgaggagctgcgcgcccagtacctgcaggagatggaagacctgcggctcaagcaccgcacgctgcagaaggactgtgacctgtacaagcaccgcatggccactgtcctggcccaactggaggagattgagaaggagcgagaccaggccatccagagccgtgaccggatccagttgcagtactcacagagcctcatcgagaaggaccagtaccgcaagcaggtgcggggcctggaggcggagcgggatgagctgctgacaacgctcaccagcctggagggcaccaaggctctgctggaggttcagctgcagcgggcccagggtggcacctgcctcaaggcctgtgcctcctcccattccctgtgctccaacctcagcagcacttggagcctgagcgagttcccctcccctctgggaggcccagaagcaactggggaggcagctgtcatggggggacctgagcctcacaactcggaggaagccacagacagtgaacaaggagatcaatcggctctccatccgtgccctttcccccccagtgccggctccatcctccgccggcagcgtgaggaagaccccggaccccctaagagatccttcagcaggatgtcagacatcacagggaagtgtgacacttaagccctggtcccctggcctctcttcgtcctcatcctctgacagcgtgtggcctttgggaaagccggaaggcctcctggctcggggctgtggcctggacttcctcaacaggtctctggctattcgggtgtctggccggagccccccaggggccagagccgcaggacaagggaccagatggactgtcgttttatggggacagatggtctgggggctgtggtgcgcagggtgctgtctgggcctgggtccgccaggatggaaccaagagagcaaagggtggaagctgctggtctggagggggcgtgcctggaagccgaggcccagcagagaaccttgctctggaatcaggggtccacactcccctccctgatggactcgaaggcctgccagtccttccacgaggccctagaagcctgggcaaagggaccaggtgccgagcccttttacattcgtgccaacctcaccttgcctgagagggcagatccccatgccctttgcgtgaaagcccaagagatccttcgactggtggactcggcatacaagcggaggcaggaatggttctgcacccgggttgaccccctcactttgcgggacctggtccggggcaccgtgcccaattatcagagagcccagcagctcctagaagttcaggagaaatgcctgccctccagccggcaccgaggcccccgcagtaatctgaagaagagagccctggaccagctgcggctggtgaggcccaagcccgtgggggcgcctgcaggggactccccggatcagctgctgctggagccctgtgcagagccggagcggagcctcagaccctacagttttggtgcggccggctaactggtgtctgccctgcggcccctgggtgctgttggctgagtgcctggcgccccgggtcatccgtaacctgctagacctggccagcctccggctggacttcccagggtgcccaggggtaaaccccccctgggggagggactgtgctcatcctccgccgcctgggagtccccaacgcgctaaatctggccccccctgggcctaaggcacaatggatccccggccttgcgccggaggtggtgg

SEQ ID NO: 64117 - DNA, 1677 bp, Homo Sapiens
  misc_feature (1004)..(1013): n is a, c, g, or t
  misc_feature (1269)..(1269): n is a, c, g, or t
gctggtacccggtccggaattcccgggatcgagcccccgaggcccgagggagagggaagagcgccgggcccgggtcgcggaggcgggcgccgccggaacgcgaagcgcggggctactgcgggcaggcgcgagttcgcgcagcaccgcccccggcgtgacctgctggtcgcttccggcgcgggaggagaatgtggccgccttgcgggacgctccggaccctggccttggcgcggtcgcggggagcccgggcctgcagcggggatgggggcgtttcctacacgcagggccagagtccggagccgcggacccgcgagtatttctactacgtggaccaccagggccagcttttcctggatgattccaaaatgaagaatttcatcacctgcttcaaagacccgcagttcctggtcaccttcttctcccgcctgagacccaaccgcagcgggcgctacgaggccgctttccccttcctctcgccctgcggcagagagcgcaacttcctgcgctgcgaggaccggccggtggtcttcacgcacctgctgaccgcggaccacgggcctccgcgcctctcctactgcggcggtggcgaggccctggccgtgcccttcgagccggcgcgcctgctgcccctggccgccaacgggcgcctgtaccacccggcgccagagcgtgcgggcggcgtgggcctggtgcgctccgccctggtcttcgagctcagcgcctgcttcgagtacgggcccttctcgcctaaaactgacatcccccaccgtccccgatgaaaccctaaggccccccctgctaactccagctcctgcaggcgcccctccgaccgccgcccggcgggccaccgggcgcctctttggcgcgccccaaggttgcacgtaaaccccttcctgttcaccgggcgctccgcctctgatgtgacgaacccacgcccagcctctccggtgcatcccgcccccctaatggaccgcgcgcttgaaatgttcgacacggtcctgcgnnnnnnnnnngcgcgccacacctatcctacaccgccccccctctattacacaagcccccccgcctcggagccataagtgacaagccacaactctcccctggccctgctcttctacagcacgttggtgttgggcggggggggcgcccaacttcagtgtttttgttgcgccttcctccccccacctccgccgtcatagtcgagtcgcggctcgcgccattcgtgtcctaccgccctcggcgatcggtttttcacccagcattttctcntctctcgcgtcccccgcgcgcgcctcctctctgtcttctcgtttgtccgcgccgagatttctcggtgtctcgccccggccgccggctcgtcgtcccgcccggtcgtgcctctagccgggcggggcggttgatcgtctgcgcgtcgcgaactttacccccggcggaccgactgatcacacctatcttcctccctcctgtttcccgccacgacggggcctctagtctctcgccttaacccgcctgcctttcgcctcacacttacgccactttccgcgacaccgcccgttaatatgcatcgcctccctcccttcgttcctctacggtggccgccgcaccccctgccgactgaggtggtgccgttatccggcgcccgcgcttcgcgtcctgcaaccggccccctcttccgcg

SEQ ID NO: 64118 - DNA, 1165 bp, Homo Sapiens
  misc_feature (128)..(191): n is a, c, g, or t
  misc_feature (793)..(832): n is a, c, g, or t
  misc_feature (957)..(973): n is a, c, g, or t
accaaccccacaaaccaggatggtaccggtccggaattcccgggatcgaccgcgggaccgacccggggacccgcgcaggaagcgaagcagcgacgggaaccggcgaagggacggggaccgggacccgnnnnnnnnnnnnnnnnnnnnnnnnnnnnnnnnnnnnnnnnnnnnnnnnnnnnnnnnnnnnnnnngggaaagagacccggaccgaggcccccgccgggacacacacagggacgcgggccctcgcgcaggtgaacacggagtttgggaaaaaccgcgccaaagccggacgcgggacggagcccggggactgacctgggacgcagccgcgcctcctgggcccgcgccctgggaagccccggagccgccgcagccgcagaggaagggagaccccgggcgccgcagacccgaaagtgaacccccttcggagagatatctgccctcgacccccaggcctggacgagaggaggtggaatattaccagtcagaggcggaaggactcctggaatgccacaaatgcaaatacttgtgcactgggagaggtgtggtgcagatagtggaggtggtcttgaatgggatggttctcatatgcatcgtggcctcctactttgtccttgccggattcagtgccagcttttccagcggcggtggctttgggaacaactactactcaccgttcgagggcactgagctagagcaggttcggcagcttggaccagccagtacacggatccttccgcctcggccccctgaatataacgggtgggcggtgggcatggttttccctctnnnnnnnnnnnnnnnnnnnnnnnnnnnnnnnnnnnnnnnntctttttaccctccccaggggagccccaaagaaggttccaaacccatgggtttgattcaagggggaaagggggcggcttcccctccccggggggggcgcgccctttttaggcccctccctaagcnnnnnnnnnnnnnnnnnctaccttggcaaccaggggccatctgggtggggtttaccccctcccccggggggggtttttgtggaggaaatccaagtaggggcacccgggagcccttttggccgcgcaacccctgcaacaagagggggtttttctattggccccctcccaaagggggggtcctccccccccttggggaaatgggggaccta

SEQ ID NO: 64119 - DNA, 364 bp, Homo Sapiens
cgtggctgggccgcaaggcactgaagaaacttgcttaagtggttcttgggcctgctgagcctcatctatgagaagtgaggctatagatgaagcctaccgcatatgggcttcttggggctgaaacgagtctaatgatgtcgaagctagctagaactgtacctgtgtcagagtcgagtgtgcagcatacgttatcatcactgtcatcactccagcattctgattgtgcctttaaactagtgtgggattttgcccaaacctctaaaccctcccctagccgtggtttcccccgcagtctgaagactctaatacttgacactcgttcagagagatgtttggggaatttatagacactttgcatccagca

SEQ ID NO: 64120 - DNA, 535 bp, Homo Sapiens
  misc_feature (387)..(387): n is a, c, g, or t
  misc_feature (395)..(444): n is a, c, g, or t
cccaggtttgtctgtgaccctagtgcgtccaggtagctatattcacactctcctctccaattggatgcgcttctcccgctctagccagctctttcctttgacttctcagctcccttgaagcacacaattgtcctaggaacttgggggtgaccttggggccacttatcggtttctcttcctcctttgaccccatatacagtaattctccctgtcttgtagagtccttctgcagcatctatgtcctttgtgccttcctttacttcagcactgctggtggctggttttgggttccatcacatcctgcctggacttcttgtaagagcctcctcgctgctctcttcatgatgccaggtttgttctgcacacaccaccagcccttcactcttntgtgttcnnnnnnnnnnnnnnnnnnnnnnnnnnnnnnnnnnnnnnnnnnnnnnnnnngcatacgaaatgaagatggagtgttcccactccagggtgcacactgggcagtggtaaaaggaaaatggggccgggcgcagtggttcacgcg

SEQ ID NO: 64121 - DNA, 1002 bp, Homo Sapiens
  misc_feature (119)..(127): n is a, c, g, or t
  misc_feature (882)..(882): n is a, c, g, or t
tggaccggtccggaattcccgggatcggcagccactgcttggggtagcgggagggcagactctgggcgccactcccgggccggtcatgaacgggccggcggacggcgaagtggactacnnnnnnnnntaccggaatctgaagcggaagctcaagttcctcatctacgagcacgagtgcttccaggaggagctgaggaaagcgcaaaggaaattactgaaggtgtcccgggacaagagtttcctcctagaccgacttctgcagtacgagaacgtggatgaagactcttcggactcagatgccactgcatcatcagataacagcgagacggaggggacacccaagttgtctgacacaccggcccctaagaggaagagaagccctccgctggggggcgccccctctccctccagcctctccctgcctccttcaacagggtttccccttcaggcctccggggtcccctccccatacctgagctcgctggcctcctcccgctaccccccattcccttctgactacctggccctgcagctgcccgagcccagtcccctgaggcccaagcgggagaaacggccccgcctgccccggaaactcaagacactggtggtcagagaacagactgagcggtggagtgagttgggacgggagtgaggaggccaccacggtaaaccaggccaagggcagagggtccagagggagctgcggacccatttcagagaatgagcatgggagttcctggaggacctgggtgtgggctgtgccgggagagaggccaggatgcctccagggctttagtctgagcacgagtggagtctccctcctgtggagatgggaaagggctgtgggaccacaggcttggaggaaaactgagtcttggccgncggatgtgtcagatgccatctggaaaggcagctagatagcggcccgtgaggggctgcgcatttggaagccgcaggctggcggtagatgcaagccttggagagatgggatgctagtcgcac

SEQ ID NO: 64122 - DNA, 914 bp, Homo Sapiens
cgcacgcgaccggggcggtggttggcggctacggacgcgcaggactgggggacgggcgggtacggctatgggcgaggcggaggcgccttctttcgaaatgacctggagcagcacgacgagcagtggctactgcagccaagaggactcggactcggagctctgagcagtacttcacctgcgcgaacctcgctagctcgcaggccgcgccgggaccaggacgagcctgtggagtgggagacacctgacctttctcaagctgagattgagcagaagatcaaggagtacaatgcccagatcaacagcaacctcttcatgagcttgaacaaggacggttcttacacaggcttcatcaaggttcagctgaagctggtgcgccctgtctctgtgccctccagcaagaagccaccctccttgcaggatgcccggcggggcccaggacggggcacaagtgtcaggcgccgcacttccttttacctgcccaaggatgctgtcaagcacctgcatgtgctgtcacgcacaagggcacgtgaagtcattgaggccctgctgcgaaagttcttggtggtggatgacccccgcaagtttgcactctttgagcgcgctgagcgtcacggccaagtgtacttgcggaagctgttggatgatgagcagcccctgcggctgcggctcctggcagggcccagtgacaaggccctgagctttgtcctgaaggaaaatgactctggggaggtgaactgggacgccttcagcatgcctgaactacataacttcctacgtatcctgcagcgggaggaggaggagcaccctccggcagatcctgcagaaagtactcctattgccggcagaagatccaagaggccctggacgcctgccccccttggggtgacctcttgtacccccaggtggaaggcaga

SEQ ID NO: 64123 - DNA, 710 bp, Homo Sapiens
gggggaggcgggcagcggagccaagctgacccggcgagcggagccggggctggagagcggcgaccactgcggatctcggaaggaagaaatgatgtaaatcactcatccaaactttaaggtcaaaggtgagaaggaaggtcaggaagaacatggcctggccaaatgtttttcaaagagggtctctgctgtcccagttcagccatcatcatgttgtagtgttcctgctcactttcttcagttattcgttgctccatgcttcacgaaacacatttagcaatgtcaaagtcagtatctctgagcagtggaccccaagtgcttttaacacgtcagcttgagctgcctgtggagatctggagcagcaaccatttgttccccagtgcagagaaagcgactcttttcctcggcacactggataccattttcctcttctcctatgctgtgggcctattcatcagtggcatcgttggggatcggttgaatttgcgatgggttctgtcttttggcatgtgctcttctgcattagtggtgtttgtctttggtgcgctcacagaatggctgcgtttccacaaccaatgtgctcgaactgctcgcctgtggattgtgaacaggcctgctgcagtccacctggttggccctgtgtggttactgttatgggcaactggtttgggaaacgccggacgaggacttgttttgtctctggagtctctgtt

SEQ ID NO: 64124 - DNA, 758 bp, Homo Sapiens
gggggctgggcaggaggggttggcggggcagcatggccgcggccatggggagcttgaaggaggagctgctcaaagccatctggcacgccttcaccgcactcgaccaggaccacagcggcaaggtctccaagtcccagctcaaggtcctttcccataacctgtgcacggagctgaaggctcctcatgacccagttgcccttgaagagcacttcacggatgatgatgagggtccagtgtccaaccagggctacatgccttatttaaacaggttcattttggaagaggtccaagacaactttgacaagattgaattcaataggatgtgttggaccctctgtgtcaaaaaaaacctcacaaagaatcccctgctcattacagaagaagatgcatttaaaatatgggttattttccactttttatctgaggacaagtatccattaattattgtgtcagaagagattgaatacctgcttaagaagcttacagaagctatgggaggaggttggcagcaagaaccatttgaacattataaaatcaactttgatgacagtaaaaatgggcttttctgcatgggaacttattgagcttattggaaatggacagtttagcaaaggcatggaccggcagattgtgtctatgggcaattaatggagtctttaatgaacttatgttagatggtgttaaagcagggttacatgatgaaaaagggccacagacggaaaaactggactgaacgatggttgtctaaatgtgctgaa

SEQ ID NO: 64125 - DNA, 670 bp, Homo Sapiens
ggggcgcaccgcagacggcgcggatcgcagggagccggtccgccgccggaacgggagcctgggtgtgcgtgtggagtccggactcgtgggagacgatcgcgatgaacacggtgctgtcgcgggcgaactcactgttcgccttctcgctgagcgtgatggcggcgctcaccttcggctgcttcatcaccaccgccttcaaagacaggagcgtcccggtgcggctgcacgtctcgcggatcatgctaaaaaatgtagaagatttcactggacctagagaaagaagtgatctgggatttatcacatttgatataactgctgatctagagaatatatttgattggaatgttaagcagttgtttctttatttatcagcagaatattcaacaaaaaataatgctctgaaccaagttgtcctatgggacaagattgttttgagaggtgataatccgaagctgctgctgaaagatatgaaaacaaaatattttttctttgacgatggaaatggtctcaagggaaacaggaatgtcactttgaccctgtcttggaacgtcgtaccaaatgctggaattctacctcttgtgacaggatcaggacacgtatctgtcccatttccagatacatatgaaataacgaagagttattaaattattctgaatttgaaacaaaaaaa

SEQ ID NO: 64126 - DNA, 1025 bp, Homo Sapiens
  misc_feature (1000)..(1000): n is a, c, g, or t
cggtccggaattcccgggatctcggagagaagaggcgggagtggacctggtcagccctaccccactgaccccaccggacccaggcgcggcctccgccacagccacagcccctgcccctgctgcggcgcggcgaggcgaggcgatggccaaggtgtcggtgctgaacgtggcggtcctggagaacccgagccctttccacagccccttccggttcgagatcagcttcgagtgcagtgaagccctggcggacgacctggagtggaagatcatttatgttggctcggctgagagtgaggaatttgatcagatcctagactcggtgctggtgggccctgtgccagcagggagacacatgtttgtctttcaggccgacgcccccaacccatccctcatcccagagactgatgccgtgggtgtgactgtggtcctcatcacctgcacctaccatggacaggagttcatccgagtgggctactacgtcaacaacgagtacctcaaccctgagctgcgtgagaacccgcccatgaagccagatttctcccagctccagcggaacatcttggcctcgaacccccgggtgacccgcttccatatcaactgggacaacaacatggacaggctggaggccatagagacccaggacccctccctgggctgcggcctcccactcaactgcactcctatcaagggcttggggctccctggctgcatccctggcctcctccctgagaactccatggactgcatctaactgcaggaacccagggtgtcccagcacgccgggagggggcaccaggcctcccagcgagtcctgcagggcccatctagaggactttggggggcatcaggtgcgatccaggtctgtcaaactcagccccctagaaagaacagggcttgggtctcccctagtcctggccagaaagatgatctcgctttttctctacaggcctataagaagcaggtacttcagttctaaattctgacttggggttcttttcgnctccataaattctaactaaggccac

SEQ ID NO: 64127 - DNA, 792 bp, Homo Sapiens
  misc_feature (124)..(138): n is a, c, g, or t
ggatttcattggattttagacagggcaaaaggaagataggggcctctggaggcccttggttatttaaatcttggattatttgtgatagtaatcacaaatttttggctaatttttaacctgaggnnnnnnnnnnnnnnnaaaggaaatgcagcctagtcttgagaacttaattttatataatcaattactaaatgttaaactattaccacactgcccataaaacagcatttgcgtttattgagagagaggatgtgccatcatgattaatgaaaactatcttttgagtttgaaaagaaattaatttgcagtgtttggattgtatatatggtgctaaaaataaattaatttactttataaaccttatctgtacattatacgatgtgatgaaatttgctttttatccaaatattttgtatcttgtaaatatggctaattataggaatgcctataatacatcttagattccttatatctaataagagttcaaagagttatgagttgaagtcttgaatgcaggaaactatctgatagtgttctaaaatttggttacttgggtttggatacccttagtgggatgatgtaaatagaggctagctacctaggcttgtctatagcaaccctaatgttgatgtaagtaatgcggttactgaatcataagaaaatgccatctctttttaagttgaagaaaactctggaaataagcggccattggtcattctgcagtgcactgcaaccattgtttccccctagggcccccctttttccctagggaattgctcctcctatttcccc

SEQ ID NO: 64128 - DNA, 588 bp, Homo Sapiens
  misc_feature (54)..(54): n is a, c, g, or t
ttttatggagatgttggatcacacaattcaaatagaggatttggaaattgcagngggaaacaaacacagcttgtaatgagttcttctatgaatagtcaagcttcattggacaacacagatgatgaacaaccaaaacaaccaattaaaactacaatgttattgaaaattcagcaaaacataggtgtgattgcagcatttacagttgcagtccttgctgcgggtatctcctttcattacttcagtgattagggtgaggcacaaagagtttcttgatcatccagagaacattgacagacaattatgaataataaagatgttaacaatccatctgtatttaaaacactagcagccagatctgctgccatgatgcctatttggtgtgtttctgattaaaatgaaatcacaagctgccttgtttagcctgctttacattgtaggtggcccgcatttccagaaataacgttatgcatctagatggaagctgcatgtaacaaatcattattatctatttttaaaagcttcaaaatgatgggatatgatcatagattttagtcttactaatctgaatcacatattaatcaggacatt

SEQ ID NO: 64129 - DNA, 599 bp, Homo Sapiens
gctgcagtctactctagagatcccctatgttctgacccacctactgaagttaccatctgccaatcttcagaggtctccaagccaaagctggagtcaagagtgcacctcgccaagcctggaaatgaagattcacaacttcttaaaagaacacccttgccgctcccacgggtcacccacccacgtcaggcgtggagaaagtcctggcctccaacacatttccaccacgtcgacagattgaatttaagtaatatgcattaaaaacgctctcacagtaagccactcaagatgataagcattttggccaaggctcccagcaagggcacttccaagtgatggtgtcagtctctcaaacctcaacaccaacccagcttgaccagccactgatcagcaagcaacaagaagagcactacacagcatagaaacccgcgtcatcctcctccatgcgttagacttgcactgatagcacaagaagaaaacgggggcccactatagaaaccattgggttatcacaagtgcatccagataggaggatgtcaggggagccagatccagaccagtagagtccatccgagttcctgggaagggaaatagagtactag

SEQ ID NO: 64130 - DNA, 804 bp, Homo Sapiens
gctcatcccccaactcaggctgctttaccccagtgggatcctgccccgcctgttggctcccttctccctcaactttgagatgattttctcttttcaacttcttgaacttggacatgaaggatgtgggcccagaatcatgtggccagcccaccccctgttgaacctcaccagccttggagtctgtactagggaaggcctcccagcatctgggactcgagagtgggcagccccatctacctcctggagctgaactggggtggaactgagtgtgctcttagctctaccgggaggacagctgcctgtttcctccccatcagcctcctccccacatccccagctgcctggctgggtcctgaagccctctgtctacctgggagaccagggaccacaggccttagggatacagggggtccccttctgttaccaacccccaaccccctccaggacaccactaggtggtgctggatgcttgttctttggccagccaaggttcacggcgattctccccatgggatcttgagggaccaagctgctgggattgggaaggagtttcaccctgaccattgccctagccaggttcccaggaggcctcaccatactccctttcagggccagggctccagcaagcccagggcaaggatcctgtgctgctgtcatggttgagagcctgctcaccgtgtgtcgtggagtgtggtgccaggtctgagtgcataggtgacagggccgtgagcatgggcctgggtgtgtgtgagctcaggcctaggtgcgcagtgtggagaggggctttgtgggtgaggaccgagc

SEQ ID NO: 64131 - DNA, 682 bp, Homo Sapiens
tgtcatcgcttgaagtctgaagaggcctgggttgcgggaggagtggtctgttgaggctgccgttgcgtgccggccctcctcagactccgcctttgggagcacacctgctttgccttgctgcctgtgcaaatgttggacaagcagacacactcacactcgtccccagcttagcacagagctggagcgcccatttctggaattttccgtttgggaatctccacttctggggtttacctgttcggcctcctgtctatcagtgaggcatctctgactgtttcttctactgcttttcagttcccttccctgctgttctatttcctttgagtgtaaagactcacaggtgacctgctatcgagatagccagagggtcaggagagaatgggggaggagtcggtcaggctgctgaggaaacaccacaggctgaacgggggaggaatgcacatgccacgctgggtgtcccggattgcggggagtcagctcagctcttaggagcaagttgtgggggcttttcaagaggggccaggcttcctggagggtgactgatctggccgaagcaggtgccccacggcagataggctcaccacatggagactccctgcccccgcagtacctcatggcactctacacccagatcacacaaatagcacgcaccccactcattcccgactcccgctcatagctg

SEQ ID NO: 64132 - DNA, 490 bp, Homo Sapiens
atggactctcatcgcggcagacgggagtttctcctcggggtcggagcaggaggcacgcggagtgtgaggccacgcatgagcggacgctaaccccctccccagccacaaagagtctacatgtctagggtctagacatgttcagctttgtggacctccggctcctgctcctcttagcggccaccgccctcctgacgcacggccaagaggaaggccaagtcgagggccaagacgaagacatcccaccaatcacctgcgtacagaacggcctcaggtaccatgaccgagacgtgtggaaacccgagccctgccggatctgcgtctgcgacaacggcaaggtgttgtgcgatgacgtgatctgtgacgagaccaagaactgccccggcgccgaagtccccgagggcgagtgctgtcccgtctgccccgacggctcagagtcacccaccgaccaagaaaccaccgcgtcgaggggtttgtgggtgaggaccgggct

SEQ ID NO: 64133 - DNA, 966 bp, Homo Sapiens
  misc_feature (28)..(28): n is a, c, g, or t
  misc_feature (31)..(31): n is a, c, g, or t
  misc_feature (33)..(33): n is a, c, g, or t
  misc_feature (118)..(118): n is a, c, g, or t
  misc_feature (328)..(328): n is a, c, g, or t
ttcaaaggatgggtcacgtgctccagcngancnaatacagatcttgctttcaaaaaggtgggcgacgggaacccgctgaagctgtggaaggcttctgtggaggtggaagcaccccccntcagtggtcctgaaccgcgtgctgagagagcgccacctgtgggacgaggactttgtgcagtggaaggttgtggaaactctagacaggcaaacagagatctaccagtatgtgctgaacaagcatggctccccatccttccagagactttgtggttctcaggacctggaaaacttgatttgcccaaaggaatgtgtaccctggtgtccctcntccgtggagcatgaggaagcccagcttcctgggtggtgtgcgagcagtggtgattggactcgcagtacttgatagaaaccgtgtggctcttggcaagtcccgactgactcacatctgcaggattagacctgaaacgtcactctccacaatactacagcaaacgctttgcacatctgcgtgcaccagaagcctgccacgattacaaactctttccagcccctccttgcttaagggcccacaaactacaatctgacccctgcccattgtgacctctaattcccgaaacaccacccccaagtgcttattgtggcagacagtgtgcttgtgaaaaagcgacagaaagaggaactgaatgacgcggtttatgcctaaaaatggaaaccctcaagaacccgcaaacgttggagaatgcccccacttcccccgaccctttctttacccttccccgcgagatgggttacattaccctactaactacccctctttgaaactgaacaaccttcatatcccaccccctctaaaatccaaccggacccaattcccctggtgccacccgccctaattttgtctattctaagagccttcctcacaacgacttactccccaaattggcaaatcacactgtatgcgatagtatt

SEQ ID NO: 64134 - DNA, 952 bp, Homo Sapiens
  misc_feature (24)..(24): n is a, c, g, or t
  misc_feature (64)..(64): n is a, c, g, or t
  misc_feature (66)..(66): n is a, c, g, or t
  misc_feature (68)..(68): n is a, c, g, or t
  misc_feature (86)..(86): n is a, c, g, or t
  misc_feature (777)..(777): n is a, c, g, or t
cagggagagcgtgcccgggcagancagcctggtgcacagccgagaaaacaacagcgcgtgcgtnangnaccatctttgcgcctgcncccccttgccagtctttcgccggcaaaaggaggacgtagaaaaggggacaccggaaactcactcttcacccaggaaatggttattgaggaacatggcgttgctggtgcgagtccttaggaaccagactagcatttctcagtgggttccagtatgcagccgattgatacctgtgtctcctacccaaggacagggggacagggctctgtctcgcacttcccagtggctccagatgagccagtcccaagcatgtggtggatcagaacagattcctggaatagacatacagctgaataggaagtatcacaccacacgtaagctttctactaccaaagattccccacagcctgttgaggagaaggttggtgctttcacaaagataatagaagccatgggattcacgggacctttgaaatacagtaaatggaagattaagattgcggccctgcgcatgtatactagctgtgtggagaaaactgacttcgaggaattctttctaaggtgtcagatgcctgatacattcaattcatggtttcttataaccctactccacgtctggatgtgtctagtccgaatgaagcaggaaggccggagtggtaagtacatgtgtcgtatcatagttcattttatgtgggaggatgttcagcagcgcggcagagtccatgggggttaaatccctatatcctgaagaangacatgatcctcatgacaaatcatttctatgcagcgatcttgggatatgaatgagggatcctttccagatgatcatgggctggccgctgcccctctggagaaccttcttccacggaaaatgtgaagaccctccaactctttgaattgctggtagagtatgttgaggaacacgaat

SEQ ID NO: 64135 - DNA, 541 bp, Homo Sapiens
aatacgcactgactttcctgtttctcagtatctgccgagcgcctgtgtgcgagccctcctgggctctggggactggccgtggacatggagcggatgatgcccctcgcaggactagttaaataagtgaagttggtagcgtgtcagtccgtgatcctgggtagatagagcagggcagcgacggaagactgcctataggacattcacgctgggatgagaggggcctgagaggcctgggctttgtgacagggaaacttggttacagggtggtgcgattcttccggttggtccctcagaaggtggtggggcttggttatactgtgtagaggtgctgggctggccaggagcttacagggttacacctctcgcatactggtgtccacagagcagccatcttagctggaggtgtcgagtgcctcccccaccccccaccatgtgcttgagtgcacacccggcgccaggccctgatcctggcacttcttgtgaatcacaccgtgtcatacccatgacttccattgcacagtggggaactcggtcagaggtg

SEQ ID NO: 64136 - DNA, 676 bp, Homo Sapiens
aacagcaactaggggggttagcacttgtgctaacaatttatgagcaaaaggcttagaatttgatgatgtcctcctttacaacttttttactgattcgtgaggcttataaggaatggaagatcatttcctcattcacacctacctcaactgactccagagaggaaaaccggccattggttgaagtacccctggacaaaccaggctcttctcagggtcgatctctcatggtgaatccagaaatgtacaagctcctcaacggagagctgaagcagctgtacaccgccatcacacgggctcgggtcaacctctggatctttgatgaaaaccgagagaaacgggctcccgcattcaaatatggtcattagaagagattttgtccaagttgtaaagacagatgaaaataaaggtaagatcctgttaaaatactcttaactgatggaggaatcgtgtttctctcaactgttcttatggtcaggaataaaaggtgtggtattttgaaagtgcgttctttcttttccacaatcttctgagaaatggaagttgttacacatttgccaaggtgcatgggaaagtgtagctgtagtgggattgggaaggttaactccgtcagggaagatcttttatttgtcctttaaaagtggggattatgacagggctaagacatagcccttttgca

SEQ ID NO: 64137 - DNA, 1048 bp, Homo Sapiens
cgcttccctccgggcgcgagaagaggggatgccaggcctgagccccggccctaccgccgccgccggccatgtggcccccatgaccccgaccccgacccggaggccgagccatgcctggcggctcccgtcccggccccgcggtccccgggctccgcggccctgctgccggcgcgggctttcctctgcgtctctcaaaggccgcctcctgctggcctgagtcgggtctctcattcatcacttttatctgctatgtggcgtcctcagcatctgccttcctcacagcgcctctgctggagttcctgctggccttgtacttcctctttgctgatgccatgcagctgaatgacaagtggcagggcttgtgctggcccatgatggacttcctgcgctgtgtcaccgcggccctcatctactttgctatctccatcacggccatcgccaagtactcggatggggcttccaaagccgctggggtgtttggcttctttgctaccatcgtgtttgcaactgatttctacctgatctttaacgacgtggccaaattcctcaaacaaggggactctgcagatgagaccacagcccacaagacagaagaagagaattccgactcggactctgactgaaggcctggcgggtgccttggcaacctgagccacacaggcctccacccctgtgcctcacaggggtcgctggcgttggagcggaggcctggacttctgagttgcagagggggctgcggacacagcaggccccctacagcctcaggttctgcctgagcccaacctaccaggcttgcccctcagctcagcactgttgaccacgctgcgtatgaggggcatcttgggtatcccactccttctccccatttctgtcccacaggccttcagccctttaacgtctctgccaaaaaccagcacaagggagacaaagcagagcctttgtctgtatctggggcaacaggtgtttccatgctgctagggtgccggggggtccgggggtccttctggtttccctaaccggaaccaaagaccggaacccctggacgggg

SEQ ID NO: 64138 - DNA, 593 bp, Homo Sapiens
cgcctgggcgactctacggatcctttcgggtgacacggcgtggcggaatgtcaaatcttttttgacttttggcttaatctgtctatgcaacatgtatctctatgaactgcgcaacctctggcagcttttctttcatgtgactgtgggagcatttgttacactacagatctggctaaggcaagcccagggcaaggctcccgattatgatgtctgacaccatccttcagatctattgccttggcttcagggggataaggagggaacatatcataactgcactgtgatgaagaagctgttccccacagaggagaagctctgctttctttctctccaactttccttttttaaaatcagcatgatgtgcctgtgagcatggaagagtcctctcagaagaatgttggccatgagactatcattcagaggaggaggggatttctctcttcaaggccataacagtggaagaacagtcatatgccattggaagtcttggccagcagtcctgaatccttcctgaagagttcagacaatagatgtggtattgctctgaggaccaggcaggaggaactctacaagctgaagttggctttgtgagg

SEQ ID NO: 64139 - DNA, 414 bp, Homo Sapiens
  misc_feature (328)..(328): n is a, c, g, or t
  misc_feature (387)..(387): n is a, c, g, or t
ttgcctcttaggtctttcttaaattgttggtggatgacctgtacattttagtgatttgaaaaataactgacaaaccattgaaacagtttattttatgttggaagagatggcgcagatgtgtgtcagaagggagatcacggtgtgagtttcgtagctatttaagtgatacatacctctagtttttgtatgtcttttgagatcctgagttcatcccctgtgaatcagagtgcacaagcacctctcctgtgagtggctaatgagaagagggacagaccgaccaccagcacagtagggcagatctggacagcagaatgttataacgcaagtntcatgtgttgctcccaactccattctcttttctctcgtgcaaccagtttgcccattctnttcctattacttgctcaggggataggt

SEQ ID NO: 64140 - DNA, 456 bp, Homo Sapiens
  misc_feature (56)..(109): n is a, c, g, or t
cgtttgtggtggctgtttttgtgaaaaaaaggttaactttgctactttgatgtttnnnnnnnnnnnnnnnnnnnnnnnnnnnnnnnnnnnnnnnnnnnnnnnnnnnnnnttcagctgctgaagccagagggtgtgctggtttatagcacgtgcactataacactggccgaaaatgaagaacaggttgcctgggccctgacaaaatttccttgccttcagcttcagccccaggaaccgcagattggaggagaaggaatgaggggagctgggctctcatgtgaacagttgaaacagctgcagcgatttgatccatcggctgtgccattaccggacactgacatggactctcttagagaggccagaagagaagacatgttgcgtctggctaataaggactctataggtttttttattgcaaaatttgtaaaatgcaaaagcacataggagtagggatgg

SEQ ID NO: 64141 - DNA, 170 bp, Homo Sapiens
ctctgtctcaacaacaacaaaacacccaagaatccagaaggtattccctgattgtgtatatgagagaagcctgtaaaacacatccctttgagaaggctcagtgcagaccccaccctcactgcaggcttctctgcaggttccaacctgccctacaggtttgcctacctgaa

SEQ ID NO: 64142 - DNA, 607 bp, Homo Sapiens
  misc_feature (509)..(509): n is a, c, g, or t
  misc_feature (538)..(538): n is a, c, g, or t
gcttgaaaagatgaaatctgttaaagattcttttcgatgtccaggttaagaagaaacctccttgtattgagtgaaattatatgttaaatgtattagagaatgtaggtggtatagagattgatttttcttggtgtagaacaactcagttcggcaaagtttaaaatttgattaaacaagagaagtggttcaggttgaagatggacttgttaggaagtgatcaagtcctttaagaacttgtttctttttcaggttgtgatgtggccattccgaattttgttgagagtttggtttataattgtctcttttgtcttgttagtaaacattcatttgcaacagttttgaaggtgctgagtggaaaaccgaaacacatggttattgcgtattggacctagaatgaaataattgcctcattatttaacaacaagccattcttatctcaaagatttaaattcccgaatgtcccattcgcagatcatatgcgattgaggtgagcagcatgagcatctggntcatgagggccttcatttacgtaaatttntcactaaaacccagtagtagctctacaaaatcttaaactgctgcagtgctcaaggagatggaatatctt

SEQ ID NO: 64143 - DNA, 1033 bp, Homo Sapiens
  misc_feature (971)..(971): n is a, c, g, or t
  misc_feature (986)..(986): n is a, c, g, or t
  misc_feature (988)..(992): n is a, c, g, or t
atgatccctgtagctgtactaatgagaaccggatctatactggaacatgtacaggcttcttggcccggttatattatgaaagcccagttcggggcacagtagtcaccaatgatcgttggggagctggtagcatctgtaagcatggtggcttctatacctgcagtgatcgttataacccaggacatcttttgccacataaatgggaaaactgcatgacaatagacaaactgtcctggggctataggagggaagctggaatctctgactatcttacaattgaagaattggtgaagcaacttgtagagacagtttcatgtggaggaaatcttttgatgaatattgggcccacactagatggcaccatttctgtagtttttgaggagcgactgaggcaaatggggtcctggctaaaagtcaatggagaagctatttatgaaacccatacctggcgatcccagaatgacactgtcaccccagatgtgtggtacacatccaagcctaaagaaaaattagtctatgccatttttcttaaatggcccacatcaggacagctgttccttggccatcccaaagctattctgggggcaacagaggtgaaactactgggccatggacagccacttaactggatttctttggagcaaaatggcattatggtagaactgccacagctaaccattcatcagatgccgtgtaaatggggctgggctctagccctgactaatgtgatctaaagtgcagcagagtggctgatgctgcaagttatgtctaaggctaggaactatcaggtgtctataattgtagcacatggagaaagcaaatgtaaaactggataagaaaattattttggcagttcagccctttccctttttcccactaaattttttcttaaattacccatgtaaccattttaactctccagtgcactttgccattaaagtctcttcacattgatttgttttccaaacggnagaaggagggagagnannnnncccctgtccggccgcctccgcccttcgagaaacttttctaa

SEQ ID NO: 64144 - DNA, 1274 bp, Homo Sapiens
  misc_feature (561)..(581): n is a, c, g, or t
  misc_feature (870)..(894): n is a, c, g, or t
  misc_feature (1197)..(1205): n is a, c, g, or t
taactctagcaggatcctctgtcgctgtatcgggggatcacgagtgcacaggactggtggagcagcacagctggatggagggtcaggtgaccgtctggctgctggagcagaaggtttatgtgtggtacgggggtcaagagtgcacaggactggtggagcagcacagctggatggagggtcaggtgaccgtctggctgctggagcagaagctgcaggtctgctgcagggtggaggaggtgtggctggcagagctgcagtggcccctgtccccagtgcaccacccctggagcccggagcccaggccctggcctacaggcccgtctccaggaacatcgatgtcccaaagaggacgtcggacgcagtggaaatggatgagatgatggcggccatggtgctgacgtccctgtcctgcagccctgttgtacagagtcctcccgggaccgatggcaacttctctgcttcccgtgcgggctgcgacccatggaaggagagtggtgccatctcggacagcggcagcagcactaccagcggtcactggagtgggagcagtggtgtctccannnnnnnnnnnnnnnnnnnnnaggccagccccaagtatttgggggatgcttttggttctccccaaactgatcatggctttgagaccgatcctgaccctttcctgctggacgaaccagctccacgaaaaagaaagaactctgtgaaggtgatgtacaagtgcctgtggccaaactgtggcaaagttctgcgctccattgtgggcatcaaacgacacgtcaaagccctccatctgggggacacagtggactctgatcagttcaagcgggaggaggatttctactacacagaggtgcagctgaaagaggaatnnnnnnnnnnnnnnnnnnnnnnnnncgcaggcaccccagtccctgggactcccacctccgagccagctcccacccccagcatgactggcctgcctctgtctgctcttcaccacctctgcacaaagcccagtcctccggcccagacattctgggccgggagtcctccctgcccctcaggggctctcagcaagtccgctcctggggtcttctgggaacattccgggcagatcatgcataccagggctctggcctcctttccagatcccagtctcaccacacatcttaacccagggtccactggggctgctgtcccccttcgccgcctggnnnnnnnnnccgggtccgggaaccggtcccttaaactttcagcggacccccatcaagcaccaacctggcaatgaatat

SEQ ID NO: 64145 - DNA, 1204 bp, Homo Sapiens
gggggcagcgaggcgccgctcccgccgcctcagcccggccttcctcggctccggcgctccggtcgcggggcccgggttcctcggcacaccccgctccagccgcccccagagcctgtccccagcccttcggaagccccggcgccagcccgggccctcggcagggaggatgacggagctgcagtcggcactgctactgcgaagacagctggcagaactcaacaaaaatccagtggaaggcttttctgcaggtttaatagatgacaatgatctctaccgatgggaagtccttattattggccctccagatacactttatgaaggtggtgtttttaaggctcatcttactttcccaaaagattatcccctccgacctcctaaaatgaaattcattacagaaatctggcacccaaatgttgataaaattggtgatgtgtgcatttctattcttcatgagcctggggaagataagtatggttatgaaaagccagaggaacgctggctccctatccacactgtggaaagcatcatgattagtgtcattttctatgctggcagaccctaatggagactcccctgctaatgttgatgctgcgaaagaatggagggaagatagaaatggagaatttaaaagaacagttgcccgctgtgtaagacaaagccaagagactgcttttgagtgacatatatttagcagctagtaacttcacttatttcagggtctccaattgagaaacatggcactgtttttcctgcactctacccacctattgctggacttctgttgtacaagttggcccacactggctggaactgggctgcaatacaacatgccagttatcactgctgaccagagcctaacaagtgccaacttacagatgattacgcattttgaattctaatgaactgttttaaccttcaggaagaattgtaaagacctgtacatagcacaacatgatccggataatatatatactgttcatgtacatccacaaatacaccttgtaccaaataatgctttcttgtagtagaataagaatcgtgtaaattctaagagattttagcaggttttctttcctattcattgtttcttatcagtttaaaaggattcctttaagcatgtcagatgaaaagcaattaggattaaaagtttccatttaatttcccttaaacccttgaggcttcattaaactcttttcacttacta

SEQ ID NO: 64146 - DNA, 431 bp, Homo Sapiens
ccggcagttattagaccagttttaaattgtcaatatcacagtattacaggtgctatttttttcagtgcttaccactaaactgttgtgcatggtgctttttaactttcatcgagtcaaggatgttcactgtctgttatctgaagactatgaagacttctatgctaaccgaattaaaatgtacttgttgatctctgaatagctcacttcttacaatgtacaaattcctcattctgtcaccttttaaacattgttttataatgcaggtgttggatttgctccagtatgtgtaccatcttgtaaattcatttgagtagatcatgtttacttcccagtggaaggagcactgaaaacctcttaaagaaaaagcatttgtgtgttttccttgaactgtctgtatcaagacgtgttacttcgagatatccattcacttt

SEQ ID NO: 64147 - DNA, 1213 bp, Homo Sapiens
  misc_feature (100)..(108): n is a, c, g, or t
  misc_feature (428)..(523): n is a, c, g, or t
  misc_feature (657)..(707): n is a, c, g, or t
tggaggaacgcgtcgagccctgatctggacgcagcggtttgtccccccggatatgctccccctttgggacattgaggctcttcaggcaacctttcgtttnnnnnnnnntatagggggtgccctgtgcaatgaccggtgtagttggccccagcaaaatttgggccctcaaggggcttatggggagagtctggacggttttaatgctcccccttgggggtccaggggatcaaccaccccgtttccccgaacccctcttaattttgccctagagacgccgagccccctgtcctgcgggagccgttttgggggcgatctcccctggccttctttgcccggctcacattagctgtgtgccaggcactggggctgggcgcatggcacgcattgtgccacctgctgacctagctgctgaagtgttggtattgttnnnnnnnnnnnnnnnnnnnnnnnnnnnnnnnnnnnnnnnnnnnnnnnnnnnnnnnnnnnnnnnnnnnnnnnnnnnnnnnnnnnnnnnnnnnnnnnncttgtagcctcagatggatttgggagggctgctccggcaggaacccgcgtttcaaatgttctggttatccccagcgccctttccgcctcacttcccagcgcagcggtgctgctcgcggtcgggggccgggacgnnnnnnnnnnnnnnnnnnnnnnnnnnnnnnnnnnnnnnnnnnnnnnnnnnnccgccccctcccactcgttgctctccggccagcagcttgagcctgatcgagtgcggcccagtgcacaccgccttcatggagaaggtgttgggcagcccagaggaggtgctggaccgcacggacatccacaccttccaccgcttctaccaatacctcgcccacagcaagcaagtctttcgcgaggcggcgcagaaccctgaggaggtggcggaggtgagcgccgggctggactccaggagtgggggcggtgcgtcctccggcgcgcagcggtggccacagctctcctcccgccgccgcaggtcttcctcaccgctttgcgcgccccgaagccgaccctgcgctacttcaccaccgagcgcttcctgcccctgctgcggatgcgcctggacgaccccagcggctccaactacgtcaccgccatgcaccgggaagcgacgcgtgggttcgacgatatcccgggaattccgaccgtacagctgcttttttacactggtatagtacaagcc

SEQ ID NO: 64148 - DNA, 389 bp, Homo Sapiens
gagtcaaacctcacaagatttatttagctatcaagcattatatagctatataccacagaatgatgatgagttggaactccgcgatggagatatcgttgatgtcatggaaaaatgtgacgatggatggtttgttggtacttcaagaaggacaaagcagtttggtacttttccaggcaactatgtaaaacctttgtatctataagaagactgaaaaccatggagattatttttattggaggaggaagcatcattcatgaaccgatctttttagttgagtcagtaggaaaattaatacagtggattaagtaagaagcgaaagacagggacagagaagtgttgtgtttaaaacccaagcctgtctaaggttactgtgtattagacagggccga

SEQ ID NO: 64149 - DNA, 539 bp, Homo Sapiens
aggtaaatatacataccaatgagacaattaaaaattggttggaagatggagcttatcacattgtgctactacgactttattttttcttgaaaataaagccttgaggatgtgaacataaatgttggtatcataaaacaagtagtaataaaagcataaattatcaaatatcaggtgatcttactatggagaagaaaaaccaatatctagttacagatgaaaaaatgtttaatacaaagagctgaaaatgtagaaattgagttatcttccctttgcaaaatttttacactttaaattagtaattctttgtttgcaaggttttcatccctatgctgttgttttctactacctgttttactcttgttcatactgctactttcccatgtttcctatatgcctcccctatattggagaggataactcgcgtttacatatgtgatagttatgcttaatactaattcacagagttggctcgatcattttgagattctagttgctttatctcaaagctttcactaactgtccgaacgggactcctctag

SEQ ID NO: 64150 - DNA, 822 bp, Homo Sapiens
gtcgtgctcctggcgttggtggcgggtgtttaggggaacgagtttagtatattaaaatcaccagggtctgttgttttccgaaatggaaattggcctataccaggagagcggatcccagacgtggctgcattgtccatgggcttctctgtgaaagaagacctttcttggccaggactcgcagtgggtaacctgtttcatcgtcctcgggctaccgtcatggtgatggtgaagggagtgaacaaactggctctacccccaggcagtgtcatttcgtaccctttggagaatgcagttccttttagtcttgacagtgttgcaaattccattcactccttattttctgaggaaactcctgttgttttgcagttggctcccagtgaggaaagagtgtatatggtagggaaggcaaactcagtgtttgaagacctttcagtcaccttgcgccagctccgtaatcgcctgtttcaagaaaactctgttctcagttcactccccctcaattctctgagtaggaacaatgaagttgacctgctctttctttctgaactgcaagtgctacatgatatttcaagcttgctgtctcgtcataagcatctagccaaggatcattctcctgatttatattcactggagctggcaggtttggatgaaattgggaagcgttatggggaagactctgaacaattcagagatgcttctaagatccttgttgacgctctgcaaaagtttgcagatgacatgtacagtctttatggtgggaatgcagtggtagagttagtcactgtcaagtcatttgacacctccctcattaggaagacaagg

SEQ ID NO: 64151 - DNA, 449 bp, Homo Sapiens
ggtcacgaaggcacatcgtcatgttaataaagtctaacacatcattcgtatagaatatcttaattttcctgtattctcctttagacccacgtacacgctgaccaatgtgttctatatgtaaactcacaaagtcttatggtagctttgttgtatattcttgtaaaattattgttaataagtcatggggatgacaatttgattattaccatttagttttcagtaatcacaaagatttctatgaattctaaaaaatatttttttctatgacattactagtgcccagctgtagaatctaccttaggtagatgatccctagacatacgttggttttgagggctattcagccattccattttactctctattttaaggccgtgagcatagcttgtcatgagctaatatgtcaagggagtcaatttactgaccaatccaagtacactaaatccccg

SEQ ID NO: 64152 - DNA, 619 bp, Homo Sapiens
tccggaaagcctgaacagccagccaccctcaaggcgtcccagcctgaagcagcgtccttgggcccagagatgaccgtcctatttgcccaccgaagtggctgccactccggacagcagacagacctccggagaaagtcagctcttgccaaggccacaaccctggtgtccactgcctcaggcacgcagaccgtgtttcccagcaaatgaacctacgggtggcttttcctagaccccaaagaggtgaacttgcatttaaatacagtctgcctccactgagggcatcctgccattctttggggacttgagcatgggcccttgttcttcctatttcacctccaggaaagcaaaagtgggagcagaaattcctgccctgggtgggaggatagatggcgtggccttccaaacatacaaacataatgatttgatgccacaaagctcacttactcagaccaaggagtgaaaaattgtcgtgcccactttatgccccagcatggagtatgtggcctcttgtcatctccgtgttactgtgtagaatttctatggtgtcctaaagggggctgcagcaggggtgtgacaacggtgggattgttggcgttgcttctttgaccttacaatatcc

SEQ ID NO: 64153 - DNA, 355 bp, Homo Sapiens
gtatagattctctgttctgtgtgcttgtgggacccagcttcaccctgatcttacccttgtcatcaatcactgagacatctttttaatgtaactcttctttctctccctgcagactcccctgcaatccctgttccacgcttgcctcctgtacttcttgtccaagctgtggccctgtcaccggtgggtctccctctggccatggagccagcatggggagatgattctgaaggcccgagttaggagattgaggctggttgcactggggtcagtgagtgccctcaccttgcccagtcttccttcaagactagactcactgaggcattttccctaaatcaaccggtagcatacgttcaag

SEQ ID NO: 64154 - DNA, 302 bp, Homo Sapiens
agcctgccctctctcacgattgctggtgctcctggcttgcctggtgcccgaggcccctctggaccccagggccccggcggccctcctggtcccaagtgtaacagcggtgaacctggtgctcctggcagcaaatggagacactggtgctaagggagagcctggccctgttggtgttcaatggaccccctggccctgctggagaggaaggaaagcgaggagctcgaggtgaacccgacccactgcctgcccgaccctggcgaggctagacgggatcctctagatcaccgcagcagcagctgcgc

SEQ ID NO: 64155 - DNA, 542 bp, Homo Sapiens
gccggctgggatcttagataggaggggtggatttgcaaggcctagaatagctggggagtggtttccccgcggaatcggcctccctgccgctcctgctttgtactgtgacgctcagcctgtgatgactggtgtggaatccgctgagccaccttggcctaaggagactttaccactctgagattgtaaatctgtaaaatagagatgtaggattagcccatacggtagttgtggtaaatactgtgagacaataaggggcctgggacacagcattcaaatgggaataatgaaggtcaagactgtgattcctgtatctttgacgctctcggtataagcaccgtcgtgggcacagggcagtggcctttatgcaggagtttaagagggaatgaaggaatgaatgggcaaactctggagttcccaagtattctctccaggagctgtttccattcttttcgtttccagcaggttggtaaattcattaatttattcattgatctaattaaaatatactaagtgcccctcacctgtgctaggccaatgtgata

SEQ ID NO: 64156 - DNA, 872 bp, Homo Sapiens
tttttttggtttctcacaatgcaggcgctccagctctgacacgtgcacttctttattggaaaagaataaagcagtcactgatgtggcaggggcaggacacgagcagctgccgtcctcctcccagcgtgcctggcatggtcgcaggggagcgggtgcctggagtcccggtgacaccacggggcacactgagggagctgaggagccggggccgcgcagcctcctggatgctcagcggatcgtgtacttgtcccacttcttttcagggtcgtagggttcccagcggctggcgggaaagatgtgcttgttcttctcgtaccagctcctcagcaccaccttgcctgcatgggactcatccttctccacagtggcgtcactgagcaaccgcacatcgtcatgaacatcaaagttgaagagtggtccactcttcccccgtgccttggtgacgatgaagtcgtagaagctgtgatggtgagggatgatcaagtcctccttgatgtacatgagctgctccacccctgcggacctcagctcactgaagtctttccgaaggatctcgagcgccttctgcaggaactgctgcatggtgttgccctttctcatcttgactgtccgccggtgcccagagccatcccagtagctgaaggtgatctcgatctcctcactcttgatcttctcctgcttggcttcccactcctgccgcagctcttcccgaagccgattctcctcctcctcacggtctcgatcaggcaagaagcttgtgtcaacgtctgggttcttccccagttttctcttcttcgtggtgatctcttccctttccatctcctcctcatacatggccgcctcctcttcctcctcgcctccctcttcttccc

SEQ ID NO: 64157 - DNA, 1182 bp, Homo Sapiens
  misc_feature (504)..(568): n is a, c, g, or t
  misc_feature (1058)..(1058): n is a, c, g, or t
atgtttcaagcaaagatagtaatgacctcagtttctgaaataagggcatcttcatcagattattcttctgttttaaaaaaaagcttgaggcaaatgtgagtgatttccagtgctttgaaagggattacagtatcacacaatgtcaagctagagttaaacacagtattagctaaataggcacttatgtgtattttctttttcatgattatcggtgactggtcagtgtactcatcgatttccaaaatttgtataaatatcacaattagaaaaatgcctgaggtactaaagttatgttggctttttgtgtcttaacacacataaatactattgttattgcagcagatgccttttgaatccattttccataattgcggatagtcataaattgcttgctcaatttttagtaattattgctgttgacaccagcgttgtagatttttggtgttgttgaatgcagtagagagaccaagacactattctgtaagatcaataaaagtaattggnnnnnnnnnnnnnnnnnnnnnnnnnnnnnnnnnnnnnnnnnnnnnnnnnnnnnnnnnnnnnnnnncggacacagacaacagacgcgcaactgacacctataccacgaacatcagcgcatgctccccccagagacaaacccgccgagacccggtccgcggagtacagtgcgacccaccggacccgccaggcaggggtaggcccagcgcccgaataccgcagccccgacgccacgcatacaaggcaaaacgcgtgcgctgggctcccgccccctcccccctcccacgaaggccctcaaaagacacgccatgttgggccgcgtgccccgcacaagacaagaggaggcccaccagccgctcctccttctgttctcgtgcacaatacatcgcccgtgtagcgacgcctgttaggtcgcttcccctccccgcaccaaaataaaccaccccgtgggccggccaaccaccagtggcgctagacaaccaaccgatccgcggacgtcagccgcggcggcgattccgtcggccggcgtccgtgcgcccgcgctggccgcgctccgnagaccgtcgactccgtgtaaatacacatgcccccgccgcctcgctctgctgcctagtttcgcgcccgagggtgtgtgggggagtacgtgacactcactcgtactgcgcttgctgaccctgcgca

SEQ ID NO: 64158 - DNA, 449 bp, Homo Sapiens
tctaggtgggtgcctgtgatggttcattgtaggtaaggacattttctctttttcagcagctgtgtaggtccagagcctctgggagaggaggggggtagcatgcacccagcaggggactgaactgggaaactcaaggttctttttactgtggggtagtgagctgcctttctgtgatcggtttccctagggatgttgctgttcccctccttgctattcgcagctacatacaacgtggccaaccccagtaggctgatcctatatatgatcagtgctggtgctgactctcaatagccccacccaagctggctataggtttacagatacattaattaggcaacctaaaatattgatgctggtgttggtgtgacataatgctatggccagaacatttttcatctttccccttgcggtactaatctattggcgcacaaggagggcgtcacagtgct

SEQ ID NO: 64159 - DNA, 530 bp, Homo Sapiens
gtgaggtgactctagaggattcgggcattctggactggaagcgggaggcttctgccagctgttgcagctcatgaagaacaagcactccaagcaggacgagcccgacatgatctcagtcttcataggcacctggaacatgggaagtgtaccacctccaaaaaaacgtgacatcctggttcacatcgaagggtctggggaagaccctggacgaggtcacagtgaccataccccatgacatctatgtctttgggacccaggagaactcagtgggcgaccgcgagtggctggacctactgcgcgggggcctcaaggagcttacggatctggattaccgcccgattgccatgcaatcactgtggaatatcaaggtggcagtgctggtcaagccagagcacgagaaccgtatcagccatgtcagtacgtccagtgtgaagattggcatcgccaacaccctgtgggaacacgggggctgtgggcgtctccttcatgtttaattggccctcatttggcttttttggtcacctcgggta

SEQ ID NO: 64160 - DNA, 499 bp, Homo Sapiens
ttgaaatgggcacagaaatttcctggccgctgcccacaactctgctgatgagcccggtccaggagccccagccccccaggtgcttggggctgcagacaagcatggtgatcttcgtgaggtgaccctcacctcctctgcccaaggagaggccagggaggatcctctccttgacaagcctactgcacagccgatcgtgcaggaccaccaggagcacccaggcttgggcagcaactgctgtgtgccattattttgttgggcttggctgccaagaagaaggagataaacatcaccatcatcaaacagctgctcaagaaatttttaaataagaaaccaagttatggggttaatctcctacacaattcatttacttcctttgaatgttagactcactcatgattatttgtgtttctaatttatagtttaagtttatttgtaaaaagttaaaagagagtgggtgtctgtggctctcactgagttcactctggctcctttagctttt

SEQ ID NO: 64161 - DNA, 486 bp, Homo Sapiens
tgatcaggcaggacaatgagagcctcttgggccacgttccacacggctagctgcaattcgaagtcacttttggccgccctcccggctccctgccgcggtagtcgcagactacacccctttcgccgctccgcgattgctccttgttgccgctccgcttagtggccgcgtccattccgcgcggtgtcccgattttaggggtagggagaagtgtcagcttcaggcatcgcgaggcgtggcgggcccatggccccgctgggaggctgccccgcggctggtactgctgttcagcggcaagaggacatccgggacggacttcgtgaccgaggcgctgcagagcagacttggagctgatgtctgtgctgtccctccggctctctggtccactcaagggaacagtatggctcagggagcatggcctttgaaacttcccaaaaggactccctgggaccccccaagcacccttaacaaggggagggggcccttttt

SEQ ID NO: 64162 - DNA, 692 bp, Homo Sapiens
ccacgcgtccgctcctcaccgcgcgagcgcggggaaccagtagccgcggctgcttcggttgccgcggtcggtggtcgttatggattctccatgggacgagttggctctggccttctcccgcacgtccatgtttcccttttttgacatcgcgcactatctagtgtcagtgatggcggtgaaacgtcagccgggagcagctgcattggcatggaagaatcctatttcaagctggtttactgctatgctccactgttttggtggaggaattttatcctgtctactgcttgcagagcctccattgaagtttcttgcaaaccacactaacatattactggcatcttcaatctggtatattacatttttttgcccgcatgacctagtttcccagggctattcatatctacctgttcaactactggcttcgggaatgaaggaagtgaccagaacttggaaaatagtaggtggagtcacacatgctaatagctattacaaaaatggctggatagtcatgatagctattggatgggcccgaggtgcaggtggtaccattataacgaatttttgagagggttggtaaaaaggagattgggaaacccagaagggtgatgaaatggcttgaaagatgttctttaccctgccaaagggtaaccctgcctggggggccaggttaatctttccccttttcccaggcc

SEQ ID NO: 64163 - DNA, 822 bp, Homo Sapiens
  misc_feature (394)..(431): n is a, c, g, or t
ctttgctagtcaggatgtgaactgctatgcaatctcctgttcccaaccttaactatacacatgcattaacacacacaccatatagatacacaaacatgatagtctatttcagctaagttatattctctactaacaccttaaaagctgttaaaaaagaaataatacaaatggaaatctggtaccaagatttctttatactattcatatttgactaaatatccctaatttttggtgaatactagaagaaaatattttaaataaacagtataatttatctttcagataactggaattttattatcctgaggtatataggtggtaacttatgaggtataatctaatctagagacaaaagaataaactaaatccataatttaaaaaatggcaattcacnnnnnnnnnnnnnnnnnnnnnnnnnnnnnnnnnnnnnngcctagcctcagagacttctagtaacatcatatagttagtaaaggggacagctggttttcaagtaaaggtctgtttgattttttctattatagaaatcctttcccctttcttaatgtctcttgggtagattaaggatagagatctctcatccttatctctctcctaataaccagattcccaccagttttcactgatttttaccttcttgaaatttccttaatctaaccttgctctccaagccctcctgaggtcatggtcatctgtcacttggatattgcagcagcttcctaatggtttacttctgtcttatcccaacccattgttcacatactgcttccagaaggagcttccaaaaatcagatttattttcgtctctcgaagacagattag

SEQ ID NO: 64164 - DNA, 457 bp, Homo Sapiens
ggctacaccatttgggtaatctagcaaatgaagtatttttttccctcttggcaacttgtgtcagagttactctggtctgagtcaactttcgctggggaaaacctatggaacctactgcaaaaagattgtccaaaatgcctaagaaaatactcctctgatgcatttagccttcaaccctacctgtcttgctgaagggagaaaaatgttttagtacattataggcccagcagcttttattcatgtccaccagctagttgcacagagaatcatgtgtacctaactaaggatgatctaggataagtaactcctgttttatattgagtattttagggaagtctttaaaagacttgttttatatctataaatctaggttattacaaatacaagaattttgtaccttaaataagcctcatttctatttcttcttcattaattctccatctagtcttgtgaaaaa

SEQ ID NO: 64165 - DNA, 485 bp, Homo Sapiens
  misc_feature (120)..(205): n is a, c, g, or t
ttttcgtttgtttctttgttttaagatggagcctgggtgacaaagtgagactctatctcaaaaagaaattaggatcaacttgtcaatttctacaacaacaacaacaaaaacccctgttgnnnnnnnnnnnnnnnnnnnnnnnnnnnnnnnnnnnnnnnnnnnnnnnnnnnnnnnnnnnnnnnnnnnnnnnnnnnnnnnnnnnnnnacaaggtctgtcttcctaggtattaatgttttgtcttctatttctcttaataatcttttgtagttttcagtgtacaggtctaccatgtcagcatttcatagttttgatgctaaatggtattttaaaatttcaaattctaaccacttgttgctagtaaatagaaatacaattgatgttgaacttgtatccttcagccttgctaaactgtgagttctcatggtgtttttgtaaattacatcaacagtcatgtgttctatgaataaagagttttactccttcc

SEQ ID NO: 64166 - DNA, 1712 bp, Homo Sapiens
  misc_feature (443)..(443): n is a, c, g, or t
  misc_feature (1083)..(1083): n is a, c, g, or t
  misc_feature (1500)..(1500): n is a, c, g, or t
  misc_feature (1547)..(1547): n is a, c, g, or t
  misc_feature (1610)..(1610): n is a, c, g, or t
aacttagtggtgttcagagttctttagtgcccttgtcattaatacggccatgcttctcttcaaaccggccccaattaatatccttgatgagttagatccaccctgggatctttctcatacccaaaacatggaacagatgctgcgtactcatttcacacattctcagttcattgtggtgtcactaaaagaaggtatgttcaacaatgcaaacgttcttttcaaaaccaagtttgtggatggtgtttctacagtagccagatttactcaatgtcaaaatggaaagatttcaaaggaagcaaaatccaaggcaaaaccacccaaaggagcaacatgtggaagtttaaactacaaagttatttcttcatcttgacctgtttttttaaatgtaaacttttaaggacttgagataactaatttgtttatatacaaaaattaatgttacntgtgttacttaacccatgttttctctttatataatcacttatcgcttacaaatgagcatatattcctcatctcttaactagtctaattatggtccaattattgcggttgtgattttatgcatatcatcaaatgtttttttcttatgcgggtcttttatatattagggatcctgagatacccgattctatatgtcaaagctaatatacaaaaaagcagattaaattacatgatagatgtacccgccaaacaaagggaaccgccgcgaaagccgacaacgagcgagacacgcaccggccgtagtaagtattggtcgcgcgccctccgcccctcaaaaacttttcaaaaccgttcatttgggccgggcggcccccggtgggaaagcggaacagggtcctaacgcgggttcccgagggaaaacccgcggcaccggaatcaagggcctgggaattcccgcacaccaaaaaaaagacgcccccggcgggcacaacgataaccgtggtctcggaaacacaatacccccgaacgcgggaagtccctggaggaggtgccgttcgtcgcgggacattctccgccccggcgcaggagaaacggtcccgagaggccgcacgatctctcgcgatatagttctaccagaaattnattaagtgcccgccgcctgcgatcgtctggtgtgtgtcgagcgaggtacccctgtcgccggcgacacaaaaataaaccgtgcgggtatagcgcgggcaaaaatcctcgcacccaccccttgatacacgagtgcagcgacttctttctcccgatcgccccccggtggcaacaataatggacggggcggaaaaacgctcacggtcccccaccctacataaggttgggcgctcgctctttgccgccgcgtgccaccccccccttttataaatcaccccgcaccgcacaagccggcgggggcgctgccgcttgatcatcccccccctgttgtttttggcgcccccttttccgcgccgctaacgcataaatttctctctgcgcccgccgctcgtaccgggcgaaaacagatatccggggggntgtataagacaagaagaaccgctgcgcgccgccactaatatgggcgncccacacgtgctgtatggcgcgtaccgaaagaccccggcggggggaaagtatcttccccccgncgtccggttgatctacggcgctttccactgcagcagaccacccacctgtttttcctcgcacaagataaacaggtctactgatcgggggacaccaagagcggc

SEQ ID NO: 64167 - DNA, 781 bp, Homo Sapiens
  misc_feature (236)..(236): n is a, c, g, or t
  misc_feature (550)..(560): n is a, c, g, or t
atccacgtgccattgtggggagctgaagaaggaaaaggggattcacagactggaggccatgctttatgcaattgaccagattaacaaggaccctgatctcctttccaacatcactctgggtgtccgcatcttcgacacgtgctctagggacacctatgctttggagcagtcttctaacacttcgtgcaggcattaatagagaaagatgcttcggatgtgaagtgtgctaatggagnatccacccatgtttcaccaagcccgacaagatttctggcgtcataggtgctgcagcaagctccgtgtccatcatggttgctaacattttaagactttttaaggtaggtaaaggcatgtctttctgaccattgtgaaagaacaatgaaatgctatgactcctactgcaggtttaagaagaaagtgaagatggtgaaggtgctcatagacccttttggtgttaccaggttcctcaaacgggacattctatatggggcattctacatgtattggtttagttccattacttacaattaactggattaattttgactcnnnnnnnnnnncccggaacaaggagaagggtgaaaagtccggtgatatatggggtcctggtcatctggggataacctcttggtaaggcctcatttaaattaaccaagcattttgaagagaataggaacatcagcgcatttatcagggaaaacattctagggtaatgggagctatttaattacggagtgaaccttctaaaggggggagtggcggttatgacaaaggtggtcct

SEQ ID NO: 64168 - DNA, 352 bp, Homo Sapiens
ctagatgctcgacagaatctcaataacagtatgttaatttctcaaatctctgaggctgcggagttcacacattgaaatctgtcatctttttcagagagaaactttcggtaatgtatgttaccttctgtaatggaagatgattgaagacaaggggcctcgtgttgctgactactttgttgtagcaggattaactgatgtttcaaagcctctagaagaagaaattcacttcaatgatgcttgtcataaagtagctaaaccaaaagaacctattacagatgtttcagttattatcaaatctcttggggaggaagtcccacaggattatatctgtattgatgttaccccaactgga

SEQ ID NO: 64169 - DNA, 161 bp, Homo Sapiens
ccgtttagggttgttgggccttcctgcccctaagaatgattttgaaattgttctaccagaaaatgccgagaaggagctggaagaacgtgaaatagatgatacttacattgaagatgctgctgatgtggatgctcgaaagcaggccttacgagatgcagagc

SEQ ID NO: 64170 - DNA, 633 bp, Homo Sapiens
aatgtggaagatgacatgatgatcactttccagatatcacagacagatctttttggtaccccaatgatgtatgatctaaaggaaaatggtgataaaattccaattacaaatgaaaacaggaaggaatttgtcaatctttattctgactacattctcaataaatcagtagaaaaacagttcaaggcttttcggagaggttttcatatggtgaccaatgaatctcccttaaagtacttattcagaccagaagaaattgaattgcttatatgtggaagccggaatctagatttccaagcactagaagaaactacagaatatgacggtggctataccagggactctgttctgattagggagttctgggaaatcgttcattcatttacagatgaacagaaaagactcttcttgcagtttacaacgggcacagacagagcacctgtgggaggactaggaaaattaaagatgattatagccaaaaatggcccagacacagaaaggttacctacatctcatacttgctttaatgtgcttttacttccggaatactcaagcaaagaaaaacttaaagagagattgttgaaggccatcacgtatgccaaaggatttggcatgctgtaaaacaaaacaaaacaa

SEQ ID NO: 64171 - DNA, 1753 bp, Homo Sapiens
  misc_feature (516)..(525): n is a, c, g, or t
  misc_feature (798)..(811): n is a, c, g, or t
  misc_feature (819)..(861): n is a, c, g, or t
  misc_feature (1000)..(1274): n is a, c, g, or t
  misc_feature (1556)..(1556): n is a, c, g, or t
  misc_feature (1727)..(1727): n is a, c, g, or t
gtcatttgtattcagagtaaatcagtggtccacccccataaaactgtaagacaagcctcctgtatgaagccagaatcacaagtgccttcagagggcagttgattccagtccagttgcctccctagcttgtgtgtggcctgcctccaccatagcagggacttgggagggaaggcagggaacgttttttcttttctacatcttcacaggttcggctgggggcagctgatagcctaaggccataccttactatttaagatactctgatcgcacaactgcagagacagggttccctcactgctagtcagcttcttttggaaactggacaggccattgccacctgcactttgaagaagtgagcaaagacgtggccacatttctaataagttgaaatggtctttctcccttcctcagagagcaaccagcttcttttttttaaaagtcctttctatctgttggatacaacagtgtgcttttggtgcacattttttagcaatagttgtgaattaatggcaaagnnnnnnnnnnttatttaccagccctcagttgtgtttcgccgaggggcctttgagcaaagaaatgggttttgctgggtcattttgccctgtgtgctaagccttgggtggctgcattcccctcctgtcatagatgtgacccccagcatgattgtatttctttcccctccagtcaaaccgtaatacagtttccagaaaattcgacagtctgcaatgccaaaagggtaaaaatctgtatttcacagttgtatagaataaaggctttagttacaccacaacaccccgnnnnnnnnnnnnnncctctcgnnnnnnnnnnnnnnnnnnnnnnnnnnnnnnnnnnnnnnnnnnnacacaaaaaaatttcttcttttacaaacccccactctccccttactcctggacacctcttcccgccgcaatcccccccgatataagagcgctataaaaccatatccccccgcccaacccatttgccctccccgtctttnnnnnnnnnnnnnnnnnnnnnnnnnnnnnnnnnnnnnnnnnnnnnnnnnnnnnnnnnnnnnnnnnnnnnnnnnnnnnnnnnnnnnnnnnnnnnnnnnnnnnnnnnnnnnnnnnnnnnnnnnnnnnnnnnnnnnnnnnnnnnnnnnnnnnnnnnnnnnnnnnnnnnnnnnnnnnnnnnnnnnnnnnnnnnnnnnnnnnnnnnnnnnnnnnnnnnnnnnnnnnnnnnnnnnnnnnnnnnnnnnnnnnnnnnnnnnnnnnnnnnnnnnnnnnnnnnnntactacagctgatatagtctctcatgcaccccgcccctcttatacccgcgatcacctttccccccctatttctcttttctcgcccgatcttacgcccgctcgcccgcgcctttccttcttatcgcgcgtcccctcgttgttataccgcgcgggaaataccactgagcgtctcccgcgccgcgcgtcctatatcccactccgtgaacccaaactccactccttatcgtcgccttcgtgattaagccgccgccccgccacgccgcataaatccccgcgcgcatncatcatttacccctttattaagcccatcatgcacccgcagagtatagcctcccaaccgcgcccccctttattacaccacccgcccacccgcctcctcgattgcacccccatccttgcgccgtatattgacaccgtattcacctatggactgaagcgagataccccctagcntaataccaagagccctcatcgccgct

SEQ ID NO: 64172 - DNA, 287 bp, Homo Sapiens
gccggatggcgtaggatcggccgctggtggtggtgataccgggtacccgggctatggcgccggcgcagcgctgccctctgtgccgccagaccttcttctgtggtcgcgggcacgtttacagccgcaagcaccagcggcagctgaaggaggctttggagaggctcctgccccaggtgcggaggcaaggctagagatgggatgggagtgcggggcaggtcagtgaaggccagagcgggtgtgatttgggggtccccctcggtgttctacttggcctctagcgcacccgg

SEQ ID NO: 64173 - DNA, 453 bp, Homo Sapiens
tctggctcccgaggtccaccccttataccccaaggtccagatggcggccaacgtgggtgatcaacgtagcacagattggtcttctcagtacagcatggtggctggggcaggccgagagaatggcatggagacgccgatgcacgagaacccggagtgggagaaggcccgtcaggccctggccagcatcagcaagtcaggagctgccggcggctctgccaagtccagcagcaatgggcctgtggccagtgcacagtacgtgtcccaggcagaagcctcagctttgcagcagcagcagtactaccagtggtaccagcagtacaactatgcctacccctacagctactactatcccatgagcatgtaccagagctatggctccccttcccagtatgggatggccggctcctatggctcagccacaccccagaagccatccgccgtcccaaggcacag

SEQ ID NO: 64174 - DNA, 464 bp, Homo Sapiens
  misc_feature (45)..(307): n is a, c, g, or t
aaacaaggacctcttccaagaagggctcccaggcctggcgcggtnnnnnnnnnnnnnnnnnnnnnnnnnnnnnnnnnnnnnnnnnnnnnnnnnnnnnnnnnnnnnnnnnnnnnnnnnnnnnnnnnnnnnnnnnnnnnnnnnnnnnnnnnnnnnnnnnnnnnnnnnnnnnnnnnnnnnnnnnnnnnnnnnnnnnnnnnnnnnnnnnnnnnnnnnnnnnnnnnnnnnnnnnnnnnnnnnnnnnnnnnnnnnnnnnnnnnnnnnnnnnnnnnnnnnnnnnnnnnnnnnnnnnnnnnnnnnnnnnnnnnnncaaaagaagggctcctgtgtctacgtcatggtggggctagagagaggtccccgcagctgggctgtgttgagtgagggctcgtctcttcagcgccaggcaatagtttgtcttgtctctgtcccttttctgtgtccacatgacactttacatcttgcga

SEQ ID NO: 64175 - DNA, 394 bp, Homo Sapiens
catcgctgcaaccaaataagttcccacccttggtgatccaagctcagtcccctgccaccttccctagtgtcttgtaccatcttcagtgggcagaacttggccagaaaaaggagcccaaaggaaggacaaggcagaggagggtcagcctggcctgacatctgactttgttccatgccctggccccttcttgtccccaggtgtgaaggttgtcacccttcactacttggcctgtgtatgtatattagaatgttgggaatgcactgtggccctgtctcccagcctgggctcaatgcttattttccttggatgaaagagccagagacatacattctctgacacacctaaatttgtaaggcggcaaagctgatgatacaaacacggggtgtgggaggga

SEQ ID NO: 64176 - DNA, 446 bp, Homo Sapiens
aaggatggacaccattgggacgggtgtaggtctggcattcacctcacgtatctggggcaggatgctctaaggaggccgcccccttcagcccttccccttcacctacaggttggtcgtctccatggctctgttcccgaacctgtctcgcttacctggagtctcgggactcctcgggcacccgtgggctgccacccacagactatgcccacctgcagcgcagcttctgggtcctggcgcagaagggtaagtgcctgctgggaggggctggtggggagcgtacatgagcgagcgaggactctgatggtctgccccactccctgtagtgcacagctccctcagcagcgtcctggccgccctcaccatggaacgggaccaactgagggacatgcaccagggctcagagttgtcaagaatgggggtgggataccagcgggggatcctctaat

SEQ ID NO: 64177 - DNA, 370 bp, Homo Sapiens
ctacggggcagggcccactgagggaacatcagtggccctccagtcagattctgtgggtttggaagcccatcgtgaaaggggctgacctttgcccctttttacttggcattggttttgaaaccagctgtttcccaaactctgcttcccaaggtcaaccgttgctgttcacacgctcagcctgtctgggggagcgggcctctagcttcagccagggcgggtacacaccctgggcacagggtcctcagcccccgtgaaatgagctcccagggctggcgtcccaccttccaggtgggggctggcacatcacagactgtcgagagcgccatgtcccagggcatgcagaggatgcacctagagacgttgcagcgat

SEQ ID NO: 64178 - DNA, 359 bp, Homo Sapiens
agagcatccggacagacgtttcaccaaggtggatggaatgaccagttgagcacatggaaagtcgcccagcatctccggtcataggagaaggcagattaaagccacggggagccgacactgtggtcccactggcatggctgaaattcagaagccctgagtgtggcatgaggatgtggaacagctggatctcatccatcactgtgaagtcgtgtagccactccacaaacgtgtggcaaacagccgagccgggagaagggaagacgtgttcaaagattcatatgtggccgggctgcagatgtcacgcctgtaatcccagaactttaggggccaaggctgggggatcgcttaagcccaggagt

SEQ ID NO: 64179 - DNA, 1078 bp, Homo Sapiens
gcagggcctgagccgctgctgccgcgccgccgcgcagccccacatcaacgcaccgggggcctgtcaccgccaccgccaaaaaagtcaccgccgctagggtcgccgttgcatcggtgcagggcaagatggcatccgccacagactcgcgctatgggcagaaagagtcctcggatcagaacttcgactacatgttcaagattctcatcatcggcaacagcagcgtgggcaagacgtccttcctcttccgctatgctgacgactcgttcacgcctgccttcgtcagcaccgtgggcatcgacttcaaggtcaagaccatctatcgcaacgacaagaggatcaagctgcagatctgggacacagcagggcaagagcggtaccggaccatcaccaccgcatactaccggggcgctatgggcttcatcctcatgtatgacatcaccaacgaggaatccttcaatgcagtgcaggggtggtccacccagatcaagacctactcatgggacaatgcccaggtgctgctggtaggaaacaagtgtgacatggaggatgagcgggtggtgtcatcagaacgtggccggcagctagctgaccaccttgggttcgagttctttgaggcaagcgccaaggacaacattaacgtcaagcagacctttgagcgcctggtggatgtcatctgcgagaagatgtccgagtcgttggacacggcggaccctgcggtcacaggcgccaagcagggcccacagctcagtgaccagcaggtgccaccgcaccaggactgcgcctgctgagagccatcccactccctttcccctcttccctgtcttccccagcttcccccaatctacccgggcctgacccggcccctaccagccacgggcacaagacccctgctcctgacttagcccgtcacccttatttattattgtagctatttatttactttattgacagatgtcccccagggggccaggctccccctgaccgccccatggccctggccctcctgtacgttctcgccctttcccccaactcagcgtgtgcgtgtctcgttggcccccgtgatacttcaccgttcacg

SEQ ID NO: 64180 - DNA, 691 bp, Homo Sapiens
  misc_feature (23)..(23): n is a, c, g, or t
  misc_feature (632)..(646): n is a, c, g, or t
tttaacttttcgccctggaccancgaccctaaagagaggataaggtgggccgttgccatgttgacggtgagaggcatcatccggttcatcattggcttcagcgcacccatgtccatcgttgctgtcagttatgggcttattgccaccaagatccacaagcaaggcttgattaagtccagtcgtcccttacgggtcctctcctttgtcgcagcagccttttttctctgctggtccccatatcaggtggtggcccttatagccacagtcagaatccgtgagttattgcaaggcatgtacaaagaaattggtattgcagtggatgtgacaagtgccctggccttcttcaacagctgcctcaaccccatgctctatgtcttcatgggccaggacttccgggagaggctgatccacgcccttcccgccagtctggagagggccctgaccgaggactcaacccaaaccagtgacacagctaccaattctactttaccttctgcagaggtggcgttacaggcaaagtgaggagggagctgggggacactttcgagctcccagctccagcttcgtctcaccttgagttaggctgggccacaggcatttcctgcttattttaggattacccactcatcagnnnnnnnnnnnnnnngcctttgtgtcccctgatttggggagaataaacagatatgagttt

SEQ ID NO: 64181 - DNA, 447 bp, Homo Sapiens
gttattggctccccaagtttgaaagtagtgtgttgctctagatagagatgttaaggtatgttgtacctgccttcatatttgggtttcaccatttactaggtgagagcccatggccatatccaaaatctgagaggcttccatttaattgtcacttgcattgtgactattaaaagacatgatgaatttgaagttcattgtatattaacactttaattattcttcctgtttcagactctgtcacatgaacccatagtccttcaagagggtctccttcagttggactctatcctctcctctctggagcccttacgccgccccattgaatcccctgtgggctcagtgttgttgcgagccctggcttgcgcaggcaatgttgctgatgctgccctctcagcccagtcctcacctctgctgcatgctctcactgctgcccatgcctacactagt

SEQ ID NO: 64182 - DNA, 617 bp, Homo Sapiens
  misc_feature (362)..(372): n is a, c, g, or t
agagcatttgcagtttgtttgaggcctcgttgccaatgatagatcactcctgttgacctggtatgtctgcttgcttgctgcttttccttgctttctcttggaagaggaaaggactctggtcaggcccaggctgagtgagatgagctgcagctggctcatggccttcttagagcagagagaggagtatgtcattttactaagttcctaaacaaacatttatgcaggcaacactccttgcagatccagaaactgaggcacaatagggttatgacttgctcaagaatatgtagctgctagggggtaaatcaaggcatcacaatttctgttcagcgggcaggaataggctgtgaattgctagcacnnnnnnnnnnnaagcaattactttttgacttgttcctctgaaagtgcaagaggcgtacacctttcccaaatgtagactagaatctgcaggatgccacccactgtatagttctgctttcccagagaggaagaacttttagaaaccaaatgatcttaattgttattgcccacccctggcttttccgggtagaaaattcacagtaggaatgattgttaagagagagtgcttggaaccatgggtacccgagcgaagcagg

SEQ ID NO: 64183 - DNA, 546 bp, Homo Sapiens
gggccattgtggctgtcccagtaccaggtggtggtcatcctgttggtgagtgagcaagtggaatacgccatagaggcacagcagagcctgctggttgcaggactggtcagtgacctggatgcagactctggactgaccctcagccggagaatccgccgggcccagcttgcccactacaattttcagtttgtggttggccagaaagagcaaagtaagagaacagtgaacattcggactcgagataatcgtcgccttggggagtgggacttgcctgaggctgtgcagcgactggtggagctacagaacacgagggtcccaaatgccgaagaaattttctgagcctttgtacatagatgaggcaaaaacctgcgagtgccatcagcctccctcacatgggagaccccaacccagctgacaatgtggagcccccagaacttcagaactgtgtggaggcacatgtctgctctcctgaaaagagacttggtttggggaccccacaaaaggagggaagctgtagctgtttggatgtgaggagaatgaaactac

SEQ ID NO: 64184 - DNA, 198 bp, Homo Sapiens
ctgtctgcgtttggacttagaagagaaagagaaaagccatgataaatcacatatcatgcaggacccttcaaggtaggaagggagtggggctaaaatgtctctcttccgcagggtgagtttaaagctcaagcaaaggtggagctcagttactctcacatcctcaccctaaaccccgtgagaacttagtccaaaggcagg

SEQ ID NO: 64185 - DNA, 1083 bp, Homo Sapiens
tctgtatagtttgtattcaatttgagaccttttctatgggaagctcagtaatttttattaaaagattgccattgctattcatgtaaaccatggaaaaaaaattgtgtagtgaagccaacagtggacttaggatgggattgaatgttcagtatagtgatctcacttaggagaatttgcaggagaaagtgatagtttattgttttttcctcgcccatattcagttttgttctacttcctccccttccttccagatgataacatcacatctctacagtaagtgcctctgccagcccaacccaggagcgcaagttgtctttgccatctggtctatagtacagtgcgcggcgttaggccacaactcaaaagcattatcttttttagggttagtagaaattgttttatgttgatgggaggtttgtttgattgtcaaaatgtacagccacagccttttaatttgggagcccctgttgtcattcaaatgtgtacctctacagttgtaaaaagtattagattctactatctgtgggttgtgcttgccagacaggtcttaaattgtatattttttggaaaagtttatatactctcttaggaatcattgtgaaaagatcaagaaatcaggatggccatttatttaatatccattcatttcatgttagtgggactattaacttgtcaccaagcaggactctatttcaaacaaaatttaaaactgtttgtggcctatatgtgtttaatcctggttaaagataaagcttcataatgctgtttttattcaacacattaaccagctgtaaaacacagacctttatcaagagtaggcaaagattttcaggattcatatacagatagactataaagtcatgtaaattgaaaagcagtgtttcattatgaaagagctctcaagttgcttgtaaagctaatctaattaaaaagatgtataaatgttgttgaaacattatggtggttatttccagctgtcttttttgtttttcaatcctttatcatacattggctttccgaatgatccctttcatcagataaagcttttctggcttagtctaggacatttgttataactttttg

SEQ ID NO: 64186 - DNA, 345 bp, Homo Sapiens
gggggatcgtatatcgctgcacgcgggtcagaggatccgtctcccctcgtgaagacagggcttcctagatggccctgtttacggcctatgagatgaaatatgtgattttctctaatgtaacttcctcttaggatgtttcaccaaggaaatattgagagagaagtcggccaggtaggatgaacacaggcaatgactgcgcagagtggattaaaggcaaaagagagaagagtccaggaaggggcggggagaagcctgggtggctcagcatcctccacgggctgcgccgtctgctcggggctgagctggcgggagcagtttgcgcgtaagggccagcagggtaccgag

SEQ ID NO: 64187 - DNA, 484 bp, Homo Sapiens
gccaggctgtgtgtaaggtcttgaggatttagtaacgtactcaggtacaacatcaggtgaggtttgtcgggcacagaccagcgtagcagtgtcgggaaaggccaccttgtcccactcctacgatacgctactataaagagaagacgaaatagtgacataatatattctatttttatactcttcctatttttgtagtgacctgtttatgagatgctggttttctacccaacggccctgcaaccagctcacgtccaggttcaacccacagctacttggtttgtgttcttcttcatattctaaaaccattccatttccaagcactttcagtccaataggtgtaggaaatagcgctgtttttgttgtgtgtgcagggagggcagttttctaatggaatggtttgggaatatccatgtacttgtttgcaagcaggactttgaggcaagtgtgggccactgtggtggcagtgatcgtggggttgtaaggg

SEQ ID NO: 64188 - DNA, 309 bp, Homo Sapiens
cgaagttagtcgggacgcatccccgtcaccaagagctcatctgcaagtgtgtgctggaccccaagaacagtgacattctcatccggaccgagcttcggcccgtgaaggagatggcccaatcccacgagtacctgagcatcgagtagtcagaagaggaagtgtggctcacgtggactgacaagaataacgagcatcatgagaagagtgtgaggcagctggcccaggaggcgcgggccggcaacgcccacgacgagaatgtgctcagctactacaggtaccagctgaagctcttattgcccaggctggagt

SEQ ID NO: 64189 - DNA, 452 bp, Homo Sapiens
aacctcagcagatgttttgatttgctgctttagttgtaataattcaatttttataggtagttgtaagaacttagtcttatttgacttttttattttatgttaatgttttcagttctcactttgaggcacatttacatcaatgcttttgttcctctcacatgctgaaagcaagatgtgttccttattgtgaagagcgacacaactgcctgctgcctttccacagctataatggacatcaggttgactctaaatcaaggatcatgtgtgcacaatacttgtggcccacaaaatttcacaatgactgctgaggaatcattctttttgcctgtaaaatataacaaagggcatcattaagtagaccaggtaattactgcttgtctctcaaggctgctgtctttatcagcactaactaaataaatttgttggttcagttgtacttgtcctgcaaatac

SEQ ID NO: 64190 - DNA, 257 bp, Homo Sapiens
ttgaaatgggcacagtaattcaacctaataattggctaatggttaccagaccttggttaagtagttaacattaaccgcgactcatggctggatcatgagctctgcactgttttgttttgcttcttataacaagactgtgattcttttactattattgaacattgtctgcgatacattttgaattgtacctggaagcccttctagacatctatcaatgtatggattcgagatcaggttaaggtgggacgccaggcatt

SEQ ID NO: 64191 - DNA, 339 bp, Homo Sapiens
  misc_feature (112)..(126): n is a, c, g, or t
ccactccatcctgggcaataagagctcctgagcatcagttatctcccacctcagcctcctaagtagcttggactacaggtacgcgtcacagcccccagctagttgcagtacnnnnnnnnnnnnnnnaaaaaaagggggtctcactctgttgcttggactgaaaagccgtggtgcagtcccggttcactgcagtcttgacctctgtggcctcaagtgatcttcccaccccagcttccgtgagatagctgggactagcgggtttgcgcgaccatgcctggctaattttttcatagagactgggttttgccatattgcccaggtgggtctcaaactcctgag

SEQ ID NO: 64192 - DNA, 366 bp, Homo Sapiens
actccagcctgggcaataagagctggcacttaaattaattgaggcagaagaggagaagcagagatctacatggaaaaagaaagttaagagtcttcctaatattctcaccgatgatcgatttaaagttatgtttgagaaccctgacttccaagtagatgaagagagtgaagaatttaggcttctgaatccacttgtttcaaaaattagtgaaaaaaggaagaacaaactaagactcttagagcaacaagcacttcgtgaaaaagaagaggaggaagagccggaaggaaaaccacgtgatgcagaaagttcgagagctcttactgcccaggctggagtagctcttctgcagcgggtccccaggttacc

SEQ ID NO: 64193 - DNA, 227 bp, Homo Sapiens
ttgaaatgggcacagaaattgaaaataagtgatgaaatgtccaaggactgcttgagtatcctgtataatacctgtgtctgtacagagggagttacaaagcgtttggcagaaaagaatgattttgtgatcttcctgtttacacttgatgacaagtaatgaagacattctgacaaacagcaaccctcacttgaagatatttctgggtgcttataaacggacaactgatc

SEQ ID NO: 64194 - DNA, 566 bp, Homo Sapiens
  misc_feature (266)..(295): n is a, c, g, or t
  misc_feature (486)..(494): n is a, c, g, or t
ctttaacttaaggagacgggtaaaggatcttaaatttttttctaatagaaagatgtgctacactgtattgtaataagtatactctgttatagtcaacaaagttaaatcccaattcaaaattatccattaaagttacatcttcatgtatcaccatttttaaagttgaaaagcatcccagttaaactagatgtgatagttaaaccagatgaaagcatgatgatccatctgtgtaatgtggttttagtgttgcttggttgtttaattannnnnnnnnnnnnnnnnnnnnnnnnnnnnncactagaataatggcaaatacttctaatttttttccctaaacatttttaaaagtgaaatatgggaagagctttacagacattcaccaactattattttcccttgtttatctacttagatatctgtttaatcttactaagaaaactttcgcctcattacattaaaaaggaattttagagattgattgttttnnnnnnnnntacgcacattgtccaatccagtgattttaatcatacagtttgactggctatttacagctgaggaccatcgtt

SEQ ID NO: 64195 - DNA, 735 bp, Homo Sapiens
ctcacagctggcggacggccaaggctgctgggcctgaccaggccagagactgttccagaggaatggggtggggaggcctcccaggccgagcagtgagaaacgtgacctctggtcttctggctgaggccaggagagccccaggtggtcacatgggccccaggagcggccggggaggctcatccaggcatcatggttctgtggccttggggaggggcgggcctcccggcaggcaggtggctgagctcacgccgccccgtcctcacagtgtactgtcagaacttcgcccccagcttcaaggagagcgagatgaacgtgatcgccgcggacatgtgcaccaacgcccgccgcgttcgcaagcgctggctgcccaagatcaagtccatgctgccggagggcgtggaggtgtaccgcacggtcatgggctccgccgccgccagcgtgcccctcgaccccgagttcccgcccgccgcggcacaggtgttcgagcaacgcatctacgccgagcggcggggcgacgccgccaccatcgtggctctgagaactgacgccgtgaatgttgacctgagtgccgccgccaaccccgccttcgacgccggcgaggaggtggacggggctggctcggtcatccaggaggtggccgcccccgagccgctgcccgccgatggccagagccccccacagccctttgagcagggcgggggcggccccagcaggccccagacgccggcggccgct

SEQ ID NO: 64196 - DNA, 438 bp, Homo Sapiens
tctgggtgtgcatcactttctagcatcagctcttcaggagcccacgggaaggaacccctgtatttaaagtcaatgcaccaaaggcagctagggtttccatacagacaccatggtccaagccctcatgaaagggtgaggacctggagtttgtcggggatttgggttcttgtacacagatacaacacgggcgccaaggaagagtgaggacgatgggaaggagtaccactttatctcaacggcggagatgacgaggaacatctctgccaatgagttcttggagtttggcagctaccaaggctacatgtttggtaccaaatttgaaacagtgcaccagatccataagcagaacaagattgccatccttgacattgagccccagaccctgaaaattgttcggacagcagaactttcgcctttcattgtgttcattgcacctac

SEQ ID NO: 64197 - DNA, 396 bp, Homo Sapiens
ccgaagcttgatcacgtgatcaagcttcggcaagggccgaggcggccgcctggacatcccaagaaaggacaggcccagctgcttcccagatttttgctgtgagaattaattaccagtaacagttcaatatgggggacattctggctcatgaatctgaattacttggactagtgaaagagtatttagattttgctgaatttgaagacaccttgaaaacattttcaaaagaatgcacaataaaaggaaaaccattgtgtaaaacagtaggcggatctgttcagagactccgaatcattgacaacttcagaaggatcttgtcgctgcatttgactacggagaccagaaggtgttcttcgatctgtgggaggagcacatttcacgttccatccgagatgc

SEQ ID NO: 64198 - DNA, 816 bp, Homo Sapiens
  misc_feature (614)..(614): n is a, c, g, or t
ggggtttttgggggtagattcgagttacaaaatggccgcccggagcgtgttcggcgcggttcccccagctgtctctggctgaaccggcgctctcgcctccctgccgaacacagcgtgaggagcccccccagggatatggtgtttgagtctctgggcttgccgagcactaagtcctctgagttccgcagcgcagcaccggaagcggccgagcgcgctcagcccggcgacccctgcgggctccagacccctgcgccgctgcgccccgggtttcgccgcaaccaagacccagcgagtgcagcggcggccgccgaggaggttcgaaaacatggccaaaagaaatgccgagaaggaactgacagataggaattgggatcaagaagatgaagctgaagaggtgggaacattctccatggccagtgaggaagtcttgaagaatagagccataaagaaagcaaagcgcagaaatgttggatttgaatctgacactggaggagcctttaaaggttttaaaggtttggtggtaccttctggaggaggacgcttttctggatttggtagtggcgctgggagggaagcctttggaaggactgtcgaatggaaacaacataacccgntgccccctccctttcgccagtgcaaaaggcagccggcaaatccccaagggaagccttttggctttctccttgcctggcaaatgggcccctacccacctttgggttgattaaaagtttccaattcccccaaaacttaattgggggaacaggtcaaagcaagcccttccctcccctctggggcctttggcttttccaagataat

SEQ ID NO: 64199 - DNA, 268 bp, Homo Sapiens
cctagttttagaagtttcaatagcatttacattgcattaggtattagtctagggataaagtatacaggcggatgtgcgttggttatatacaaatatgtcattttatgtaagggacttgagtatacttggatttttggtgtctgtgggttggggggacggtccaggaacctataccccatggatacccagggacacctgtacgttatttacctttattgtcattgccagcttcttacctgaaacttcttactagtgctagtgaacttct

SEQ ID NO: 64200 - DNA, 294 bp, Homo Sapiens
cctagttttagaagtttcaatagcagcgaagagctgctggagacagagtcagagcagtcaagggtgggagcttccagcccttccaggaggccagttttctagtgaagacagagtgcacctgacactgccatcacatcgtcagtatcactgcctgtctctgccaccaaactaagatcaaaggaggggctcagctccctgtgcattctccctgggcctcagtaaaatgggagaaggttcgtgggaggggcctccaaaataaaaatggaaactgctattgaaacttctaaaactggg

SEQ ID NO: 64201 - DNA, 513 bp, Homo Sapiens
ctagaggagaagcagcaggaatgatgctttgatactctggaggagaagttaactcaagatggagttcatgttctgatttgaggaatgaaaatgagatgatcaggcaggaaactgacattccaaggatctaatccaggaagtactctcagtggggaccacctgctttcatcccctgaccttgtgggagaaattttgcaatgtatgctaatcaaaatgtatttatatgttctctgctgatgttttatagaggtttgtgaagaaaattcaacctcagcaacttcagaaactgcccctgatacgtgtgagagagaaataaaatcagattttgagtgttgaagggactgaggaagtgaggataaagagcatgaggacagcatggaaagacaggaggcagaagtggaactgaactttcactctcccctgggacagatctacctccattatcaagtctgaatatgcacccgccctctcctccagccccgtttctcctcccataattcggaactcgctcac

SEQ ID NO: 64202 - DNA, 899 bp, Homo Sapiens
tcctctcgagcatggggaccaaggggttgaacctcaaaatttgagaacattacagggtcacagtgtcatccgtgtcagctaccaataccacccttccacacatgttgatgtctcaacgtgttattgcaccaaacccagcccagctacagggtcagcggggcccgcctaagcctggccttgtacgcaccacaacacccaacatgaatcccgccatcaattatcaaccgcagtcaagttcttctgttccatgtcagcgtacaacatcctctgccatctatatgaaccttgcttctcatatccagccagggacggtgaacagagtgtcctcgccacttcctagccccagcgccatgactgatgctgccaactcacaggctgcagccaaattggctcttcgcaaacagctggaaaagacactcctggagatcccaccccctaaacctcctgctcccttacttcatttcttgcctagtgcagccaatagcgagttcatctacatggtaggcttggaagaagtcgtacagagtgtcattgacagccaaggcaaaagctgtgcctcacttctgcgggttgaaccctttgtatgtgcccagtgccgcacagatttcacccctcactggaagcaagaaaagaatggtaagattctatgtgagcagtgtatgaccctccaccagaaaaaaggtctaaaagctgaacacaccaacccggctgaaaaatgcatttgtggaaagcccctacgcaggaaacaggaaatttaaacaccaattacagccagcaggcaacccctcctcccccactaacggcttccagctggtgtcccggggtctcttaaaaccaagaaaaccccttcgttaagaacattcataccgccttccggacaggggttcccaaaggccccc

SEQ ID NO: 64203 - DNA, 990 bp, Homo Sapiens
  misc_feature (227)..(227): n is a, c, g, or t
  misc_feature (803)..(811): n is a, c, g, or t
ccaaggctgcaacaaacggtcccagggtgatcttgccacacaagaggcggtggccgagaagctcggccagcaggtgaaccgcacatgcccgggcttcctcgcagacgggggtccctgggtgcaggacgtggcctatgacctctggcgagaggagaacggctgtgagtgcaccaaggccgtgaactttgccatgcatgaacttcagctcatccgcggtggagaagcangtaccttctaccacaacctcgtaccacctggtcgaggagctcttccttggtgacattcacactgatgccacccagaggatgttctaccggccctccagttaccagccccctctgcagaatgccaagaaccacgaccatgcctgcatcgcctgtcggatcatctatcggtcagacgagcaccaccctcccatcctgcccccaaaggcagacctgaccatcggcctgcacggggagtgggtgagccagcgctgtgaggtgcgccccgaagtcctcttcctcacccgccacttcatcttccatgacaacaacaacacctgggagggccactactacccactactcagacccggtgtgcaagcaccccaccttctccatctacgcccggggccgctacagccgcggggtcctctcctccaggggtcatggggaggcaccgagttcctgttcaagtgaatcacatgaaggtcaccccccatgggatgcgggcacagcctcacttggtcaacgtcttcaacgggaaatgaatggcggggcccaagggctcctggcaggtgggccatccagcaggatgtggannnnnnnnnattggcctgcgcgggccctggggcatccaaacccccctccacccggaagtaacaagaatcttttcaaaatggggaaccgggaatgcccccgggggggcgccttattctggcttggttccaaccgggtcacaaaaggcccacagccgaacgcggggtcccccagccccatagacacgggg

SEQ ID NO: 64204 - DNA, 817 bp, Homo Sapiens
  misc_feature (673)..(673): n is a, c, g, or t
ctgggcctcatatggttttggttcctaagtctacattacacaactggatgagtgaattcaagagatgggtaccaacacttagatctgtttgtttgataggagataaagaacaaagagctgcttttgtcagagacgttttattaccgggagaatgggatgtatgtgtaacatcttatgaaatgcttattaaagagaagtctgtgttcaaaaaaatttaattggagatacttagtaatagatgaagctcacaggatcaaaaatgaaaaatctaagttgtcagaattagtgagggaattcaagactacaaatagactattattaactggaacacctcttcagaacaacttgcatgagctgtggtcacttcttaactttctgttgccagatgtgtttaattcagcagatgactttgattcctggtttgatacaaacaactgccttggggatcaaaaactagttgagaggcttcatatggttttgcgtccattcctccttcgtcgaattaaggctgatgttgaaaagagtttgcctccaaagaaggaagtaaaaatctatgtgggcctcagcaaaatgcaaagggaatggtatactcggatattaatgaaggatatagatatactcaactcagcaggcaagatggacaaaatgaggttattgaacatcctaatgcagntgagaaaatgttgtaatcatccatatctctttgatggagcagaaactggtccacctttatacacagatatgcatcctagtaccaacagtggcaaaaatggtggttttagaccagctgctccctaagttaaaagaacaggttccc

SEQ ID NO: 64205 - DNA, 521 bp, Homo Sapiens
cctagttttagaagtttcaatagccatttgtgtgtctcttccttggggagatcctagccagattaccagaaatttcgttagtcatctaaatcagagacatcacatttgattatggagaatttgtgaatcttcagctagatgaagaaacccgataccaaactgctgttgaagaatcttttcaagtaaacatctgaaggctgtagacatctctgcatctttgtacctgccagtgccatctttaagggggaaactacatgaagtcaccgttacagtaacttgatgtgtatattaataaaagtaattcagtcattttagtttttgattgaaaataaaggtagggcttctaaaaacttcatcatcttgataagttaaaaaatgaaagttatgacattagctttaaacggtgtaaaaaagatgtttcactcaatgtaacggtgaaagagaatccctgttgtactttatctttttgtaatattatttttgaatttttcattatgttgctttgaaacttctaagactag

SEQ ID NO: 64206 - DNA, 467 bp, Homo Sapiens
gatcgagtcggtacccctagtttagaagtttcaatagcagtttcctttgttgaaaggagatattaagtttccagaattcttcaaagaggaacagttcttttccagtgtttttcgaattagttcaccaggattacaactatggactcattatgatgtaatggataatttgttaatacaagtgacaggaaaaaagcgtgttgtactcttcagtcctcgagatgcccagtatttatatttaaaaggtactaaatcagaagtactgaatatagataacccagacttggctaaatatccacttttttccaaggctagaagatatgaatgttcccttgaagctggtgatgtattattcattcctgctttatggttccataatgtaatttctgaagagtttggagtgggagtgaatatcttttggaagcaccttccatctgaatgctattgaacttctaaactagggtaccgag

SEQ ID NO: 64207 - DNA, 237 bp, Homo Sapiens
tagtttagaagttcaatagcacctagtttagaagttcaatagcacattgctgcctgggggtgcgcccaagtcactttaaccacaaaacgccatcgtcgtcagggtaagctctgctctctacaaagactcgcgagccgggccaaggggccttgtcttggctgggtttgtcagaggtcaaaccggctcttttaaacggcctaccagtttttaaattgcattgccgtttctttctttatg

SEQ ID NO: 64208 - DNA, 235 bp, Homo Sapiens
taagaaaaagttagaaagaatcagtttttttaattaaggaaatagaaagctgttaggctcctgattcgtggggtttgtttttgtaaaaacagtttagataatcctgaatgcaatcattaacttggttgctaattacaagaatgaaaattataatggaaaaggacaaaataatataccagctggttggttattatagtccgtgtattaaaatgctattgaaacttctaaaactagg

SEQ ID NO: 64209 - DNA, 457 bp, Homo Sapiens
cctagttttagaagtttcaatagcacattgctgcctgagtaatccaccccaagcgtaaaggcaaacccttcagtcaagtttatacagcaaaccctccattgtccatggtcaacagggaaggggttggggacaggtctgccaatctatctacaagccaccatatggaagaagtattcaatttatatcataaatggctacttaacggttgaatcactttcatacatggatgaaacgggttgaacacaggatccagatgaatcttcggtgggccaagagatgtgccttaatccttgtagatcctgtttgctatatggaactagctttggtacagtagagttatctgactttcgatttatccactgccaatataaagaggagacaggggtgcgggaagcatgacttcattccagaggcttctcagagtacagcatatgctattgaaactgctaaaactagg

SEQ ID NO: 64210 - DNA, 563 bp, Homo Sapiens
cgactctagagatccccctagttttagaagtttcaatagcaggcacgcaagctgatggttagattgacgaggcacactggccggaagcagcctcctgtcagtgagtctcattggagaacgttgctgcaagacatgttaactatgcagcagaatgtatacacatgtctagattctgatgcctgctatgagatatttacagaaagccttctgtgctctagtcgccttgaaaacatccacctggctggacagatgatgcactgcagtgcttgttcagaaaatcctccagctggtatagcccataaagggaaaccccactacagggtcagctacgaaaagagtattgacttggttttggctgccagcagagagtacttcaattcttctaccaacctcactgatagctgcatggatctagccaggtgctgcttacaactgataacagacagaccccctgccattcaagaggagctagatcttatccaagccgttggatgtcttgaagaatttggggtaaagatcctgcccttgcaagtgcgattgtgccctcagccgacgcacgtttt

SEQ ID NO: 64211 - DNA, 580 bp, Homo Sapiens
  misc_feature (85)..(129): n is a, c, g, or t
gtactgaactgggaaagacagcagagcaacagctcaaaatctcgcgtcattctagaagtcaagccaggcacaagggctcatcggnnnnnnnnnnnnnnnnnnnnnnnnnnnnnnnnnnnnnnnnnnnnncctgcaaccccaggacggggggaggccgagcgggtcactttgaaccctcggaaatccaagagtctgagacctacctaggctacatggggagaccttgtgtctaccaaatatatgctattgaaacttctgaaactaggtttagaagtttcactagcagcgtctcgttgttgcagtctggttcctaaggaggaagatggaaggcagccctggagctggtttcctttacagtaatttcaacacgagagagtgatgagatggaacccgaagaagaaaggattcgttacagccagagattgcgtggtaccatgcgacgacgctatgaagatgatggcatttccgatgatgaaattgaaggaaaaagaacttttgacttggaagagacactgcacaccaacaaatataatgccaattttgttacttttatggaaggaaagtcagtattgttttgtca

SEQ ID NO: 64212 - DNA, 549 bp, Homo Sapiens
acttagtttttaaaatttatttgcaaatatactttttccatttggcactatggtttgttgcctacctagctgcatctataatgtcagcttatcctaaggctgtccacgtacttaatttacttaagtgttcattttaagtaacgtgctcactgtgtataggaatttgtattttggaggtgcttgatctatctacaaagaaaaattaattaggaattactttattataaaatgctcctagaagtcttaattgtgtttattttttaaaaaaacaaatgttagacttgtgtgcatggaagtaattaaggtacatcattattgtagtttgaaagttgtacatgataagacattttgtttttactgtatgtttttactgaatgatctattccccatcccaaggcaagcatgaataaaattaggttaaacgtagcatgtggcatcgcagtctcttagaatttgtttcatctattttattttattgaatactgtctgtatctttggttatcctgtttgaagaaaaaggacaaataaaacatggccagcaaataccat

SEQ ID NO: 64213 - DNA, 596 bp, Homo Sapiens
atttggagtatagccaccttatttgctgaactagcaactaagaaaccacttttccatggggattcagcaaattgatcatctcttcaggattttcagagctttgggcactcccaataatgaagtgtggccagaagtggaatctttacaggactataagaatacatttcccaaatggaaaccaggaagcctagcatcccatgtcaaaaacttggatgaaaatggcttggatttgctctcgaaaatgttaatctatgatccagccaaacgaatttctggcaaaatggcactgaatcatccatattttaatgatttggacaatcagattaagaagatgtagctttctgacaaaaagtttccatatgttatgtcaacagatagttgtgtttttattgttaactcttgtctatttttgtcttatatatatttctttgttatcaaacttcagctgtacttcgtcttctaatttcaaaaatataacttaaaaatgtaaatattctatatgaatttaaatataattctgtaaatgtgtgtaggtctcactgtaacaactatttgttactataataaaactataatattgatgtcaggaatcagga

SEQ ID NO: 64214 - DNA, 1734 bp, Homo Sapiens
  misc_feature (198)..(200): n is a, c, g, or t
  misc_feature (202)..(224): n is a, c, g, or t
  misc_feature (673)..(696): n is a, c, g, or t
  misc_feature (895)..(895): n is a, c, g, or t
  misc_feature (1609)..(1649): n is a, c, g, or t
cggtccggaatttccgggataacttctgcaggggaaaagagctaggaaagagctgcaaagcagtgtgggctttttcccttttttgctccttttcattacccctcctccgttttcacccttctccggacttcgcgtagaacctgcgaatttcgaagaggaggtggcaaagtgggagaaaagaggtgttagggtttgggnnngnnnnnnnnnnnnnnnnnnnnnnnaatttcttgatttcaacattttctcccaccctctcggctgcagccaacgcctcttacctgttctgcggcgccgcgcaccgctggcagctgagggttagaaagcggggtgtattttagattttaagcaaaaattttaaagataaatccatttttctctcccacccccaacgccatctccactgcatccgatctcattatttcggtggttgcttgggggtgaacaattttgtggctttttttcccctataattctgacccgctcaggcttgagggtttctccggcctccgctcactgcgtgcacctggcgctgccctgcttcccccaacctgttgcaaggctttaattcttgcaactgggacctgctcgcaggcaccccagccctccacctctctctacatttttgcaagtgtctgggggagggcacctgctctacctgccagaaattttnnnnnnnnnnnnnnnnnnnnnnnntctccgggggcccctcttggcccctttatccctgcactctcgctctcctgccccaccccgaggtaaagggggcgactaagagaagatggtgttgctcaccgcggtcctcctgctgctggccgcctatgcggggccggcccagagcctgggctccttcgtgcactgcgagccctgcgacgagaaagccctctccatgtgncccccccagccccctgggctgcgagctggtcaaggagcccgggctgcggctgctgcatgacctgcgccctggccgaggggcagtcgtgcggcgtctacaccgagcgctgcgcccaggggctgcgctgcctcccccggcaggacgaggagaagccgctgcacgccctgctgcacggccgcggggtttgcctcaacgaaaagagctaccgcgagcaagtcaagatcgagagagactcccgtgagcacgaggagcccaccacctctgagatggccgaggagacctactcccccaagatcttccggcccaaacacacccgcatctccgagctgaaggctgaagcagtgaagaaggaccgcagaaagaagctgacccagtccaagtttgtcgggggagccgagaacactgcccacccccggatcatctctgcacctgagatgagacaggagtctgagcagggcccctgccgcagacacatggaggcttccctgcaggagctcaaagccagcccacgcatggtgccccgtgctgtgtacctgcccaattgtgaccgcaaaggattctacaagagaaagcagtgcaaaccttcccgtggccgcaagcgtggcatctgctggtgcgtggacaagtacgggatgaagctgccaggcatggagtacgttgacggggactttcagtgccacaccttcgacagtagcaacgttgagtgatgggtgnnnnnnnnnnnnnnnnnnnnnnnnnnnnnnnnnnnnnnnnngactccagccagcgcctccctccaccccaggacgccactcatttcatctcatttaagggaaaaatatatatctatctatttgagg

SEQ ID NO: 64215 - DNA, 192 bp, Homo Sapiens
cttaaggcagttgtcaatgaagttcttagagaaaggggagcttgctaacttcagattccagaaggatttcttaagaccttttgaacatataatgaaacggaacaggtctccacagttcgagactatgttgtacggtgtactagcacagatggttaatctcaagctgctaacacttcgatctggatggacgcc

SEQ ID NO: 64216 - DNA, 1344 bp, Homo Sapiens
  misc_feature (105)..(310): n is a, c, g, or t
gtgcctacaggagcggcagctgccttcctgtttggtgaatgggtacgtggggtgattgattcttagtctgtttgtgctattgtaacaaaatacctcagactggannnnnnnnnnnnnnnnnnnnnnnnnnnnnnnnnnnnnnnnnnnnnnnnnnnnnnnnnnnnnnnnnnnnnnnnnnnnnnnnnnnnnnnnnnnnnnnnnnnnnnnnnnnnnnnnnnnnnnnnnnnnnnnnnnnnnnnnnnnnnnnnnnnnnnnnnnnnnnnnnnnnnnnnnnnnnnnnnnnnnnnnnnnnnnnnnnnnnnnnnnnnnntgccggcttaaccacaggccaccatggccaccagaaaggaactggaagatatgatagaaaatctagagccccatattgatgatccagatgttaaagcacaagtggaagtgctgtccgctgcactacgtgcttccagcctggatgcacatgaagagaccatcagtatagaaaagagaagtgatttgcaagatgaactggatataaatgagctaccaaattgtaaaataaatcaagaagattctgtgcctttaatcagcgatgctgttgagaatatggactccactcttcactatattcacagcgattcagacttgagcaacaatagcagttttagccctgatgaggaaaggagaactaaagtacaagatgttgtacctcaggcgttgttagatcagtatttatctatgactgacccttctcgtgcacagacggttgacactgaaattgctaagcactgtgcatatagcctccctggtgtggccttgacactcggaagacagaacttggcactgcctgagagagacgtagtgtagactctgggctcagacatgcagtggaaagttcgacgaactctagcattctccatccacgagcttgcagttattcttggagatcaattgacagctgcagatctgggttccattttttaatggatttttaatagacctcgatgaagtcaggataggtgttcttaaacacttgcatgattttctgaagcttcttcatattgacaaaagaagagaatatctttatcaacttcaggagtttttggtgacagataatagtagaaattggcggtttcgagctgaactggctgaacagctgattttacttctagagttatatagtcccagagatgtttatgactatttacgtcccattgctctgaatctgtgtgccgacaaagtttcttctgttcgttggatttcctacaagttggtcagcgagatggtgaagaagctgcacgcggcaacaccaccaacgttcggagtggacctcatccatgagcttgtggacaactttggctgatgtcc

SEQ ID NO: 64217 - DNA, 486 bp, Homo Sapiens
gccggtgaaccttgatgctgtggtcgtctagaggatcccgtgattattatacaagtaactcactaatgatttgttaatattattaattaaaagttacagctgtcataagatcataattttatgaacagaaagaactcaggacatattaaaaaataaactgaactaaaacaacttttgccccctgactgatagcatttcagaatgtgtcttttgaagggctatgataccagttattaaatagtgttttattttaaaaacaaaataattccaagaagtttttatagttattcagggacactatattacaaatattactttgttattaacacaaaaagtgataagagttaacatttggctatactgatgtttgtgttactcaaaaaaactactggatgcaaactgttatgtaaatctgagatttcactgacaactttaagatatcaacctaaacatttttattaaatgttcaaatgaaagcaagaaagt

SEQ ID NO: 64218 - DNA, 1214 bp, Homo Sapiens
cccccccgtttatttcctcccccttatttaaccagccacccccagaggctggtaccggtccggaattcccgggatctgccagggtcgcggcagctgcggggagagatgactggggagcgacccagcacggcgctcccggacagacgctgggggccgcggattctgggcttctggggaggctgtagggtttgggtgtttgccgcgatcttcctgctgctgtctctggcagcctcctggtccaaggctgagaacgacttcggtctggtgcagccgctggtgaccatggagcaactgctgtgggtgagcgggagacagatcggctcagtggacaccttccgcatcccgctcatcacagccactccgcggggcactcttctcgcctttgctgaggcgaggaaaatgtcctcatccgatgagggggccaagttcatcgccctgcggaggtccatggaccagggcagcacatggtctcctacagcgttcattgtcaatgatggggatgtccccgatgggctgaaccttggggcagtagtgagcgatgttgagacaggagtagtatttcttttctactccctttgtgctcacaaggccggctgccaggtggcctctaccatgttggtatggagcaaggatgatggtgtttcctggagcacaccccggaatctctccctggatattggcactgaagtgtttgcccctggaccgggctctggtattcagaaacagcgggagccacggaagggccgcctcatcgtgtgtggccatgggacgctggagcgggacggagtcttctgtctcctcagcgatgatcatggtgcctcctggcgctacggaagtgcgggcagcggcattcccctacggtcagccccagcaggaaaatgatttcaatcctgatgaatgccagccctatgagctcccaaatggctcagtcgtcatccatgcccgaaaccagaacaactaccactggccactggccgaattggcccttccccaccttattattccctgggcaataccttaagggccccgtgtatttggacccttcacaccctgaaccttcggggaaccccggtggttacacttccggaaccttctaattccctccccctctggcaattggcttcttttctcaaacccccaaaatttccagagattcccaaagggcaccttccacttttgcccttgtagctttttcacaatgggcgctccccgtg

SEQ ID NO: 64219 - DNA, 1340 bp, Homo Sapiens
aagatatagtgctgcagcgtgcctgatgggatatattcagtcatggcgtccaaactttgtaagacgatctctgtggcaaggctagaaaagcacaagaatttgttcttaaattataggaatctgcaccattttccattggagttactgaaagatgagggactgcagtacttggagagactctatatgaaaaggaactccctgacatccttgccagaaaaccttgctcagaagcttccaaaccttgtggaactatacctgcactcaaataacatagttgtggttccggaagccattgggtctcttgtaaaactccaatgtctggatcttagtgacaatgccttagaaattgtttgcccagaaattggtcgtctgagagctttacgtcatcttcgattagctaataaccaactgcaattcctacctccagaggttggcgatttgaaggagctgcagacactagacatttctaccaatcgtttgctaactttacccgagaggcttcacatgtgcctttctctgcagtacctcactgtggaccgaaatcgtctatggtatgtgccgcgccatctctgccagctgcccagcctcaatgagctctccatggctggaaaccgtcttgcatttttgccacttgatttaggtcgatctcgagaactacagtatgtatacgtggataacaacattcacctgaaaggcttgccatcttatctgtacaataaagtcatcgggtgcagtggctgtggtgctcccattcaagtttccgaggtgaagctgctttccttttcatcagggcagcgaaccgttttcctcccagctgaggtgaaggccatagggacggagcatgatcacgtcctccctctgcaggaattggctatgagagggctgtatcatacctaccacagcttgctgaaagatttgaactttcctgtctccaatctcattacccagaagtctcctagagctgctgcactgccctctggggcactgtcatcggtgtagtgagcctatgtttaccatcgtctaccccaagctctttcccttgagagagacgccaatggcagggctgcaccagtggaagacaactgttagttttgtggcttactgctgctccacccagtgtctgcagacttttgacctgctgagttgataaacactcaagaacctcaggagcgctgccagcttgacactggggaatccagccagtccagcacactcttccatcctgtcctgtccaatgcgggggcactgcagaactctctagaaatgtcatgattgagcttcagagctaaaatgccttcacccttcccccaagttggaatatatcctcccccaaattaagg

SEQ ID NO: 64220 - DNA, 326 bp, Homo Sapiens
tattaatatatgaacagtccagtaaatcatctgccatgggaatgacacaggaatgaatgcgggcatgaatcctggaatgttggactgcaggcaatggtcaagggataatgcctaatcaagtcatgaacggttcaattggagcaggccgagggcgacagaatatgcagtacccaaacccaggcatgggaagtgctggctacttactgactgagcctcttcagcagggctctccccagatgggaggacatacaggattgagaggcccccagcctcttaagatgggaatgatgaacaaccccaatccttatgttcatcatattgatctg

SEQ ID NO: 64221 - DNA, 254 bp, Homo Sapiens
tttgaacaagccgatatagaatcacaattgcagcaacttggtgtaaccctttctatgactagaacagaactttctcctgcacagatcaaacagcttttacagaatcctcctgctggtgttgatcctattatctggcaacaggccaaggtagataaccctgattctgaaaagttaattcctgtaccaatggtgggtcttaaggaccttctccgaagactgaaggttcaagatcagatgactagagtggccgggtg

SEQ ID NO: 64222 - DNA, 565 bp, Homo Sapiens
gatgtatatgaaacttttgttaaatatgttgtatacttcgctggctgtgtgaagtaaactaaaactctgatgaacactttggagtctgctttagtgaaggagaccaaagtgggaagggctttagggcactgatagaggccctgggtgtacttttcaatcctgtgtaatgtttaattcttgcaactgaatcaaaacagtgttaaattatggcaatatttgcactttgggaatgagtacataactgtatgatcacactctgcaaatgccacttttaaagctgttaatagactttgcaccttttctttgacaaggatgtgtcatatttaaatttttacattcatcatggctacaggtagaactggggaggggggaatgtaattttttatgggaattttgatatgaaaagaaactagtcatttatttatacaataggcttggctcaaaaagtgtttttcagacctcggtattcctaatgtgggatgtgactttattttatttttagtagcaaatttggatgtagactgacagacatagctgaatgtcttaataaatttaaatttgaaga

SEQ ID NO: 64223 - DNA, 533 bp, Homo Sapiens
agagagtagtaagagaagggagcaacttatccttcagaaattcccaaagaagattctaccacttttgcaaaaagagaggaccgtgtaacaactgaaattcagcttccttctcaaagtcctgtggaagaacaaagcccagcctctttgtcttctctgcgttcacggagcacacaaatggaatcaactcgtgtttcagcttctctccccagaagttaccggaaaactgatacagtcaggttaacatctgtggtcacaccaagacccttgggctctcagacaaggggaatctcatcactccccagatcttacacgatggatgatgcttggaagtataatggagatgttgaagacattaagagaactccaaacaatgtggtcagcacccctgcaccaagcccggacgcaagccaactggcttcaagcttatctagccagaaagaggtagcagcaacagaagaagatgtgacaaggctgccctctcctacatcccccttctcatctctttcccaagaccaggctgccacttctaaagc

SEQ ID NO: 64224 - DNA, 1826 bp, Homo Sapiens
gggtttagagagcagggtcttggaaatacacagcccagaatatggagcattcggagaacagagtacagcattcctggaggaacagaatttgtcccttctagatcaactgaggaaactccaggacacatggtgattgagagtaatcaagacgaaaaccagcagcagcagcacgctgcatcttggtcagtaactagtctccttctgcctcctccttgtacctgctatgtactcctctgacacaagggggagccttgccagctgagcatggagtgttgtcccgccagcttcgtgccctccccagtgaggacccttaccagctggagctgcctgccctgcagtcagaagtgccgaaagacagcacacaccagtggttggacggctcagactgtgtactccaggcccctggcaacacttcctgcctgctgcattacatgcctcaggctcccagtgcagagcctcccctggagtggccattccctgacctcttctcagagcctctctgccgaggtcccatcctccccctgcaggcaaatctcacaaggaagggaggatggcttcctactggtagcccctctgtcattttgcaggacagatactcaggctagatatgaggatatgtggggggtctcagcaggagcctggggggctccccatctgtgtccaaataaaaagcggtgggcaagggctggccgcagctcctgtgccctgtcaggacgactgagggctcaaacacaccacacttaatggctttctgggtcttttatttgtacccatgtgtctgtcacaccatgaatgtacctggggaaatcaactgacctccctgaacatttcacgcagtcagggaacaggtgaggaaagaaataaataagtgattctaatgctgcctaggtcaccctcaacccccatttactggcacaattgggtggagagaagggaaggggtatgattgtcctgatggctcagggttgcaggaggttcagaggggaaggaggaaaggccaggctggaggctgggctgttagcacttccctcccacagttcagacggctcactctgggctcaggtttgccatggcttcctttggtccaaacataggccctgtccttagtcctgtgccctgtttgacttttggccaggaggcctttttgtgctgctgctgttgcagggctagctgcatggcccatatgctcagtggccgcgatgtaggccagtgagcggaacacgtcgcgtgcatggcagtatgcctctggggtctggaaggccagacccaggcgctcccacacggtacggtagcagccttcagctgtctggaagccctcccaagtcaggccctcttggatcatggtagctgccagcccgtagaccactatccacccagacttcatcagagtgcacactggatttatcagggacagcatggggctgcatcccattcggagcccccatggccccctcctgcaaaggcctggacgttcagctcgaaagatagtgtggagagcacggaccacgatgtcgggtaggaaacacctcagtgtgtcctttctcttaaggcacaaggctctcgggaacgagtctgtccagaacactggtcgagatacgtaatgagatgaggcgagagctgctggatagtcgtaatagggcagtccctgcagtttggtaaggtctggccaggggatgaaaactttctggtgcgtccacacagagcgtggactaaggcaggcgaaggcgaaacaggcgggcccaaagtgggagccataaggaaggtgaacagagacacaaaagctttagtagcgaaccacggaagtctagaaatagggtccagagatt

SEQ ID NO: 64225 - DNA, 822 bp, Homo Sapiens
cgagtttcctgtttaagatggcgtcccccgtagcagcgcaggccgggaagcttctgcgagccctagcgctgcggccccgcttcctggcggccgggtcccaggcagttcaattaacctccagaagatggctgaacctgcaggaataccagagcaagaaactgatgtctgacaacggagtgagagttcaaagattctttgtagcagacactgcaaatgaagctctcgaggctgctaagagactaaatgcaaaagaaattgttttaaaagcccagatcttagctggaggaagaggaaaaggtgtcttcaatagtggtttgaaaggaggtgttcatttaacaaaagaccctaatgttgtgggacagctggctaaacagatgattgggtacaatctagcgacaaaacaaactccaaaagaaggtgtgaaagttaacaaggtgatggttgctgaagccttggatatttccagagaaacctacctggcaattctgatggaccggtcctgcaatggccccgtgctggtgggcagcccccaggggggcgtcgacattgaagaggtggctgcttcaaacccggagctcatttttaaggagcaaattgacatttttgaaggaataaaggacagccaagctcagcggatggcccgaaaatctaggcttcgttgggccttttgaaagccaggctgcagattcaaattacgaagctgtataatctcttcctgaaaattgatgctactccagtgggaaagggatccctttggtgaaaactccaaaggacaagttgcctgtttttgatgcccagataaactttgatgaccacgcagat

SEQ ID NO: 64226 - DNA, 496 bp, Homo Sapiens
ggacgtcttctttatctgctgggacatgcctgaacacattcacgggcacacggaatgggtcaccaaggtagtttcgagaagtgcaaagtcaagtctctctgcacagtcctggagactacatcctcttaagtgcagacaaatatgagattaagattgggccaattgggagagaaatcaactgtaagtgcttaaagacattgtctgtctctgaggctagacgtatctgcctgcagccaagacttcattttgactggcacatacattgtctgtagttctctgcacttggtctctaccagtgggactttgccagttatgatattctcagggtcatcacagactcctgagcattgcaaacttggccttgcgttgggtttggagatatctttgccctgctgtttgacaaccgctacctgtacatcatggactcgcggacagagagcctgcttagtcgctggcctctgccagagtacaggcaatcaaagagaggctcacgctt

SEQ ID NO: 64227 - DNA, 365 bp, Homo Sapiens
gacaagctcaagtcatgtatgaggcacgtcctgggacccccacccctcatgccataggaaggacagctttgggcagagggaaggaggtttgagatcagggttgggcccatacagattgtgtgaggtggtctcaagtacaaatacttatctgaggctcctgaacaggccactttcctgacgtactctctgtacataactcagcgtccgtgactgcagtaacagccagccctacccagagtatttctgagccatgaggggcccaccagattggttctgaattggattcatgcccagcgcattagaatagtaactcgtttcagattttttggagggacgtttggaagtggctactctcttatgccctt

SEQ ID NO: 64228 - DNA, 394 bp, Homo Sapiens
gaaaagtttacaacctgcttggatttttgcccctttttttgtattgagtatagattccggctcatgggttgccatagagtctaggaacaaggagtatagtttctttatctttccaagagggtgctggggaggagaaagaggtgtgtttctcaaggttaacaggctgtagttctgcagggagagcctgaagtcctggtatgggctcttgattctgtgacaatttttttgatccatctatttctctcactcctggctttctagccacattctgcacctccttcctgctttcctagagcctcggtatgctttccctcaaccgacctggctcaggaggttgatgccatgggaacctgaacctgaaacacttcatggtagtaatttcctgttttcctgc

SEQ ID NO: 64229 - DNA, 500 bp, Homo Sapiens
cctgggtgcatgcatttgggtcggctcccactattccacctttgacggcacctcttacaccttccggggcaactgcacctatgtcctcatgagagagatccatgcacgctttgggaatctcagcctctacctggacaaccaccactgcacggcctctgccactgccgctgccgcccgctgcccccgcgccctcagcatccactacaagtccatggatatcgtcctcactgtcaccatggtgcatgggaaggaggagggcctgatcctgcttgaccaaattccggtgagcagcggtttcagcaggaacggcgtgcttgtgtctgtgctggggaccaccaccatgcgtgtggacattcctgccctgggcgtgagcgtcaccttcaatgccaagtcttccaggcccggctgccctacagcctcttccacaacaacaccgagggccagtgcggcacctgcaccaacaaccagagggacgactgtctccagcgggtcgggtggcg

SEQ ID NO: 64230 - DNA, 344 bp, Homo Sapiens
caaccatagaatggcctctggacgagtacacggggctcagtgcagatgctgacggactttggcccccatggggtgctattcctgccacaaagccattcttcactgacgggacccttcgggagcaggtgatatatcccctgaaggaggtctaccccgactcaggtgagctggtcctccttaggtcatgtcctctccttctgtcatggttgtccctgctctacctgactgtggcctcatctgtgcccttggggagaggctccagccaggccgctgattcaaggaagaggggctcctctcctcttcctttgactgttttggggtctgtacccagatctcacctcatt

SEQ ID NO: 64231 - DNA, 350 bp, Homo Sapiens
gaaatcagttcaaagtttatttatagatatatctttccaacacaacactgaccgcttagataaaaatcttaagttatttatttctgtgttttaaacataaatatgtttacttgtgatttagctttggagcaaatttaggtaagttatctacttagccaaatgtactctagtagactagaaccattctttgtgaaatgtcaaaatatggctatggtttcaggaactttaaaatcggttgtattttactttaaatagagatgtagcaatatctcgtttgctaatatttatattgatgacttactccttttttgttgaattgtacttctggttttataacctgaaatcatcta

SEQ ID NO: 64232 - DNA, 578 bp, Homo Sapiens
ctgtccgcccctctctggagaatgtttctttccttctttttcagcacttgcttgggtttcctcccaaaggttcacattcagaccatagggatcctcgtatcagagaaagctgagttacagacagccctggctcacactcagcatgctgccaggcagaaagaaggagagtctgaagatctggccagccgcctgcagtattcccggcggcgtgtgggagagttggagcgggctctctctgctgtctccacgcagcagaagaaggcagacaggtacaacaaggagttaaccaaagagagagacgccctcaggctggagttatacaagaacacccaaagcaatgaggacctgaagcaagagaaatcagaattggaagagaagcttcgggtcctagtgactgagaaggctggcatgcagcttaacttggaagaattgcaaaagaagttagagatgacggaactcctgcttcaacagttttcaagccggtgtgaagcgcctgatgctaaccagcagttacagcaggccatggaggagcgggcacagctggaagcacacctggggcagtaatggagtcggtaaca

SEQ ID NO: 64233 - DNA, 560 bp, Homo Sapiens
agcaagatagtgaggggaagcaagcacttatttggctacttggtgtccatggggaaagaattcctaatgctccttatgtgttacgcggactttgttgagaatgtgaagtcggaaacatttccagctgttaagatggagctgctcactgctttgctgcgccttttcctctcccgacctgctgagtgccaggacatgctaggacgtttgttgtattactgcatagaggaagaaaaagatatggctgtacgggaccgaggtctcttctattatcgcctcctcttagttggcattgatgaagttaagcggattctgtgtagccctaaatctgaccctactcttggacttttggaggatccggcagaaagacctgtgaatagctgggcctcagacttcaacacactggtgccagtgtatggcaaagcccactgggcaactatctctaaacgccagggggcagagcgttgtgacccagagcatcctaaaacttcatcctttgccgcatcagacccgtgattcctgaagagaaaaaggagaggggatcaagacatcccaaagttatg

SEQ ID NO: 64234 - DNA, 407 bp, Homo Sapiens
aaagaaagagaaagaaggaagggtggggacaggccagtgacgaagagagggacagaggagggatgggaacaggctgtgcatcttagttggagagaggggtgtgggaggaagcttgagtttgatgcagggaggaggaaggctgaggaatgacttggctccagattacttggttattaagaagaacaataaactaaaggaaagcattgcttgaagagatggttttgctgctctccttgaggatacgtgcaagggaagttgggctgttgtaaacagggtgaagggtgtgtttggtcggccatttctgtctcacctctaggccctctgctggtgctgtggaggccaagaccccattaagcctacaggtgatgggtcctcgcctaggcttagtgctaccatgtgggttttgt

SEQ ID NO: 64235 - DNA, 586 bp, Homo Sapiens
actggcgcgcgccagctactggactttgagagtggcctacaaagtaatgtgttccacggccccgtttcttcctaacagtggtgattctactctggccatgtgtgcccgtgacgggcaggttcgagtagcagaactgtctgccacacagtgttgcaagaatacaaaacgtgtggctcagcacaagggagcgtcccacaagttggcactggaaccagactctccctgtacgttcttatctgcaggtgaagatgcagttgttttcaccattgacctgagacaagaccgcccagcgtcgaaactggtggtgacaaaagagaaagagaagaaagtggggctgtatacgatctatgtgaatcctgccaatacccaccagtttgcagtgggtggacgagatcagtttgtaaggatttatgaccagaggaaaattgatgagaatgagaacaatggagtactcaagaagttctgtcctcatcacctggtgaacagtgagtccaaagcaaccatcccgcaagggtttttccaagccaggaggcactgagatgaccggccagtgacaaggatgaagacatgcagctcgatctacatc

SEQ ID NO: 64236 - DNA, 942 bp, Homo Sapiens
aacaccgcccctgcctgtgctctgcctcgggccatcgctcctccccagggcccagtgcgtactcgcctccgtgaagtgtcacaccatgtctgaccggaaggcagtgatcaagaacgcagacatgtctgaggacatgcaacaggatgccgttgactgcgccacgcaggccatggagaagtacaatatagagaaggacattgctgcctatatcaagaaggaatttgacaagaaatataaccctacctggcattgtatcgtgggccgaaattttggcagctacgtcacacacgagacaaagcacttcatctatttttacttgggtcaagttgcaatcctcctcttcaagtcaggctaggtggccatggtgaaggtgtcagtggcggcggcagcgatggcaagcaggcggcgttgctgggactgttttgcactggagccagcatcaggatgtcctctccaatggctgtgctactgcatggactgtatactcgatttcatgtgtatgtcgcagtaaacaaaaccaaacctctttctgtttagttgcctgggggaagaaggctgctttatgtttatttttcaagactttaaaaatattttttggttgtattgcactaggaaatctctcccacctctcccttttctctttctttccctatacgaaattaaagggccaccatagagactaggcggccgaaagactaggagggctgaggaaaagaaataggtctctggaggtggaactacaactgtgcagctgcctcttcctggcggtggatgctgctttgggagggccagggaggctgcagggggacagtgttgggattgtcaaggaaaaaggggtaggaaggaaggtggagggattgatctagtaccagggagaatattccactgaactgtgattctatggcttgggcggagggtggggtggggaccttcttgaggggt

SEQ ID NO: 64237 - DNA, 1281 bp, Homo Sapiens
cataactactatgtactgtgtagagccattctatatgctgaatgttctgctgttgcaaacttgccagggtattagccagtgtttgtgccaagcagttttctgggacaacagaatgactcagaccaagatggataggatggttagggctttgcttcttgctgtttttctttgaagctagttcattgtcctgcaggtcccttcatcttccatacctagcccactcttttagcccttaccttaaatctctcagataagttggttcacaaagaatgttaagtactgaatcatgtgtgactgagaccagagatggcaaatgaatggcacaccatttctccttctcctgccccagggcaggtaccactgatctgcatcagagttgcctgctattctctggtgtatccttcacatctaggtgccctcaagcagctgtgtgagtgttgagatctctgccatctctggctgagatactgctgtcctgtgaagtgtttccccatgacctttttcttcccctttgaatccctctgtctggagtagtccttgcctcttcctgctccagtaggggccttttccctaccccagcccctgtgccaggctaagctggtacaagagctgccaaacctcacagagagtttgctacgccagagaagtgcagggaaaaaggcagagggcatgcaccctttcccccccttgaagaagagggggaaaagggcctacagtggcccccccctaaattgccttgaatcacacttcagcttacctcctaaatgcctggtggaggggactggaagcctgctggaatcccaaccgttggtgggtggtacgaaggccacacgcggaacaagggggggcccccaacctgggggtttccccaggttccgcgaaatgttggcgccccccaggtaaaggggggcagacttttgggcttccaaaccttcccattctaaggcctcagaaacgttaccggacttagtctacgagagaattggcgttccccgcaacccttacccgtccttcactatccagtagagccaatatctacgtctataacgcacttcacatcgggacggccgcatcagcgatttttcgaaaataaagcccccgctaaggcccgagcgccactacgctattggctgtgaccgcggcaacatcccctacacatcgcttgccgctccccccccaatctctcccacccccattgagcttgcggataaccgcacgctaactcatgacacgagcttatatttcttcactatgattagcccccctctttcccactccccc

SEQ ID NO: 64238 - DNA, 519 bp, Homo Sapiens
tatagcgcctaggtacccactgggggcttcctgttaacctggggactggtgtcattctggggcctaatgaccacctggagtttgtattattcacctagtggcctggtgtccacttggggcttgagtgtaaccttggacctggcacccacataggattgggtatcaaactgggcccttggtgtccatttaagacatcatgtgaacctggctcctgagtgtccacttggggccaaatgactactgggggcctgaatgtcaacctagaatctgaggtttactaggggcctaggtatccacctggggcctattgtccacctgagcctgggtgtcaacctggggcctgatgtaaacctctagttcagtgtccaccttgggcttgatgtcaacctggagcctgatgtccacctgagtactgatgttcacctttgacctgatgtccacctgtggactgtttatccacccatggcctgatgttcacctggggctgaatgtccaactgtgacttgttgtgcacctgga

SEQ ID NO: 64239 - DNA, 238 bp, Homo Sapiens
gacagcacatgaaggaccgctccttcaactccccccttacatgttcacgtggatgagaacacccctgtccacgtccacataaaaaaactcccgaaaccatcagcgaccagcagccagaaatctcacaagcgaggaatgaaaggggacactgtgaatgtgcggcggagtgtccgggtgaaaaccaaggtaccttggatgccccctggaaaatcatctgcccggcctgtgggatgcaagt

SEQ ID NO: 64240 - DNA, 378 bp, Homo Sapiens
tcttaaagccaaaattagaaaaataactccctacttttccaaagtgaattttgtagtttaatgttatcatgcagcttttgaggagtcttttacactgggaaagtttgtagaaattttaaaataagttttatgaaatggtgaaataatatgcatgattttaagtattgccatttttgtaatttgggttattatgctgatggtatcaccatctcttgaaattgtgttaggtttggttattttgtctggggaaaaaatatttactggaaaagactagcagttagtgttggaaaaacctggtggtgtttacaatgttgctaatcattacaaaacattctatattgaagcactgataataaatatgaaatgcaaaacctttat

SEQ ID NO: 64241 - DNA, 409 bp, Homo Sapiens
  misc_feature (59)..(59): n is a, c, g, or t
  misc_feature (62)..(115): n is a, c, g, or t
aaacacatactccttaatttacctgttgttggaaactggagaaatgattgtcgggcacncgnnnnnnnnnnnnnnnnnnnnnnnnnnnnnnnnnnnnnnnnnnnnnnnnnnnnnncttgtgtcatattttaaaattactaactgccatcacctgctggggtcctttgttaggtcattttcagtgactaatagggataatccaggtaactttgaagagatgagcagtgagtgaccaggcagtttttctgcctttagctttgacagttcttaattaagatcattgaagaccagctttctcataaatttctctttttgaaaaaaagaaagcatttgtactaagctcctctgtaagacaacatcttaaatcttaaaagtgttgttatcatgactggtgagagaagaatcacaa

SEQ ID NO: 64242 - DNA, 504 bp, Homo Sapiens
ggttaggaagtttatttgaggaatgagcccttgactagactagaccctctacagaaagggctggccttgccgtcctgatatgtcctccagtgaggaatccctcataccatcagatcaggatagagcctttctcttttacattgcaaaactctgaaaatgttacatgatagttatttctatcagtctagaaagggccaaacaagctgacccatccaacacttcccagtaacccccattggtgagtccttatggcaactgtctgtcttggaatttgcagatggtagaacatgaatcaaaagctccatattttgatagccgtggctgagggtcagcacatctccagaattcagcatcacagctggccagggaagagaagcagtgagttccctatccttggggacaagcagaggcttcagaatcactgatggggatgttgaggggaacacttagggaactgatggggctggttgagatggctgtagcccccctaactctgtatggggg

SEQ ID NO: 64243 - DNA, 588 bp, Homo Sapiens
acgcaccttacaggtacaccgctttttttcccaagtaagggttctcgctgatgtggattgtcccaatcaggaaagccttgttggcttaggcctgtgacactccggaacactgggaggcggtaccccagagcctagcaggccgacaagcaaggactctagctcccccagagctctgggcctgcctcattcagagtgagcatctagacatggccccattttccagtgacctgggaggcgaagaagaggaggtggaattttggccaggacttacttctttgacattgggatctggacaggcagaagaagaagaggaaacctcttcagataactctggtcagaccagatattattctccctgcgaagagcatcctgcagagaccaaccagaatgaaggcgctgaaagtgggactatcaggcagggggaagagctgccatctgaggagctgcaggaaagtcaagggctcttgcatccccaggaggtccaagttctggaggagcagggacagcaggaagcaggatttcggggggaaggaactctgagggagatatattgtccgatgggctattagcggtgaacctattctggtg

SEQ ID NO: 64244 - DNA, 597 bp, Homo Sapiens
  misc_feature (57)..(65): n is a, c, g, or t
ttgtaaaattaaaagattatatttaaaatacttctttaggatgttattcagccatcnnnnnnnnncccaactaaaatgtcttaccagtaaagtattattaaaagcctcatttgtggagattcgctgacttccttggttaagctgtcttgtatttacttaatttgtcccctcaaccaggtgttttcttttcagcctgttactgtcctgtgccatttttaaaaatagccatcatgagtaagggcttctttaaaataatccctgacaatatctttggcattaatacgacataaagacaagacagtatatgtatgttttcattcctgttttgtacgagtgcctcattttgtagtcatgaaagtaacatagtaccttaaataaaaatgtaatgactaatctaaggtctaggaataactattgtagaagctaagtagaacacttagtttggggtgtcaattttctatcaacgcaaacaccttagggtacccagaccaattttatgtatatatattctgaaatgctccctttttaatgtggtcatttgttgccttctaagttgagaggacaaaactgaataaagtgaatgttaattgtagtcta

SEQ ID NO: 64245 - DNA, 797 bp, Homo Sapiens
tcaagctttatacttccagacgaagctgatcaggcaactgcagctgaaacattatctaaaaatgaagtgttatatgacggagaaaaccatgattgtgaggaaaagccacaagacattgtacagaacattgtagaagaaatggtgaacattgttgttggagatatgtgagaagggactactataaatgcaagtgcagatggcaacattggaactatagaggatggtagtgacagtgaaaatattctagcaaatggtattccaggaacacccatttctgttgcatatacaccatccttacctgatgatagattgtcagtctcttccaatgatactcaggaatctggaaattcttcaggaccttcacctggtgctaagttttcccacattttacaaaaggatgcctttctagtattcaggtcattgtgtaaactgtcaatgaaaccactgtcagatggaccaccagatcccaagtctcatgaactacgatccaagattctttccttgcagttacttctatccattctgcagaatgcaggacctattttcaggactaatgagatgtttattaatgctattaagccgtatctttgtgttgcactctccaaaaatggagtctcatctgttccagaggtttttgagctttctctttctatatttcttactttgttgtcacatttccagacacatcctgaagatgcccattgaggtgttctttaaagaaattttcttatacattttggaaacttctaccagctcatctgatcacaaatggatgttattcagacacttgcatccga

SEQ ID NO: 64246 - DNA, 779 bp, Homo Sapiens
ctctggatgcaaagtgtcattttcagaatggtcgatgtagggggccaaaggtcagagagaagaaaatggatacactgctttgaaaatgtcacctctatcatgtttctagtagcgcttagtgaatatgatcaagttctcgtggagtcagacaatgagaaccgaatggaggaaagcaaggctctctttagaacaattatcacatacccctggttccagaactcctcggttattctgttcttaaacaagaaagatcttctagaggagaaaatcatgtattcccatctagtcgactacttcccagaatatgatggaccccagagagatgcccaggcagcccgagaattcattctgaagatgttcgtggacctgaacccagacagtgacaaaattatctactcccacttcacgtgcgccacagacatccgagaatatccgctttgtctttgctgccgtcaaggacaccatcctccagttgaacctgaaggagtacaatctggtctaattgtgcctcctagacacccgccctgcccttccctggtgggctattgaagatacacaagagggactgtatttctgtggaaaacaatttgcataatactaatttattgccgtcctggactctgtgtgagcgtgtccacagagtttgtagtaaatattatgattttatttaaactattcagaggaaaaacagaggatgctgaagtacagtcccagcacatttcctctctatcttttttttaggcaaaaccttgtgactcagtgtattttaaattctcagt

SEQ ID NO: 64247 - DNA, 530 bp, Homo Sapiens
attgcttgacttccaccttctttaggagctgctcttgtctccctcttggccacttagtttgctggctcagtcactacttgaagaccccatttaatttttctctggcagttatagctcttgtgatttcagtacagtctcatctctcagacccatctcatccagaaggattgaagggataactatgaggtaagctggacattggagccgtgtttgctgccacgtcagcgtcttgctgggtgaatgtccagccataaatgggctcccgggctctggatctcatcagcattggaaatctattgcctctcatcagtctgacccaattatgtagagcattaatgtagagactccccttaatgggtataccagaggcagctggcataaaacatttctttcactttcctttcccactcagattgcttcaagagaccaactagatacacagggatctttacaaggaaaatctagcaacgtcattaccgttctaataagtattcctgttagacacttgcatccgaggggaccctctagat

SEQ ID NO: 64248 - DNA, 435 bp, Homo Sapiens
gttcatggcggccttattcacagtagccaaccgtatgaaaacaacctcaagctatatatttccagatgaaaggataaacaaaatgtggtccatccattcaatggagtattacacagccataaaaaggaatgaagcagtgatccctactacgctgtggatgaaccttgaatgcatgatactgaatgaaagaggtcagatgccaaagtgtcacatagtgtactgtccttttatacgaaatttccagaacaggccaatctgaagagatgcatagcggattggtggctttcagcagctgtggggaggtgggactgaggagcgactgctaatcagtatggggtttcctcccgggatggtgaaaatgttccggacctagatagtgacgaaggtagcacgacactgtgagtgcactaaatgctattgaattagacactttag

SEQ ID NO: 64249 - DNA, 728 bp, Homo Sapiens
gcggccgctctcctacccggacaccgacgtcattctcatgtgcttctcggtggacagcccggactcgctggagaacatccccgagaagtgggtccccgaggtgaagcacttctgtcccaatgtgcccatcatcctggtggccaacaaaaaagacctgcgcacgacgagcatgtccgcacagagctggcccgcatgaagcaggaacccgtgcgcacggatgacggccgcgccatggccgtgcgcatccaagcctacgactacctcgagtgctctgccaagaccaaggaaggcgtgcgcgaggtcttcgagacggccacgcgcgccgcgctgcagaagcgctacggctcccagaacggctgcatcaactgctgcaaggtgctatgagggccgcgcccgtcgcgcctgcccctgccggcacggctccccctcctggaccagtcccccgcgagcccggagaaggggagacccgtgtcccacaaggaccccaccggcctgcctggcatctgtctggctgacgcctctggtttgcgccaggacttggcgtgggcaccgggcgcccccatcccagtgtctgtgtgcgttcagctgtgttgcacaggccttggctccccactgagtgccaagggtcccctgagcatgcttttctgaagagccgggcctcagagtttgtggctgtgtgtctgttcgactcccctcgccccattttagcccccgtggtcccacctctc

SEQ ID NO: 64250 - DNA, 166 bp, Homo Sapiens
tttttttatttgtatagctctttttcttgtagccagtttttcctgaaagtcttgggtaatggaaatattacagtaaacccaagaaaaaatggagtttcagactcatttttccaaacactcagattcattggctgcttccaacccacttcatctgcaaggaagccgc

SEQ ID NO: 64251 - DNA, 644 bp, Homo Sapiens
gagtcaatatgtattggaaagaagcatgtagcaaaaaagacaaccttgatctttaataaaaaagaagttggtttatttccaaaataaatcccctgacaaaaaacctggtgatgttaagcaattgactgtcttagagtccagcagaagaccttagacaaaaaaagcagaacccactggagtagaaaaggaagcatgtagcatatactcagtagtgaaatttaattttactgactgttaggtatctatgccaatttgttttcatacttcagttggttttggaatctgccttatacctaatatttatttattcacactcataagcatcaaatatttaatgccctcagtgggaaatttgtgtttaaactcaatggaatctaatatttctttatgtcgttagtccctgtaaaatgttaggtcacccaaggaaaggggagaaatagcaatggttgttcctaaggtattgcttgccctccatgtcttcctaaagagcagaacttggagtttctcctttatgtagagaagaagtaacttagggtgtatttgcaatgaaatattcatagatattgaaagcttgtgtttacatgaaatatgtttattatcaagaagtcctttttccaattctgtacattaaatatatgtgtttt

SEQ ID NO: 64252 - DNA, 347 bp, Homo Sapiens
tagttatctattttttacatacttattattaccaccatgctcagtaagtccatttttgcatggaatatggagccttaaaacatgtcatgaatttggagtccctggcacataaatctaccttcaaatcagaggtccttaatgatgcctaaacatacagtaaaattagaatcagaactacttctttaaaaaatattcaaaatgtgtttgtttcccatgggattattctctatcccacacgaatgtaaaaaaatccccattaatgatccatttaagtatagttttattgggtccttttctaatgattaaaggttctttctcaatttcattcctcagtcctgcaagtaagg

SEQ ID NO: 64253 - DNA, 553 bp, Homo Sapiens
ctcggtacccgcccgacggggtggtactgactttttaaattttttacaagagtctgtattcctgatatgcctatatttttcctcaaagattctgcattttaaggatgggcataagcaaactatattttaataatttatagttaatgttaaaatattggctgatttagaccaaaagattcaaatctcctctttgtgaaatcccatctgcatttgattttttattattttatgttcccccgttagattgttttaagtgtttgcttttcatcttttatagatgtaatctgattttcaaaaatcattaacactttttaattagtatcgactaagactttttccccctggaatcgaggctgtgtgtccgtcatcccagcccccggttggagcctgctctttgaactccgctgccttccttagcagcttctgtcctcttctgtgagtcagtcagcgagtgcttccgatccgcatccagccgtgctgagcacacaacaaactgtgtgtggaaatggccaccaccattctccttccccactccgtcgggtcggggatcaac

SEQ ID NO: 64254 - DNA, 192 bp, Homo Sapiens
tctccgctcaaccgtacactggtggtggtgacaccacgggttctcaggagagccccgtggacctcatggaaggggaagcagagtttgtagacgagccccgctccgcggggggctgagctggagcgcccagaggtgatgcactgaggaggaggacgaggacgatgttcggttgaggggtagatgttcggtgag

SEQ ID NO: 64255 - DNA, 434 bp, Homo Sapiens
tttcgattccattatcatttactgcaaccggcgcgaggacacagagcggatcgctgcgctcctccgaacctggggtaagccacaggggtgaagaggggctgtccccgcgtccgctgagccctggtctgcccccagccatcgagactttgctgtgctacctggagctgcacccacaccactggctggagctgctggcgaccacctatacccattgcctgtctgaactgccctgggggccctgaccagactccaggcccatggcctacaggttagcacgccctgcccatttggagacgaggttggagaatcagggctgttggccacatgtccctttttccctgggcacaggtgtccccctttggctgtgtgcttggcccagcagctgcctgaggacccagggcaaggcagaagctccgtgtacggttgcgcggaaa

SEQ ID NO: 64256 - DNA, 498 bp, Homo Sapiens
  misc_feature (58)..(58): n is a, c, g, or t
gagcaaagactgaaaatagaccagatcttggtggcccacccatacatgaaagatctanatgcgctttctgccatggtgttggattgaagattgtgctgagcgctgagcttgcgctcagggctggctgatcaaactcaagctcacacctgtacctgatgggaatgaacataatgtgaagaaacttatttcccagtgtaaacgcagttgtacagaaaaaaaatgttttgggtataaatctgggttttcaaaaccagcttttttctatatataaattatgctgctattacagatttaacattttctgttaaaggaaagtctacattttctgcctgttcagaactgtttaatagcagttactcttgagtgtatttacctttttatgttttttaaactattttccttaaagccgaaaatattgacaaatggatatggttagcctttataaataaataaaaagaaaagtgttgctttcttaaggaaagcaagacgtcttaaagt

SEQ ID NO: 64257 - DNA, 458 bp, Homo Sapiens
cagtatgccaagaagaacaagcccaacctgcacatcctcagcaagctccaagaggagatgaagaggctagctgaggaaagggaggagactcgaaagaagcccaagatgtccattgtggcgtccgcccagcctggcggaaaacaatgttggcctgtgggccgcccacaacatatccttccctcactacctgtgtgaccaaggttggcttctgttgacctttaaaaaagaaaccctcaactcaaattgctataattagacacttgcttctgtcttgcctcctgtctgcagctgtgaatagtcatttgactgtgactgttgcccttagccagccagatgcgcctgtgaaccaaagcttcgtgcacatgtgttcccctaaaggttggggagcctcgctgtgtcttgctgttcccaggcaccaccatcagcaggtgctgccatactcttgtggtctctgtgcg

SEQ ID NO: 64258 - DNA, 592 bp, Homo Sapiens
  misc_feature (328)..(328): n is a, c, g, or t
atgagctaccatgccaggcctccttgcagggttttctatgcccttgatatctgtctccctgtcaacctgggaccttgctgtaagtcttgataggacagggagaagagggaggccctaccgaggctcgaggcttcagtgaagggtgacagcagtgggagtgtggtacagcctctggaaggacacagtgttctccccgccccttgtctgggagccaggactgtaccctccgaagccagacatcactgccaacatattcccccttgctggtgccctggcatctcagcacatgacacacacccacacctgcaggctgtggttccggcttggnctgctccccgtccggctgctgccgctgcctctctccagacctcgcttaaggacagtcccaaactcagctggggcaggtgttggcctgaaagtcctcccccagcctctgctggccagcttggtgctcacagctgctgggtaagctcttgcctaaggagctgtgggaagcagggctgatgccccagcaacctctcctcccactgtctttgaagaaagtagctttagaccggctaaaagctttaatccagagactgcctcaccaaat

SEQ ID NO: 64259 - DNA, 471 bp, Homo Sapiens
gaggtctgggcattattaatttataaaaatccatgctttacacctggacagtagacagggacttcagagattgcacgtttgaatacattctcccaagactgaggttgttcggttttaattcctgtagtccaatcacacaatttcttatggaaaaccttttgtgtttctggtatttaataacttgaagggatagcaaaatatactgtgtattcagagggcctctctgcagctgctagctcagacaccaaaggggtaaggcccaggacattcatatctttaaaagctgcaaacctggtaacctttaaacttttaaaacaaatgtcatatggggtaacactgaccttttataatttgatgtctcaaatgtagagattatctaaaaatcgtaacttgaataccttgtaatttttctcttaaaaaagaagacttgtgtaagtctctgcatcaacgccaataaacatgttgcttaat

SEQ ID NO: 64260 - DNA, 600 bp, Homo Sapiens
  misc_feature (39)..(40): n is a, c, g, or t
  misc_feature (54)..(54): n is a, c, g, or t
  misc_feature (137)..(137): n is a, c, g, or t
gccagggagctgtacaggagtctaagggaaacccctttnnaacaggactgaagngtcagtcaggaattgttcggtttttgctcagcaaatcagagttcgagaagaaagtgcgagtatctatatacgcaggccagtanactgttggtgcaagcagaaggcgctggaattgttgcccaaggtggaagaggtggtgagcttaatgaatgaggatgagaagactgttgtccggctgcaggagaagcggcagaaggagctctggaatctcctgaagattgcttgtagcaaggtccgtggtcctgtcagtggaagcccggatagcatgaatgcctctcgacttagccagcctgggcagctgatgtctcagccctccacggcctccaacagcttacctgagccagccaagaagagtgaagaactggtggctgaagcacataacctctgcaccctgctagaaaatgccatacaggacactgtgagggaacaagaccagagtttcacggtaacagcttgtgtgagactcctgcgattccatgtcctttctttctatggcaaaatagaagagaaaatggaaatgcaatctggcattatcctcaacctcaa

SEQ ID NO: 64261 - DNA, 464 bp, Homo Sapiens
caagagagagtgtagcacccattttacagtgccatgcacatcagagaaagaaactgcatgtttgttgttgatgatgaaataaaaatgctagcgacagtctttcttactggtgcttaagctcttctttgcacaaagctttataaagggaattcaaaggaagccctttagaattagagtcttgagggacagcactaacaggcctttattaagtatgattgattgttaaatttcagggaacatgattggtctgctgtgtatttgaattcatgtaacaaagaactgttacgatgggattctgctcattttattaaaaagctactgacttgactgtcatcctgttcttgttagccattgtgaataagattttaatgttgataattctgttatttacatatctctaatttactttgaaattcaaaggtgaaaataaaaaatgatggcctaagtaaaatttacaaacatac

SEQ ID NO: 64262 - DNA, 630 bp, Homo Sapiens
agaatacttcagggtcctctgtggaggatgtcttgagccagagtttaagcctgacacacaggctttggtcctcactgagctgtctccaagactggaactacttagtgactcggcaaattttctgccccccacccctcatcaaagctgctagttcagatgttgacagtgttttcatgaatgttggaatcttactagtccagacttacttaggatgttgttggggaaggcacttgggattttctgtgtcttgcattcacagagggaggccatttcagattcaagagcattggattagggaatcgtgaggcagggatgctactgcgtatttctctctgcaggttggggattaaagttcctttccccatgggtttgaagcagactcagactgtctcaggatcaaagcaaccctcaatggttttgatttatgtcattgcttaccactccccaaccaatcccaggacagctgggtcactgtacccctttgtggtatctgtacctgggcctctccttcctcatagggaccagctgattgaataaatgtgaccaccttatttccacccgccaccacagcgcatctgcgtagctgccgaactcacgcggcctactcgttcaccgcgtccttctcttgca

SEQ ID NO: 64263 - DNA, 616 bp, Homo Sapiens
tgggatgagtgactttattgatttgagcagcatatgctgtgattggctgccctgcaaatttgtttcccttaaggaaccctcaccaactaatctctgctggatttgggagttccgcatcttttgtggagggcagagtatggacatcttacacccggtggtcaagtgtgtaataaacttgagcattcgaatgggagtaaaagcaaatcgcacaatgacatattttgagtaataaccgtatttttcacagggtgacaaattgggccaataaatctgccatctttgaactcatctctggtggctagactgctacgacagcttctctgatgggaaagttccttttagtggcttaacactcaccctttcttcacagctcacatttaccaatgactctgctccgtttatggagcagactgttgtaaattgctcaggagcatgatggaaccatgaacagagactcttatcagtttccagacaagaccttatctgcactaatgccttctacctgactttccattctctgctggatgacgtgagtaaagcctgaatctttggagtacgctggagatagttgtaaatggcgagatagttataaatggcgagatagttgtaaatggcg

SEQ ID NO: 64264 - DNA, 868 bp, Homo Sapiens
  misc_feature (644)..(644): n is a, c, g, or t
  misc_feature (852)..(852): n is a, c, g, or t
ggcatcccaacggcgccacctttaagcgtcacgggtggggctgcagcttctggacctaggactttgaacatgtcgcgcctgaagcggatagcggggcaggatctccgcgctggtttcaaagcaggtggaagagactgcggtacctcggtaccccaagggctgttgaaggcagcgaggaagagcggccagttaaacctgtcgggtagaaacctcagtgaagtgccgcagtgtgtctggagaataaatgtggatatccctgaggaagctaatcagaatctttcgtttggtgctactgaaagatggtgggagcagacagatttgaccaaactaataatatcaaacaataaacttcagtcacttacagatgacctgcgactcttgcctgcactgactgttcttgatatacatgataatcagttgacatcccttccttctgctataagagagctagaaaatcttcagaaacttaatgtcagccataataaactgaaaatactccctgaagaaattacaaacctaagaaacctgaagtgcctgtatctccagcataatggattaaccctgcatatcagagggaatttgaacaacttttccaatttagaaagaatttagatcctttcaaaccattcatcttaacaactggntcccggctagattttcctttctcccgtcccagtcctgggtgccgaactcaaatccttttctaggaaaatggaacctggaaagagagttgggcccagcccggaaaattaaatttagaaatgggaaaagaggtgtggaagccatatttggaaaatgtggaaattcccaaaaccctcccttggggaaaaccttatataccctcccccgganatattggggctgtggc

SEQ ID NO: 64265 - DNA, 887 bp, Homo Sapiens
tcacctgggccttgaagaggagcacttatcatgaggcaagcaggaagtacaccaatgacgttgccaagatctactcgataaatgtgaccaatgtcatgaatggcgtggcgtcctaaggccgtccctgtgccgctagaagcctctgatgtgggctcttcctggcacatcttgtcatgctggataactataattgaccgagattacaggaacatgcagcgtcctgccccccataacacaattcttaaagcccaccagccttatggtgtccaggcctgtgtgaccctgtggtatcagggaccaagaacaacaagatccactctctgtgctacaatgattgcacctttctcacgcaacacgtccaaccaggactttgaactaacaacttctcccgctttggcaaaacaccgtcactcttgctggagggccaagcttcaacttccaaaaggggtttgaaatacttcccattcaactttacccttcagtctctgtggaaaaccagggtaggaaaatgtctgtgtgcaccgacaatgtcactgacctccggattcctgagggtgagtcagggttctccaaatctatcacagcctacgtctgccaggcattcatcatccccccagaggtgacaggctacaaggccggggtttcctcacagcctgtcagccttgctgatcgacttattggggtgacaacagatatgactctggatggaatcacctccccagctgaacttttccacctggagtccttgggaataccggacgtgatcttcttttataggtccaatgatgtgacccagtcctgcagttctgggagatcaaccaccatccgcgtcaggtgcagtccacagaaaactgtccctggaaagttgctgctgccaggaacgtgct

SEQ ID NO: 64266 - DNA, 1032 bp, Homo Sapiens
  misc_feature (979)..(979): n is a, c, g, or t
agtgacgtcgccgggaaccctaaggactctgcaatatgaataattccctagagaacaccatctcctttgaagagtacatccgagtaaaggcacggtctgtcccgcaagcgacaggatgaaggaatttctggactcactggcctctaaggggccagaagcccttctggagttcttgcagaacagcaccactaccatggtgtaccaacagggtgggaactgcatatacacagacagcactgaagtggctgggtctttgcttgaacttgcctgtccagtcaccaccagtgttcagccacaaacccagcaagaacagcagatccaggttcagcagccgcagcaggttcaggtccaggtgcaggtacagcagtctccgcaacaggtctcggctcagctctccccacaactcaccgttcaccagcctactgagcaacccatccaggtccaggtgcagatccaaggccaggcaccacagtcagcagccccctccattcagaccccgtctctgcagagtcccagtccctcgcagctgcaagcaagctcagatccaggtgcagcacgtgcaagcagcccagcagatccaggctgcagaaatcccggaggagcacattccacatcagcaaatccaggctcagctggtgggctggccagtctcttgctggtggtcagcagatccaaatccagaccgtgggtgccctttccccaccaccatcccagcagggctcaccccgggaaggggagcggcgggttgtgcacggccagtgtcctccaaccagtgaagaagcgcaaagtggacatgcccatcactgtgtcctacgccatctcagggcagccggtggccaccgtgctggccattccacagggccagcagcagagttatgtgtctttgaggccagacttactgacagtagacagtgcccacctgtacagtgccactgggaccattactagccctacaggagaaacctggaccatccctgtntattctgcccagccccggggggaccctcagcagcagagcattacccacatgga

SEQ ID NO: 64267 - DNA, 287 bp, Homo Sapiens
gggaagaggcccgcaggagatctgggcaaggttatccaggatgtgctagaagacaaagtgctcagcgtccacacagaccctgtccacctctataagaactggatcaaccagactgaggcccagacagggcagcgcagccatctcccatatgatgtcaccccggagcaggccttgagccaccccgaggtccagagacgactggacatcgccctacgcaacctcctcgccatgactgataagttccttttagccatcacctcatctgtggaccaaattccgtatgggat

SEQ ID NO: 64268 - DNA, 447 bp, Homo Sapiens
ccaaggccttgtatcgggccggagtggcctttttccatctgcaggactatgaccaggcccgccactacctcctgggtgccgtgaataggcagcctaaagatgccaacgtccggcggtacctccagctgacacagtcagaactcagcagctaccatagaaaagagaagcagctctacctgggcatgtttggttaacaaagaagaaagatgctcctccagttgaacttaggtggaccattaaacatgcatgaaggagaaatctgagcctcagcaagagaaattaaccctatacctctgacccaggtggatttttgtttctagttctgcacaaacttcactacttagacagtctgagtctttttctgtctatccatctgtttatttctatacctttcaatacatgttattgttgcagatatttggcttgagaaatataatcagaaaacat

SEQ ID NO: 64269 - DNA, 794 bp, Homo Sapiens
  misc_feature (748)..(748): n is a, c, g, or t
gggcatccgcatcattaacacgctcacgtcgcaggagcacacactggaggtgggggttctggagtccatatgggaaatcctacaccgctatctcccctataactcacatgctgccagctacacgtggaaatatgaagggaagaacctgaacatggattttaccctggaagagaatgggatccgggatgaggaggaagaatttgactatctcagtatggacggtacacttcacacacctgcaatacttctgtacttcaatgatgatctcacggagttgtaggcaaggagatgtacactcgtgtagactcaagacgtatttcgagtttggctttttctgtgccttgaggaaaagtggtggggccgaggggtgcctggacccagatctccactcctctccaggagctagcctgtgcccttctgaagtgtaaaggccctattccctgccttcattacagtttgctctgagaaaattagtgaattaatctttgggaatgatacaagaagatcaagtaccttggtttagggagatgtagaagaggatagtcagagttcaggcagaactgtttgatagttaagagagagtagttctacaggggtgagggatggaaggacttttttggcaatgatggaaatgagatgtctgcaggaagatgggatttacaaagaaataggaaatgtttatcattgaccatacaaagctggcttatcttacttgtaaaagagtgtttggcagctgaaacccaagggnaaagaaaggaagtggcgtcattttataggcaattcagggctagata

SEQ ID NO: 64270 - DNA, 1237 bp, Homo Sapiens
ccacgcgtccgaaacttcttgacaatttgcttgcgcttataagaacccacaatacattatatgcaccagaaatgctagccaaaatggcagagcctttcaccaaggctctggatatgcttgacgcggaaaaatctgctatattaggattacctcaacctctcttggaactcaatgactctcctgtcttcaaaaccgtcttggaaagaatgcagcgtttcttctctaccctctatgaaaactgttttcatatcctagggaaggcaggcccttccatgcagcaagacttctatactgtggaggaccttgctacccagcttctcagctcagcctttgtcaacttgaacaatattcctgactaccgactcagacccatgcttcgtgtctttgtaaagcctctggtgctcttctgtcccccagagcactatgaagccctggtatcccccatcctcggacctcttttcacctacctccatatgaggctttctcagaaatggcaagttatcaaccaaaggagcctgctgtgtggagaagatgaggctgcagatgaaaacccagagtctcaagagatgctggaggagcaactggtgaggatgttaacccgagaagtcatggacctaatcacggtttgctgtgtttcaaagaagggtgctgaccacagtagtgctcccccagcagatggagacgatgaagaaatgatggccacagaggtcaccccctcagctatggcagagcttacagacctgggcaaatgtctgatgaagcatgaggatgtttgtacagcgctattaattacagccttcaattccctggcctggaaagatactctgtcctgccagaggacaacctcacagctctgctggcctctcctcaaacaagtgctgtcagggacactgctcgcagatgcagttacgtggcttttcaccagtgtgctgaaaggcttacagatgcacgggcagcacgacgggtgcatggcttccctggtccatctggccttccagatatatgaggcactgcgccccaggtacctggagataagagctgtaatggagcaaatccctgaaatacagaaggactcactggaccagtttgactgcaagcttttaaacccctccctgcagaaagtggctgacaagcgccgaaaggaccaattcaaacggctcattgctggttgcattgggaaacccttgggagagcagttccgaaaagaagttcacattaagaatcttccctcactttt

SEQ ID NO: 64271 - DNA, 382 bp, Homo Sapiens
cagcccccgcaagacgaggattggaacctgtccttgtcctccacctgggggtgactggcagacatagccagaggctggggaaggttccagacaattctgaagctgggcccacctcccccgacttctcaagccactttggaacctaattccacaaagatgacttgcacgggtcacccagcaacttccgcacttaagtagcaacctgagcactcctgactgcatagcacgccggcgcctggcactggggaaacggtagcagctcctgcagggcgagtgagacccctgaataggccaccgggggcagagggacaaaggctgtggtgcaggaggggaacatggaggagatgggaggaggtgcctgaccccgtcttgcggggcagcg

SEQ ID NO: 64272 - DNA, 1037 bp, Homo Sapiens
gcaccgtgagggctgcgtcccacgctaccacaaggccctgctgctcctggaggggctgcagcacatgctctcggaccaggccgacatcgagaacgtcaccaagtgcaagctgtgcattgagcggagactctcggcgctgctgactggcatctgtgcctgacctttctggcctggctgggccccccgtcctgccgagccctgcagagtgggctctgtgtgctggctggactcctcgggacaagcccatggcgctgatcgctggtgctgagccctgccctgggccccacggacagtcagcctgccggcctccctgcagctcacggggcagaaccagcacatctggagccacacagcttggggggtgtctcccatcttttacaggtggggatcacagaatttctgcccctccagctgcctggctcagcaggcgtgggtgccaccgaccctctagccccagggcagccccggaggacaggcaatggcctgagaccactgccgactcaaagccaaagcgagctcctgcttagggcaggtcagcaggcactgtgcccaggaagagcctgcggcctcggcgtcccccagtctccaggagcctctccctccgagatacccacccagctttgtccatcacccaagcactttatgcatatagagacagaacctggacctcaccagggactgctgggcagcgattcctggcagtggcctggtgtttgtacatacacatatgcagacacatgccagggccccccaagcccgagcaccggaccacgttgctgcccaggtctggacctcagcgggagaactggctccggggggagtggggccctgcgctagaggcagaggcagttctttgttcaagcgttcctctggggaccggcagcagaggcaccgtgttctctcagccctggatacgtcttgtaatctttcacactttattcctaaaacgtgtcttatttttatgcagctcattttttctttaaaggagaaaacttgtaggtgtttaagaattggttttgggaggcgagtctttgggc

SEQ ID NO: 64273 - DNA, 395 bp, Homo Sapiens
aggaaaagaacccagcccactaagacgcgacccctcagacaggcgtccaagaagcccctgctggaggacgaccctcagggtgccaggaagatctcgtcggagcctgttcctggcgagatcattgctgtgcgtgtgaaggaagagcatctagacgtggcctcgcccgacaaggcttcaagtccagagctgcctgtctccgtcgagaacatcaagcaggaaacagacgactgagccttcctgcctccagcctggcttctagctggaagccagcccagcgtttctctaccaccaccaccatgcctccacctgactttggcttggagactgatcctctctgtgtaaattctgcccgggggctgcccgtcttgcgggggctgcccgtcttgcgggggctg

SEQ ID NO: 64274 - DNA, 828 bp, Homo Sapiens
gggcccggggccgagacgatggctgaccacaacctgacagcgactccacgccgcgcgggctgctgcgacgcgtgctggatacagcggacccgcgcaccccgcggcgaccccggagtgctcgggctggagcccggagagccctgcttgaaacggcttcccccaggaagttgagtggccaaacaaggacgatagccagagggcgttcccatggagccaggtctgttggcagatcggcccatattcaggccagtgggcacttggaggaacagacacctcggacgctgctgaagaacatcctactaactgccccagaatcttccatcctgatgcctgagtcggtagtgaagccagtgccagcaccgcaggcggtccaaccctccagacaagagagcagttgcggcagcctggagctgcaacttcctgagctcgagccccccacaacccttgctccaggtctgctggcccctggcaggaggaaacagaggctgagactgtcagtgtttcagcagggagtggaccaggtgctgtctctctcccaagagcctcaagggaatgctgatgcctcttccctcaccagatccctcaacctgacctttgccacacctcttcagccacagtcagtgcagaggcctggcttggcccgcagacctccagcccgccgagctgtagacgtgggtgcctttttgcgggatctgcgagatacttccctggctcctccaaacattgtgttggaggacacccaggcgttctctcagcccatggttggctcccccaacgtgtatcactccctgccctgcacgcctcacactggggctgtgggtggcagat

SEQ ID NO: 64275 - DNA, 752 bp, Homo Sapiens
ggtgatttcaacttccggctggattccaagtccgtcgtggagacgctctgcacaaaagccaccatgcagacggtccgggccgccgacaccaatgaagtggtgaagctcatatttcgtgagtcggacaacgaccggaaggttatgctccagttagaaaagaaactcttcgactacttcaaccaggaggttttccgagacaacaacggcaccgcgctcttggagtttgacaaggagttgtctgtctttaaggacagactgtatgaactggacatctcgttccctcccagctacccgtacagtgaggacgcccgccagggtgagcagtacatgaacacccggtgcccagcctggtgtgaccgcatcctcatgtccccgtctgccaaggagctggtgctgcggtcggagagcgaggagaaggttgtcacctatgaccacattgggcccaacgtctgcatgggagaccacaagcccgtgttcctggccttccgaatcatgcccggggcaggtaaacctcatgcccatgtgcacaagtgttgtgtcgtgcagtgacgtggtgggaagagatgccagcgccacgagaggacacttcgtgagcctgcctgtagccgtggaccgaatacgcactcttgaaagctgcatcgagaacccgcccaagcgccacctgctagacggccagccccacacttcgcttcagcctccggaccattccggagcagcctcacatacctcacgtcccgacgtaagggatcgtt

SEQ ID NO: 64276 - DNA, 260 bp, Homo Sapiens
agcggtactgctgcagaaactcttcatcatctaggtcctcattcattatggcttcactctcagggatgataagcccttctcctgcttctcttttcccagaccccaaagtcttccctcagcctgctctggcgtcccccaccccaagttccctcctcaaactcctcactaccagcctttatcccctgaagtttgaaaatcccctggctagcagcaacacctcagtccaaacaggggcccttaggggtgcctgttccaccctc

SEQ ID NO: 64277 - DNA, 506 bp, Homo Sapiens
  misc_feature (355)..(355): n is a, c, g, or t
tattaatgggtgagaatctaattttactcatcttgatggcttcatgatccagcacagtgcctcacacaaagaactattgggtgggtggatggatggatggaggaatggagacagttggcttaaccagatcctatatacagattattactggctccaaaggatgagtagataagaccataagaattggatcaatgtaaatcctcacctgccctttgaagagccaataagggcatctttgtctttaaatacagcaaatgttattcagattttgtacttgtctatctgtttacctcagtgtagatgatatgaggatggtataactatgtaaattgtttttgaaaataatttgtttccnccacaacttttgaaggttttatttgttgttgttattactagttcagtcccaaacttaccctttccttttcagagagctaatggccatgcttttcttcaaggaaagaataatttatttgaatgaagtgggatacttgcataacacataaaaa

SEQ ID NO: 64278 - DNA, 1138 bp, Homo Sapiens
  misc_feature (875)..(875): n is a, c, g, or t
gaggtacgcggtgcggtctcccggtacccggagcggctctgattcatggtttaacttgtgggcctaaagaactggaaacccaaaggaacgaatattcctgcgccgacagagtcccgtctttggtgaggctgtttctggagtttacatgatgaccaaggtactaggcatggccccagttctgggccctaggcctccacaggagcaagtggggcctctgatggtaaaagtcgaggagaaagaagagaaaggcaagtaccttcctagcctggagatgttccgccagcgcttcaggcagtttgggtaccatgatacccctggaccccgagaggccctgagccaactccgggtgctctgctgtgagtggctgaggcccgagatccacaccaaggagcagatcctggagctactggtgctggagcagttcctgaccatcctgccccaggagctccaggcctgggtgcaggagcattgcccggagagcgctgaagaggctgtcactctcctcgaagatctggagcgggaactggatgagccaggacaccaggtctcaactcctccaaacgaacagaaaccggtgtgggagaagatatcctcctcaggaactgcaaaggaatccccgagcagcatgcagccacagcccttggagaccagtcacaaatacgaagtcttgggggcccctgtacatccaagagtctggtgaggagcaggagttcgctcaagatccaagaaaggtccgagattgcagatttgagtacccagcacgaggaatcagcagatgagcagaaaggttttgaagcagaggggctcaaaggggatataatttctgtgattatcgccaataaacctgaggccagcttagagaggcagtgccgtanaccttgaaaatgaaaaaggaacaaaaccccctcttcaagaggcaggctccaagaaaggtagagaatcagttcctactaaacctaccccaggagagagacgttatatatgtgctgaatgtggcaaagcctttagtaatagctcaaatctcaccaaacacaggagaacacacactggggagaaaccttacgtgtgcaccaagtgtgggaaagctttcagccacagctcaaacctcaccctccactacagaacacacttggtggac

SEQ ID NO: 64279 - DNA, 385 bp, Homo Sapiens
  misc_feature (98)..(156): n is a, c, g, or t
cagggtcttttcccctcaaagagaacatgtggcatctctgatcctttacattgagaacatttgtcggatatgttcatttattcaatagtcatttatcnnnnnnnnnnnnnnnnnnnnnnnnnnnnnnnnnnnnnnnnnnnnnnnnnnnnnnnnnnncaatatagagcagaaagttaaatattttatggttcatatgtgaaaaagtaattatgtttataaatagactaactgctggatgttaccactaagtaagaaagcaacaggtaagataggctttctctctccctataccaagtaatttatacctacacagattgggcaattctagctaatgaaaatatagcttaaaagtatttcttaggccgggcatggtggctcacacctg

SEQ ID NO: 64280 - DNA, 271 bp, Homo Sapiens
ccatcaccaccaccaccacccgcccatgatcgctctgcagccgctggtcaccgacgacccgacccaggtgcaccaccaccaggaggtgatcctggtgcagacgcgcgaggaggtggtgggcggcgacgactcggacgggctgcgcgccgaggacggcttcgaggatcagattctcatcccggtgcccgcgccggccggcggcgacgacgactacattgaacaaacgctggtcaccgtggcggcggccggcaagagcggcggcggcggctcg

SEQ ID NO: 64281 - DNA, 423 bp, Homo Sapiens
tcgttcccgggcccccggcccccgggacacggacgacgatgaggaggagcctgacccttatggtttcatcgtgcagacggcagagattgcggagattgccaggctgagccagacgctggtgaaggacgtggccatcctagccccaggagatccacgatgtggctggggacggtgacaacactgggctcctcggagcctgcccacagcgcctccctcagcaacatgcccagcacccccgcctcgaccatctctgcccgggaggagctggtgcagcgcatccccgaggccagcctcaacttccagaaggtgccgcccggctcgctgaactctcgggactttgaccagaacatgaacgacagctgtgaggacgtcctggccaacaagacgcggcctcggaaccgagaggagtgatcgtgggtagaa

SEQ ID NO: 64282 - DNA, 593 bp, Homo Sapiens
  misc_feature (69)..(69): n is a, c, g, or t
  misc_feature (110)..(110): n is a, c, g, or t
tcaagggaagtagcagtcttttattctaaggcatgctttgttttctagaacatgaaggggtctgaatantttgtgaagatccagtcttttctgggtggggcccccacggnaggatttgagggcgctcagtcagcagaatgtgagcatggacttggccacgttcatgaagctgcggacggatgcggtgctgccgttgactgtggctgaggtgcagaaacttctgggaccccacgtggagggcctgaaggcggaggagcggcaccgcccggtgcgggactggatcctacggcagcggcaggacgacctggacacgctggggctggggctacagggcggcatccccaacggctacctggtcctagacctcagcatgcaagaggccctctcggggacgccctgcctcctaggacctggacctgttctcaccgtcctggcactgctcctagcctccaccctggcctgagggccccactcccttgctggccccagccctgctggggatccccgcctggccaggagcaggcacgggtggtccccgttccaccccaagagaactcgcgctcagtaaacgggaacatgccccctgcagacaa

SEQ ID NO: 64283 - DNA, 564 bp, Homo Sapiens
gctgggtaggtccctcttttcaccaccagttttccacacctgtgtactctagattaacaaactctggataaacagatatttacattttaaactcaggcctacacagagtagttttccttataaggagcatgtatcacttagcaagaaactaaaaatggcaaatgagtttttcatcctttaagaaaaaaatcagctttagaattctctgcggtcagttgtgtgcaatgcaacaaaactacctttcagtaaattacttagttatttatttcagtgttttgtttcttttgatactaagtttccctttcaataatgaatgatgtgaccaaccaaggagaatttgtttgttctgtactaaaattatattttacagttaggaattataaaaagcaagggagcatctttaaatgttttttgtttaagcgatgtcttccatccaaagtaagaataatactctcggaaggtccttttggtgtcatgtcacttgctgtatgtggcagccttacagtgccacacttgggtactgaaaaatcaataaaacgaaagttcatcatcccatgaaaaaaa

SEQ ID NO: 64284 - DNA, 606 bp, Homo Sapiens
aggggggggtcgggataaggacccccgctttaaaagtcaatgccctttatagcacccaaaggcacaatcattgccatcatctttggggcaagcaaactgtgtctacagcaacctgtggagcggtaactgtgatctgccctagcgctctcttccagaagatgccctccgatcctttccaccctattccgtaactctcgtggacctcgtttgggagtgttctgtgggcttggccttgtgtcagagctgggagtagcatggactctgggtttcatatccagctgagtgagagggtttgagtcaaaagcctgggtgagaatcctgcctctccccaaacattaatcaccaaagtattaatgtacagagtggcccctcacctgggcctttcctgtgccaacctgatgccccttccccaagaaggtgagtgcttgtcatggaaaatgtcctgtggtgacaggcccagtggaacagtcacccttctgggcaagggggaacaaatcacacctctgggcttcagggtatcccagacccctctcaacacccgccccccccatgtttaaactttgtgcctttgaccatctcttaggtctaatgatattttatgcaaac

SEQ ID NO: 64285 - DNA, 628 bp, Homo Sapiens
  misc_feature (595)..(595): n is a, c, g, or t
agatgatggaggtctctgatgaagttatgtctccccatggagaacctatcaagatgcgaattggactgcactctggatcagtttttgctggcgtcgttggagttaaaatgcgccgttactgtctttttggaaacaatgtcactctggctaacaaatttgagtcgtgcagtgtaccacgaaaaatcaatgtcagcccaacaacttacagattactcaaagactgtcctggtttcgtgtttacccctcgatcaagggaggaacttccaccaaacttccctagtgaaatccccggaatctgccattttctggatgcttaccaacaaggaacaaactcaaaaccatgcttccaaaagaaagatgtggaagatggcaatgccaattttttaggcaaagcatcaggaatagattagcaacctatatacctatttataagtctttggggtttgactcattgaagatgtgtagagcctctgaaagcactttagggattgtagatggctaacaagcagtattacaatttcaggagcccagcccccaatctttctccctgctcaaaatgacaaaatgtactcccttcagtacttcccctcccccntcggctgtcccccccggttatcctttcttggtg

SEQ ID NO: 64286 - DNA, 840 bp, Homo Sapiens
  misc_feature (639)..(650): n is a, c, g, or t
ataattgattatctctttgtactacttgagatttgattatgagatgtgcatattgctttgggaagagctcgaggaaggaaataattctctcctttgttttgaacctcaaactagataaaccctaggaattgcttaactgcaacaagtaattttcattcccacaaaaacctgaggcagctcttttgcccagagcgttccctgtagccacccccaccccacttgcccttggttctttagaaggagcacacacatcccttgattcctccctgatgtggtaaactggcacactccaggggtctaaaacataaaacagttgtgtttagggaaccttaagtcatgcagacatgactgttctctttgtacaagtgtgaatcaaaatatgtatctctttttcagagtctggttaagctatgtcattgtctactgcatagtttcctgagtctgtttgtaaagtgcttatggctaacagttcagttctgtatttgttgacaggtaaataagtggagttgagtgccatctttgaaaaaattaccctctagctctaacactgaaaataataataaattgtagatctctgcaactaagtttaaagcagtgtgactgtgttgcttaaatatcaagtattgtttataaccaccnnnnnnnnnnnngtcctggtagttttttggccccttatgtttaaatcagattcttagatttggagtagccctgcccttgttatttattagataccattttgaatgtatccattggatttctaaaatgtattgtgaatttctcagacaaacaggatttatgctggagctctgttttgcttagaaataaaatatttagtagttt

SEQ ID NO: 64287 - DNA, 461 bp, Homo Sapiens
ggttacgggcccttcggccaggaacatcacagccggacccaactggatgagagcgagggctggcgggagcagctggccctgattgcgggcacggcagtcgtgggtgtggtcctggtcctggtggtcattgtggtcgcagttctctgcctcaggaagcagagcaatgggagagaagcagaatattcggacaaacacggacagtatctcatcggacatggtactaaggtctacatcgaccccttcacttatgaagaccctaatgaggctgtgagggaatttgcaaaagagatcgatgtctcctacgtcaagattgaagaggtgattggtgcaggtgagtttggcgaggtgtgtcgggggcggctcaaggccccagggaagaaggagagctgtgtggcaatcaagacccctgaagggtggctacacggacgctgcagctcgcccatgagttgggatcctgagag

SEQ ID NO: 64288 - DNA, 466 bp, Homo Sapiens
cagcaatcccctttacgagcctgagcctgagcctagggacagtccccagcctggccaaggccatagtcccgggagccacgggctgcggccacggggtctgcccaccagagccgtgagccagacacgcactgacttactccagagaacttgctgaacgccgacatcctttagtgagctggcctccctcacttgcaccagaggcaccagctgctagaggcccaggcccatcgagccaccatcgcccgagccggagcctcagctcctggacccccagccccgcttcctggacccgcaggcactagagccgctcgggaaagctctggagctccaacccctgcaacctcttgcttgatcctctgggctgccgggcctggctctccagctcctgacaccctgcctgactcctcggagtcacagctgcatgacccccagcagctcgccctgagttggggatcctcctagagcg

SEQ ID NO: 64289 - DNA, 1045 bp, Homo Sapiens
  misc_feature (898)..(898): n is a, c, g, or t
cgggttcgcgaggcggcagactccagagtggctgggtccgagcgcggggcgggttgccgaaggggctcggcctgggctgcgtgctggagagcggggacggggccgactcaccagaggctgcagcaacaggtccactttgctctccagtctctttctccgacaccgctgaggcggtttcccaccgacttcctttccatacagcaccggcaggcaccggggtgaagggtcataaaaatggcgctggccgctcgtttgctaccccagttcctgcactctcggtcgctgccctgcggggccgtccgactccggactcctgctgtggccgaggtgaggctgccgtcggccacactttgctacttctgccgctgtcgcctcggcttgggagcggcgttatttccacgaagcgctagggccttggcagcctcggcgctacctgcccagggttcccggtggccagtgctcagcagcccgggactccccgcagccttcgcttctttccctgcctgccctcagcgcagctacagcacggaggagaagccccagcagcaccagaaaaaccaagatgatcgtcctgggattctccaaccccatcaactgggttaggactcgaattcaggccttccttatctgggcctatttcgacaaagagttcagcatcacagagttctccgagggagcgaagcaggcttttgctcatgtatccaagttgctgtcacagtgtaaatttgatctgttggaagaacttgtggccaaagaggtgctacatgcattgaaagaaaaagttacttcactacctgacaaccataaaaatgcccttgctgctaaacatagatgaaattgtatttaccatcacaggagacatcttcatttactatgatgaaaaaggaaggaaatttgntaacatcctgatgttgctttggtatctaaacagtgccaacatccccagtggaaactttaagaaggaggcagtggtattccaagtttaagttggggaaacagaaagtgggaaactaaccaacttcttagggcaagctatgaattttca

SEQ ID NO: 64290 - DNA, 842 bp, Homo Sapiens
ggggggagactgtattcgggggcgcgagctgccccagtaaatggaaatgttttctaacatataaaaacctacagaagaagagagtgaattttctggatcaaattagaagtctgtattatattgatgtctccagattcaaatatattagaaagcagccgtggagacaaccatcttcattttgggcgaaataactaaagcccgcctcaagcattagaactacagacaaacgcctgatgcgacctctccagattgtcccaagtcgattgatttcccagctatattgtggcctgaagcctccagcgtccacacgaaaccagatttgcctgaaaatggctcggccaagttcaagtatggcagattttcgaaagttttttgcaaaagcaaagcacatagtcatcatctcaggagctggtgttagtgcagaaagtggtgttccgaccttcagaggagctggaggttattggagaaaatggcaagcccaggacctggcgactcccctggcctttgcccacaacccgtcccgggtgtgggagttctaccactaccggcgggaggtcatggggagcaaggagcccaacgccgggcaccgcgccatagccgagtgtgagacccggctgggcaagcagggccggcgagtcgtggtcatcacccagaacatcgatgagctgcaccgcaaggctggcaccaagaaccttctggagatccctggtagcttatttaaaactcgatgtacctcttgtggagttggggctgaaaatttacagagtccatttgtccagctttatcaggaaaaggtgctccgaaactggaactcagatggccgcatcccaggtgagaaactt

SEQ ID NO: 64291 - DNA, 777 bp, Homo Sapiens
gctgggtgatctagaggatcccggtgggttcttgccgaagaggtatacacctagttgtggctcagcatgtcaatgtaacagtgcaacttggtcagtgtggcaatcagattggttttgaagtttttgatgcttgcttagtgactcacacagttcccagggactctgctctatgagagagaatgaggcatatcaagcatcttgcaaagaaagattcttcagtgaggaggagaatggagttccaattgcccgggctgttcttgttgacatggaacccaaatttatcaatcaaacgcttgtcaaaggctgcccagtctgtccaatggaaatatggtcaacatgcatgcttctgtccataacaaggttctggaaacaactgggcatatggttactctgttcatggacccaggcatgaagaatctataatgaacataatccggaaggaagtggagatatgtgactccttcagtggttttttcatcataatgagtatggctgggggcacaggatcaggattaggagctttcgttacacagaatttagaagatcagtactcaaactcattgaaaatgaatcagattatttggccttatggaactggtgaggttattgttcaaaactacaactccattttgacactttctcacttgtaccgatcttcagacgccctccttcttcatgagaatgatgccatccataaaatctgtgcaaactgatgaatatcaagcagatctcctttagtgatatcaatcaagtcctcgaatcagctgggaagtgttt

SEQ ID NO: 64292 - DNA, 284 bp, Homo Sapiens
gcgctgagccaccaagagaaagaggcatttcctgaaaagattcccctttttggagagccctacaagacagcaaaaggtgatgggctgtctagtcgaatacagaacatgttgggaaactacgaagaagtgaaggagttccttagtactaagtctcacactcatcgcctggatgcttctgaaaataggttgggaaagccgaaatatcctttaattcctgacaaagggagcagcattccatcagctccgtccacactagtgtccaccaccagccattcaccactccg

SEQ ID NO: 64293 - DNA, 283 bp, Homo Sapiens
aactcagggggcgagctgcaactaactcaggggcgagctgccaaggtggaagccgggcataaccgccgccacttcaaggcggcctccttggagctgagtgaggtgaagaaggagctgcaggccaaggaacacctggtgcagaagctgcaggccgaggccgacgaccttcagattcgggacggggaaacattcccaggagatagcacagttccaagcagagctggccgaggccgggcacagctccagctcctgcagaagcagctgacgagcagctcgtaagagg

SEQ ID NO: 64294 - DNA, 417 bp, Homo Sapiens
tcggtctggactccatcatcgccaaggctgacaccatctccaagagcgagctccacaagttcaagatcaagatcatgggcgagttggtcagcaacggggtccagatctaccagttccccacggatgatgaggctgttgcagagattaacgcagtcatgaatgcacatctgccctttgccgtggtgggcagcaccgaggaggtgaaggtggggaacaagctggtccgagcacggcagtacccctggggagtggtgcaggtggagaatgagaatcactgcgacttcgtgaagctgcgggagatgttgatccgggtgaacatggaagacctccgcgagcagacccacagccggcactacgagctctaccggcgctgcaagttggaggagatgggctttcaggacagcgatgatggtccat

SEQ ID NO: 64295 - DNA, 717 bp, Homo Sapiens
taggctacctataggagccagtatttatgttattggagatcttgatacaggtaccaattacgactacgtgcgtgagctgaaaagaagcacaggaacctggcaccacactaaaccactccttccatccgaccttcgccgtacaggatgtgcagccttacgcattgcgaattgcaagcttttccgcctgcagcttcagcaaggcttattccgtattcgtgttcattccccttgaggaggaagcagagcagagtgcgagatcctgacccaagagcaccataacatagctccgaaagggagagcagagatggcagctgaaactcactctgtgctgggctttggtatggtacttctttggtggttttatgatgcttacaaacttgagctttagctcttgtttgggagaacacgtaactgttgaaaaactacctgggaggagtgagttcctccagttaaatgtggctgtagatgttggaggctaaggaggctagtaaatatcaaaaggaaaagggagtgggaattgctatcatgtaaaatatcaaagttaaaatactaaggtgcattttccctgaagggaactcatgtctgactgctgtattcaaatacgtagctttggtaacaaacaaaatccgtatatgcacatcaacatatccaaacatgccaagactgcttttccactgcacttggaaggatatattatgcctaagcctacactagtga

SEQ ID NO: 64296 - DNA, 450 bp, Homo Sapiens
cccggaagccaccccgattttcctgtctcctgccagatccacgggaactaattgaaattaaaaacaaagagaagctgctaatcactggcacagagcagttcaatcagaaaccaaagaaggggattcagtttctgcaagagaaaggcctcctcaccatcccaatggacaacacagaggttgctcagtggctccgagagaaccctcggctggacaagaagatgattggagagtttgtgagtgaccgcaaaaacattgacctgttggagagctttgtgagcaccttcagttttcagggtctgcgactggacgaagccctccgcctctacctggaagccttccgtttgcctggggaagcaccatgtcataccagaggcttgcctggaggcattcacagagcgttggatgaattgtaatcggctccccatttgccaatagcgatgatgggtccat

SEQ ID NO: 64297 - DNA, 292 bp, Homo Sapiens
acaaatgaactctttattcaagatttgctacaagaattttcatgtcctttgaatgcgtgagaactgaacttgaaattatttgtgcatcttcagcttgacatatttgtccactgtggcttgtccagagggcagcagtgctgtgagctgagaaggtccagtgggaaggaaggttattggagaagagtagcctcagacctcctaaagctgggaagcacatttacagaattgccctgcagcgaaaaaacttctatttccagcagtgaccaacaaggcaaaatgtttgtttctccac

SEQ ID NO: 64298 - DNA, 839 bp, Homo Sapiens
ggggtctctggccggctgggcgcgggcgactgctggcgaggcgcgtgggaccttacgctggttccccttcgtctcctctcccggcccgggccactagagagttcgctgacgccgggtgagctgagcctgccgccaagatgccggcctattttcagaggccggaaaatgccctcaaacgcgccaacgaatttcttgaggttggcaaaaagcagcctgctctggatgtactttatgatgttatgaaaagtaaaaaacatagaacatggcaaaagatacacgaaccaattatgttgaaatacttggaactttgcgtggatcttcgcaagagccacttggcaaaggaggggttataccagtataagaacatttgtcaacaggtgaacataaaatctctggaggatgttgttagggcatatttgaaaatggcagaggaaaaaactgaagctgctaaagaagaatctcagcagatggtcttagatatagaggatctagatcatattcaaactcctgagagtgttctcctaagtgctgtaagtggtgaagacactcaggatcgtactgacagattacttttaactccatgggttaaatttcctgtgggagtcttacaggcagtgtttggacctttcttagaaacaattctagagtagagcgcctgtaccatgatattgcccagcaagctttcaaattctgcctccaatacacgccgtaaggcttgaatccggtaaactgtgtgaccattttgagaatgcacttatcgccgattcaccgccaccattaaccaaagtacgggaattcattcttaataatccagagagcccggccctgcattttggaaa

SEQ ID NO: 64299 - DNA, 984 bp, Homo Sapiens
ggcgctgggcgggcggctgtgagcggcgctcggggcgcgctaggcggggagccgagccgggctggcggcaggcggacggggcgggcgcgtgcggcgcgagccgggcgctgaggacaagggccgctggtagggccggccggccggcgggcggagcgccgccgcgacgcacacgaggtgaccaggcattgatgcacccccaggaaggccacgcgctcaggaggcccccccgccccgctggctgctgctcacatggtgtctgggcccttggcactccgttcatgcgggagatggcaggggctggcacatgacagtggagcagaaatttggcctgttttctgctgagataaaggaagcagaccccctggctgcctcggaagcaagtcaacccaaaccctgtccccccgaagtgaccccccactacatctggatcgacttcctggtgcagcggtttgaggatcgccaagtactgcagctctgaccaagtggagatcttctccagcctgctgcagcgctccatgtccctgaacatcggcagggccaagggggagcatgaaccggcacgtggcggccatcgggccccgcttcaagctgctgacccttggggctgtccctcctgcatgccgatgtggttcccaatgcaaccatccgccatgtgcttcgcgagcaagatctactccactgcctttgactacttcaggtactccccccagatgtgctgtgcagcatccagggacggccccagcccctccaagtgctccatcgcccccagaccccccgggagtcactcacaggtatacaccagttgccccagttgtgctcacccacctcctccttccgtattcctggccctgtggatttaaatacccttcaggcctgtgcatgtgtcccgtgtacttagagctagcctccccgcgagatgtaggccaattttccctcagttccactgatttaggagattaagtgcgtcccatttattttcctgtt

SEQ ID NO: 64300 - DNA, 305 bp, Homo Sapiens
cgaggagacctgcatcaggagggccaaggctgtgaaacagaggggcatctcccttctgcacgaagtggacacgcagtacagcgccctgaaggtgaagtatgaagagttgctgaagaagtgccaagaggaacaggactccctgtcacacaaggctgtgcagacctccagggctgcagccaaggacctgactggagtgaacgcccagtctgagcctgttgccagcggctgggaactggcctctgtcaacccagagcccgtgagttcccctacaacacctccagaatacaagcgttaattaaggagat

SEQ ID NO: 64301 - DNA, 963 bp, Homo Sapiens
  misc_feature (24)..(24): n is a, c, g, or t
aaacgtccaagggccgtataaggnccctcctagttcccctggacgcctgctcctgcttctgctacgaccttctggggaaaacgaatttctcattttcttcttaaatgccattttcgctttaggagatgaatgttttcctttggctgtttggcaatgactctgaattaaagcgatgctaacgcctcttttccccctaatgttaaaagctatggactgcaggaagatggcccgcttctcttacagtgtgatttggatcatggccatttctaaagcctttgaactgggattagttgccgggctgggccatcaggaatttgctcgtccatctcggggagacctggccttcagagatgacagcatttggccccaggaggaacctgcaattcggcctcggtcttcccagcgtgtgccgcccatggggatacagcacagtaaggagctaaacagaacctgctgcctgaatgggggaacctgcatgctggggtccttttgtgcctgccctccctccttctacggacggaactgtgagcaccgatgtgcgcaaagagaactgtgggtctgtgccccatgacacctggctgcccaagaagtgttccctgtgtaaatgctggcacggtcagctccgctgctttcctcaggcatttctacccggctgtgatgggcttgtgatggatgagcacctcgtggtttccagtactccagaactactactgtctgcatgtaccactcttatgctttaaaataatgaatacatttccataatggtctctaacatttccttatagtaccaactacttcttacctctctgccttgccttcccccaaaaaattacctttttcaaaaggaaatcagttatatctccactgtgctggagtccagtatttcttgataccatgtaattctaccagggtcttctttaatatgttcttttaaacaattgaattatatcttcagattattaa

SEQ ID NO: 64302 - DNA, 1145 bp, Homo Sapiens
ggcttcctggactcttggcctcactccttgccccctccccacgacacccatgagccgaaaggatgtcactaaggatggctgattccccagggcacccgctctccctccctccctgctggaggaacacgtcatatcagatgagaggaagatggcctctgatggacagaatttttctcttaactcagcttttgctactttggcaaaaactagcgaggggtagcagaaacctgcaccaaggattgtccctatgtcttggcccctcctagagcgtgtgcagactgatgattttatatgtaaatcaagactcacatccctttcctagtcccccacatccaaagcccctcagcctgccttgcagaccaatgggctccatgttctgtagccccctcccctacgcctcacccctcctccctctcacaggttttgggcggccagtgagagaaacgcagtgggggaggcagggagtctggtgcctgcagagattctctgcttctttcctggggggaggtggggaggtcttagcaggagcgggccctgtacccacctgctgacctgctgtttggtagagaaataaaggttgtgtggactggggggaactcgcactgtccccttccaaacaacacttccctgtgtggcccgctttccgccccccggagaaacctctcctgagacccatccccctccgcgccccgggggctccctgtacgccaatcggaacctggcgccccccgcttggttccctccgggaccaccccccgcgacctgggacccagccgcccagggagtcgtccctacaccacacaccgaaacccacgtgctgcccgatcttaccccctaactctcccctcgcaaccaaaacgcaccgcgccatggcgcacatcccaacacggcaccgcctcacaacgtgtcgtgcgcgcaccgaagccttacgaccccgacgggcggtggggacacctatcaggaaacaaaaaacggcggcaccgctgctaggccccgcaaggagagaaacaacacgaacagcgagtgatgccccactaaatggctcgcttttaatgacggaacaagccgtctgcgccccagaaccgcgagtgctcaccggaatagaatccgcaccagcgctaggtcgcacagccctttccgccgcg

SEQ ID NO: 64303 - DNA, 888 bp, Homo Sapiens
  misc_feature (713)..(713): n is a, c, g, or t
ggggatttattttttcttagagctgagctgattgtactttggccaactaatgggttaatactgtcaagggaaattagccctgagctaaacattgccgctggctcatgaatgcactaggcttggggcagtataaaaactcagagaaatcagtgtgtaggagacacagaaatcagtgtcactcagtgacagaagcaacaataattgtgaaaaatacttcagcagttatggactcatctgtcattcaaaggaaaaaagtagctgtcattggtggtggcttggttggttcattacaagcatgctttcttgcaaagaggaatttccagattgatgtatatgaagctagggaagatactcgagtggctaccttcacacgtggaagaagcattaacttagccctttctcatagaggacgacaagccttgaaagctgttggcctggaagatcagattgtatcccaaggtattcccatgagagcaagaatgatccactctctttcaggaaaaaagtctgcaattcccctatgggacaaagtctcagtatattctttctgtaagcagagaaaatctaaacaaggatctattgactgctgctgagaaaataccccaatggtgaaaatgcacttttaccacaggcttggttgaaatgtaatcccagaggagggaatgatcccggtgctttggatctgaccaagttccccaaagatgtccacttgntgacctcattgtaggatgtggatggagcctaattcaactgtcagatctcaacctgatggagaaaaccctcgctttggataacaggccagcaggcacattcccccctggggaacttggaagatgaactatttccaccctagaacgggagaattatgccctggaaccctaattttct

SEQ ID NO: 64304 - DNA, 1439 bp, Homo Sapiens
ggtccggaattcccgggatgatggcggctgtggtgctggcggcgacgcggttgctgcggggctcgggttcttggggctgttcgcggctgaggtttggacctcctgcgtacagacggtttagtagtggtggtgcctatcccaacatccccctctcttctcccttacctggagtacccaagcctgtttttgctacagttgatggacaggaaaagtttgaaaccaaagtaaccacattggataatgggcttcgcgtggcatctcagaataagtttggacagttttgtacagtaggaattcttatcaattcaggatcgagatatgaagcgaaataccttagtggaattgctcactttttggaaaaattggcattttcgtctactgctcgatttgacagcaaagatgaaattctgcttacgttggaaaagcatgggggtatctgtgactgccagacatcaagagacaccaccatgtatgctgtgtctgctgatagcaaaggcttggacacggtggttgccttactggctgatgtggttctgcagccccggctaacagatgaagaagtcgagatgacgcggatggcggtccagtttgagctggaggacctgaacctgcggcctgacccagagccacttctcaccgagatgattcatgaagcggcttacagggagaacacagttggcctccaccgtttctgccccacagaaaacgtagcaaagatcaaccgagaggtgctgcattcctacctgaggaactactacactcccgaccgcatggtgctggccggcgtgggcgtggagcacgagcatctggtggactgtgcccggaagtacctcctgggggtccagccggcctgggggagcgcagaggccgtggatattgacagatctgtggcccagtacactggggggattgccaagctagaaagagacatgtccaatgtcagcctgggcccgacccccatccccgagctcacgcacatcatggttggactggagagctgctccttcctggaggaggacttcatcccctttgcagtgttgaacatgatgatgggcggaggtggctccttcctcggctggtgggccccggcaatggcatgttctccaggctctacctcaacgggctccacaggccccactgggatgtataacgcgaccctcctaccaccgccagctacgaggacaccggccccccctttggcatccatgcccgccgccgacccaagaacgggttcgagaactggggaggaagtcctcgccaggggggttgtctcttacgcgggcgggaacccccgcccaccggggtcccgctcgcccctaattcccatcccgtcctgcggcgcgatttacggcgctaagtgtcggacacccgcccacttcccggctcctccgtgaggccctcagcagcccgccccccggctttgccccttgggagcgttc

SEQ ID NO: 64305 - DNA, 842 bp, Homo Sapiens
ggggccgccattttaaatccagctccatacaacgctccgccgccgctgctgccgcgacccggactgcgcgccagcacccccctgccgacagctccgtcactatggaggatatgaacgagtacagcaatatagaggaattcgcagagggatccaagatcaacgcgagcaagaatcagcaggatgacggtaaaatgtttattggaggcttgagctgggatacaagcaaaaaagatctgacagagtacttgtctcgatttggggaagttgtagactgcacaattaaaacagatccagtcactgggagatcaagaggatttggatttgtgcttttcaaagatgctgctagtgttgataaggttttggaactgaaagaacacaaactggatggcaaattgatagatcccaaaagggccaaagctttaaaagggaaagaacctcccaaaaaggtttttgtgggtggattgagcccggatacttctgaagaacaaattaaagaatattttggagcctttggagagattgaaaatattgaacttcccatggcttacacaaacaaatggaaagaagaggattttggtcttatcacctatacctgatggaaaagcccagtaacaaaaatttgtcaaaaaacccgacaccccctccaaattgggcctctgggggaaagtgggcaaaatccacaagcctgccacccaacccccacaagagggtattattaggcgccgccgaaccgcgcaaaaaccaacacgccggcggaaacaaggggggcttgccaacctgggcgggcaacaacgcggcgcccacccaacggtcccttccgccgcgcgcgaccgtctcccggc

SEQ ID NO: 64306 - DNA, 336 bp, Homo Sapiens
ccacagattgctttttaaattcataataagtttcgttaactatcttatgtttctagtctttcaagcttagtgataaggtggaagcacaagaaaaatttcagtagaatacagtttttattttgtaaacactaatgtattaaacttgctatacattaaagcaaataatatatatttttatttgaattgtatatgtgaattggaagttataattagttgattttttcattttgttagaggtattttctctgaacaaggtcaattggttacctcagtattacagccaatatagtccaagggaccatttctccccgagtctcttacactttattgtgcgat

SEQ ID NO: 64307 - DNA, 428 bp, Homo Sapiens
ccccgcgtcaaagtaaccttttacctggaaatgtgaattctctcttagttctggtcatctgttatttgtgggagccaatcctctctctgttggctgatgatgagaattctgttatataccacaacacaaacttggggataaaactttccattaggcatttctgtaaaatttccatctattttagaagcagaactaaggtgaagcccagtgtgaatgaatcctgcttgttggtacaagccaagtgggacatttggcagcaaagcccaggagtccttggtgctcttcttttaactgcctcctcatctcattgggctgcccggtgttaactggttgattatcacctctgtgttttgcctgcaaggaaagaagctactgacacccagagtggctcagtatactcagacgtgctttcagtactttcaacgtgg

SEQ ID NO: 64308 - DNA, 510 bp, Homo Sapiens
ggagaatccgttgcccacagtcccagattctccccgaatcctccccaacaaggggctgttaggccgcaaacccttaactttagttctcggagccagacagtcccctctcctactataaacaactcagggcagtattctcgatatccttacagtaacctaaatcagggattagttaacaatacagggatgaatcaaaatttaggccttacaaataatactccaatgaatcagtccgtaccaagataccccaatgctgtaggattcccatcaaacagtggtcaaggactaatgcaccagcagcccatccaccccagtggctcacttaaccaaatgaacacacaaactatgcatccttcacagcctcagggaacttatgcctctccacctcccatgtcacccatgaaagcaatgagtaatccagcaggcactcctcctccacaagtcaggccgggaagtgctgggataccaatggaagttggcagttatccaaatatgccccatcctcagcca

SEQ ID NO: 64309 - DNA, 1004 bp, Homo Sapiens
  misc_feature (587)..(602): n is a, c, g, or t
  misc_feature (866)..(866): n is a, c, g, or t
tcttcctgcagactcttttttcccgaggatcctgttaagattgtccgggcccaagggcagtacatgtacgatgaacagggggcagaatacatcgattgcatcagcaatgtggcgcacggtcagtatcacacctcaggctggcagggcaggagaggaaggcagtgctgtgaacctggtcccaaggtgacctgagattgccgagaggtgtggagaacctgggtggagttgaggcactgtcagtatgcagaggaggctcagccttcgcaatatagctgtggaattctgcaatctggagctgtgctaaaccaggcaggtgtcagcaatctaggtctgtgagtctagttccactgtgggactgatgatgagctcacaaagtggcagatggtccagctgtgaccagcaacgtagcacagtgctggccaagtgctggggtcatggcagtgcttcagccccattggccatctcaggtgctaggcaagggagctgaagtaggaattcagtcatcttgatgaggctgccagagctgatggaaagaaagggagtctgagactcagcaggcacatggaagatgaataaagttgaggttnnnnnnnnnnnnnnnngcagagactctattcttagactgcttgggctcaaatccctgtcccctacttactaacttgtgatctcgggcaagttacttaattctcagtgcctcagtttgcttatctgtgaaagacataatgatactaggtacccactttaaggtgtttggagaatttaagtgtgttaatttatgtagcttgctctgaatgtgcctggcacatggtgagctctcagtacatattcactgttattatccttggcctgttgacaatcaagattantccaccagcccccttggctggtgaagtgaaaccagttgacagtcaccccccaccccacctttgtcatacaagcctcaaaaggccttccagcctgggcaacataatgagaccttgtctctaccaaaaatacaaaaaaat

SEQ ID NO: 64310 - DNA, 1212 bp, Homo Sapiens
  misc_feature (1050)..(1092): n is a, c, g, or t
cgaatggacttccggcccgacttgccgggtctggagtgtgacctggctcagcacctggccggccagcatctggcaaggcgctggtggtgaaggcgctgaaggcctttgtgcgggacccagcccccaccaagccgctggtcctctccctgcacggctggaccggcaccggcaaatcctatgtcagctccctgctggcgcactacctcttccagggcggcctccgagcccccgcgtgcaccacttttctcccgtcctccacttcccccaccccagccacatcgagcgctacaagaaggatctgaagagctgggtccaagggaacctcactgcctgtggccgctccctcttcctcttcgatgagatggacaagatgcccccaggcctgaatggaagtcctgcggcctttcctgggctcctcctgggtggtatacgggaccaattaccgcaaagccatcttcatcttcatcagatggcttctcaaactcgggcatcatggaagagcgcctcctagacgcagtggtgcccttcctcccgctccagcggcaccacgtccggcactgcgtgctcaacgagctggcccagctgggcctggagccaagggatgaggttgtccaggctgtgctggacagcaccaccttcttccctgaagacgagcagctcttctcctccaacggctgcaagaccgtggcctcccgaatcgccttcttcctctgactctctgagtggtgtcctcggcccccctgatggccaggccatgcaggaaaggccaggggcctctgtcacaggaacccagagcaccaagtgagatgaacggagtgtcggctaggccacgggacagatggccaggaagggccctgggctctaaactgggtcgagagcatcttgggcccggccacctttcccaggggaaacccctgggcaccccagaacctcactgagccttgacctccccctgaagcctgagtccttcttactgggaatcatacctccgggactggggcctcccggccggggctccttaccccacccggctcacactggggcctggannnnnnnnnnnnnnnnnnnnnnnnnnnnnnnnnnnnnnnnnnngaagccgccggctcccgtttcggccgcccggtgcgacccccttacaagccccgcccgcgcgggggcgttcacgcgcgggctcccgcctctgctccccccgaacgagtatcgtgatattcg

SEQ ID NO: 64311 - DNA, 997 bp, Homo Sapiens
  misc_feature (585)..(593): n is a, c, g, or t
tatagcaggctgtactggtcgggattctaggatggccgggccgctgccgcgacgtgtggaggcaggagatcgatgattgccgcaggagaagtgcgggcgcccttcacctggggcccctcccgaaccgcccccgggcccatgccgctccagggcccaggagcgagccagcgggagggcgagggcgagcgctcctggtgaggacagattaaggcgaacccccagtcagcggacatttgagcggctcctcgccgcggtctctgcccccactccaaaccggactcgacgcctgtcccgggccgtgacgcacgcaccggaggaaaaagtgcttctcggctcgctccctctttgggggaagagagctcactcccccatgcgggcgcgggacactccatctctgttccctgccggtcggccccccaaaccccgggggatcccaccctgcggcgcgcccccagggctaaacgcagggccgttcgggccacggcaaaaccggccttcccaggcatcccgcgcctttaaaacccggggtggtctccccctttttgggggtttcgcctcccttcccaaactaatggcccacagccnnnnnnnnnctcccccgcttttaacgctcctgccttggcaaaccaattcctcgcacccccgtggccaatcccaattttttttccgctcggagggcgcaaaaaaggggataacccgggtaattaaaattggaccgggcaattttccccaaggctcccccaaagcgctaatccgggggggccgtcttggcttcccaacaccttcgacgaagaactttctgcccagggtggcaccgtacccgcatgtgcccgcgcccttccagtaaatatccccctctcccaaaaatcaagccgcccccacgtttccccgtccgtgccaaccccgccccttgacccgcccgaaaggaggcggctcacgctcacctgatgagaaaccggccgctcttagtctcgcatcaaagcgctctcattccgca

SEQ ID NO: 64312 - DNA, 945 bp, Homo Sapiens
caactcaaagtaacacgtcgcccgtagctatcaagtgaactatagaacagtgtgaaaaaagcaggtggtaccggtccggatttccgggatatcgtcgaccacgcagtcggccgtggtgagtccgggctcccgtggccgcgtgctgggaggagactggagcccggttaggaagaatggagttggcgactcgctaccagatccctaaagaagtggctgacatctttaacgcccccagtgatgatgaagagtttgttggcttccgagatgatgttcccatggaaaccctctcgtcagaggagagctgcgatagttttgactcactagagtcagggaaacagcaggatgtgcgctttcattccaaatacttcacagaagagctaagaagaatttttatagaggacactgactcagagactgaggattttgcaggatttacgcagagtgatctgaatggaaagactaacccagaagtaatggtcgtggagtcagatttgagtgatgatggcaaagcatctttggtgagcgaggaagaggaagatgaagaagaagataaggctacccctagaagaagcaggtctagacgaaataccattggccctccagtatgctttccgttccccaccaggaacgtgggcaacaacccgaatacccccctccctccgagcaggccttttccaacgggccccttcagaatgaccccacctctccctcctggcagactgagaccacttcgtcctaccctccccccagcggtaggatccccgctccggcgggtccccgtcgccccgctcccgccttataccgccggccccggtctcgtctcccgggcttgccaacgggcaccctcctccgtcgcggccacccacgtctggcggcgccgcgccgccgcttgtgtgcggcactgccggccaatgtcgcggtggccccttcggtccttctacctgg

SEQ ID NO: 64313 - DNA, 560 bp, Homo Sapiens
ggaccagctagttctgcttttagcatagtgtgcgaccagcagccactggatttatccagcggtgtcaaacagaaggctgagggtacaggcaagacgtccagtccagtgggaatctgtcttagatctcagtgtgcataaaaagcattgtagtgactctgaaggcaaggaattcaaagaaagtcattcagtgcagcctacgtgtagtgctgtaaagaaaaggaaaccaaccacctgcatgctgcagaaggttcttctcaatgaatataatggcatcgatttacctgtagaaaaccctgcagatgggaccaggagcccaagtccttgtaaatccctagaagctcagccagatcctgacctcggtccgggctctggtttccctgcccctactgttgagtccacacctgatgtttgtccttcatcacctgccctgcagacaccctccctttcatccggtcagctgcctcctctcttgatccccacagatccctcttcccctccaccctgtccccggtattaactgtgactccgccgcctcccctccttctcgcagtataagcgat

SEQ ID NO: 64314 - DNA, 979 bp, Homo Sapiens
  misc_feature (430)..(430): n is a, c, g, or t
  misc_feature (651)..(714): n is a, c, g, or t
  misc_feature (732)..(741): n is a, c, g, or t
agggtggaggatggtgcccagcagtgcctcgactgtggcttgtgctttgcctcccctggctccctgggccgacaccgtttcatcagccacaagaagagacggggtgtgggtaaagccagtgccctggggctgggggatggggagtaagaggcccctccatcaaggtctgaccccgatggtggagactcacccctgcctgcttctggaggcccactgacctgtaaggtctgtggcacgagctgcgacagccctctaaacctcaagacccacttccgcacgcatggcatggcgttcatcagggctcggcagggggctgttgtggacaacaactagtctccaaggcctgggactgaccagccccttcctcttggagcctggttttccctactgctgcctgatccctcggctggggagttttcattaacattantattttgttaattcctgtctctccaacctgaagaagaagagcatttgaggattattctagttatttgcaacctccctttgggtttggccctggagtcctagtagagtggaccctccattcctcctttctgagcccaacactaattaattttatgctcctgctgcagaacccccagtggggggcctgggggtgggaaggagggtatcggccgcgtgctcccnnnnnnnnnnnnnnnnnnnnnnnnnnnnnnnnnnnnnnnnnnnnnnnnnnnnnnnnnnnnnnnngctgggtcgcctcctctnnnnnnnnnntggcccggccgccccggcctttccgctcttagcccttcgcgccggtggcggaaccgccggcggcgccgcttttgccctctgccgtcccttcggttcccccgctgctttttccccgtccccgcctgtcgcggtccgtcgccggccctttcgccccgcgagctcccccgcgtgcgcccgcggccgggtacatcggcggcgcacggcgtgtcgcggccccggcgtggacgcaggcccgcgg

SEQ ID NO: 64315 - DNA, 426 bp, Homo Sapiens
tgcttagtctttgtaagggctctctgtggtttgacttaccccagctaccgttaaatgaggacaaatcaccttaaaacatgttcatttgattcataacaaggaaaattgggtctatgattttttgccaatcttagcctaaaagaaattgctttagcttctggtcagcactgattaaaatgtgaatagtgaagtggctatcctaaactggtttatctccacccacactatcatagatttcttaggtaaatacaattcttatctagtggtattctacttgtattcagaatactgtattaaaattttactatttcatttttgtattctgtgcttattttttttgctcacgcatgtatgcttagtataaatgtgtcacttctaaagttttgtctctgacttttagaaataaatttcagaaaaattgtttca

SEQ ID NO: 64316 - DNA, 447 bp, Homo Sapiens
  misc_feature (277)..(288): n is a, c, g, or t
actacactttggcttgggagaggaattattttaaatagacattggtactttttgaacttgatagctaaagattctaaaatgcatgttttatactaagttttaaccagtcaggaaaattttatgtaactagtgatagtttatttttttgtatgaattttgtttaggctgcaatgtttagcttttgttaactcctcactcttgctgtcttaagttcattactatgtttaatggcctacttgccaagatatttagcatgtaaaaagcagggttttgattnnnnnnnnnnnncggcttcatattgaagctgagacttacaataacaagttgagtggcaagcctggtatgctgtgtcttattgccagaatcttagtaaatgtaatgttttaaaagtttgttgtctttgtatattaataacaaattatgacaagttaagtttaaataagagtt

SEQ ID NO: 64317 - DNA, 564 bp, Homo Sapiens
gaaaaggaagttcatactaagcgtattcaacaattgacagaagaaattggtagacttaaagctgaaattgcaagatcaaatgcatctttgactaacaaccagaacttaattcagagtctgaaggaagatctaaataaagtaagaactgaaaaggaaaccatccagaaggacttagatgccaaaataattgatatccaagaaaaagtcaaaactattactcaagttaagaaaattggacgtaggtacaagactcaatatgaagaacttaaagcacaacaggataaggttatggagacatcggctcagtcctctggagaccatcaggagcagcatgtttcagtccaggaaatgcaggaactcaaagaaacgctcaaccaagctgaaacaaaatcaaaatcacttgaaagtcaagtagagaatctgcagaagacattatctgaaaaagagacagaagcaagaaatctccaggaacagactgtgcaatttcagtctgaactttcacgacttcgtcaggatcttcaagatagaaccacacaggaggagcagctccgacaacagataact

SEQ ID NO: 64318 - DNA, 696 bp, Homo Sapiens
  misc_feature (64)..(64): n is a, c, g, or t
gagaagcccgcgtaaggtctccagcctgcctttcagtgtggatgcgctcgtgtcggacaagaangccgcccaaggaggcgtccccggtgcgggcggaaagcgcctcttccggggccaccctgcgggctactgctgctgtcggggcacggcgctcgggaagcgcacagccccgggccgctggtgaagcccttcgagaccgcctcggtcaagtgggaaaattccctaagatggagcggcgtggatgcaggaaccctgctgataattcgccgccgccaagacatgtgagccctaccacctgcaccctgaggaaacacaagaccaatcggaagccgcgcacggcctttcccacgtcccagctcctcgccctggagcgcaagttccgtcagaaacagtacctctccattgcagagcgtgcagagttctccagctctctgaacctcacagagacccaggtcaaaatctggttccagaacagaaggtaaagccatgttttgacttggtgaaaatggggttgtcaaacagcccattaagctccctggtatttcaccttcctgtccatctctcccctccctccggtatacctttatccctttgaaagggtgcttgtacaatttgatatattttattgaagagttatctcttattctgaattaaattaagcatttgttttattgcagtaaagtttgtccaaactca

SEQ ID NO: 64319 - DNA, 836 bp, Homo Sapiens
atctgtttggggtaggtgttgagtgaggcaaatggatctcgatatttcagatgggcttttgatgcactgttgccaaggaaggctttttctgattttttgacaaatgaatttttgcacactttcattggtgtctttcggcaacttacacacattgaaaatgagctattgtacatatttttatattctctttataaatgcatgtctgattgtacttgtaacaatattgtaatgaacggctgtgcagtaggcccagcgctgctgtgtctcgtcagaggaatagcttaccacgaacccctcagcatactgggaatctcttcctgaacaacgaatgtaaatttggtcaagtctactcttccgttcattcaattattttaagcatttgaattatttattgtatatcctaaatatatttctcctttggcagtgactagatttccactaatgtgtcttaatctatccctccagctggcagttactgtttttttaatcccctgaagttgtcctgtaggagacagaaattctttgctgtctgtatcccttggagtaagaaggtagtggcatgggtggagtgtgtgttctttctccaaatctattatgatgtttattaaacacttctgtagcaaagatggtggtagttcttttgttactgaagttgcccttcaccatggctatttgaaaaggagatgtacttggacgtttctgtaaatcttgagataaactgtttggagatttaaccacctctctgatgggggaccaactctatggaaattgtaaatacgttttatttataaacctggcactgtattcaataaacatttctgcagcctttcatctct

SEQ ID NO: 64320 - DNA, 510 bp, Homo Sapiens
catttttgaccgtaaggatttcccctttcttgtaagttctgctatgtatttaaaagaatgttttctacattttatccagcatttctctgtgttctgttggaagggaagggcttaggtatctagtttgatacataggtagaagtggaacatttctctgtcccccagctgtcatcatattagataaacatcagattaaaagccacctgaaagtaaaactactgactcgtgtattagtgagtattatctcttctccatccttaggaaaatgttcatcccagctgcggaggattaacaaatgggtgattgagctttctcctcgtatttggaccttgaaggttatataaatttttttcttatgaagagttggcatttctttttattgccaatggcaggcactcattcatatatgatctcctcaccttcccctcccctaaaaccaatctccagaactttttggactataaatttcttggtttgacttctggagattgatttttaggggggaacagg

SEQ ID NO: 64321 - DNA, 813 bp, Homo Sapiens
tcagctttggcttcctgtccatgtgcccccgccccacaccagctgttgcccgctaccgcaacctgaactgtgaggcgggcagtctcctctgccaccgagggcacccacgccaagccacccacacccagcctgcagctgcctggggcacgctcttagcagtggagcccgtggtctcaggcctccaactttggccttcaggacaccctgtaagaacagagcacacttgctggccagtgccagttccagatgggctgaccggctcttctccccgtgtaggggagccccagcatggactcaagggacagagcacttccagtcgaccccccggctcgcgttcccgtggggatcactgaaccagacacagcattgctgacacatgagactaacacgtgcaattatttaaaaagatttcaataaaactgcctggctggctccgggccgcccctatccgctcagcccgtgcgccctcctccccccaccccattctaccatgggaagttcttggggggaggccaaagtcccttctagaggtggcttcacccttttcccaggaacagtccagtttcaggaagagggagcaggcagcagactggctggaagtgtcaggtgtgggtcagccggtggctgggcactgcccagaatgaaggagatggtctgaggaaccccaggcctcaggttaggaaggaggggcacaggttcttgttggcatgagtgtcaactcagtgcaaaggactgtcctaatctggaaacctgaaagctgtcatctcacagatgtagggaagagaacttctacatgactctgactccagtgcc

SEQ ID NO: 64322 - DNA, 1219 bp, Homo Sapiens
tgcacacgccgaatacccacacgccgcgtgacttgtaggtgagagaacgccgagccgtcgccgcagcctccgccgccgagaagcccttgttcccgctgctgggaaggagagtctgtgccgaccagatggcggacggggagctgaacgtggacagcctcatcaccctggctgctggaggtacgaggatgtcgtccaggaaagattgtgcagatgactgaagcagaagttcgaggcttatgtatcaagtctcgggagatctttctcagccagcctattcttttggaattggaagcaccgctgaaaatttgtggagatattcatggacagtatacagatttactgagattatttgaatatggaggtttcccaccagaagccaactatcttttcttaggagattatgtggacagaggaaagcagtctttggaaaccatttgtttgctattggcttataaaatcaaatatccagagaacttctttctcttaagaggaaaccatgagtgtgctagcatcaatcgcatttatggattctatgatgaatgcaaacgaagatttaatattaaattgtggaagaccttcactgattgttttaactgtctgcctatagcagccattgtggatgagaagatcttctgttgtcatggaggattgtcaccagacctgcaatctatggagcagattcggagaattatgagacctactgatgtccctgatacaggtttgctctgtgatttgctatggtctgatccagataaggatgtgcaaggctggggagaaaatgatcgtggtgtttcctttacttttggagctgatgtagtcagtaaatttctgaatcgtcatgatttagatttgatttgtcgagctcatcaggtggtggaagatggatatgaattttttgctaaacgacagttggtaaccttattttcagccccaaattactgtggcgagtttgataatgctggtggaatgatgagtgtggatgaaactttgatgtgttcatttcagatattgaaaccatctgaaaagaaagctaaataccagtatggtggactgaattctggacgtcctgtcactccacctcgaacagctaatccgccgaagaaaaggtgaagaaaggaattctgtaaagaaaccatcagatttgttaaggacatacttcataatatataagtgtgcactgtaaaaccatccagccattgacacccttgtgatctcacac

SEQ ID NO: 64323 - DNA, 1085 bp, Homo Sapiens
caagtacttgcggctcaacacactgacctccctgggctacgccgtggttgtgattgacggcaggggctcctgtcagcgagggcttcggttcgaaggggccctgaaaaaccaaatgggccaggtggagatcgaggaccaggtggagggcctgcagttcgtggccgagaagtatggcttcatcgacctgagccgagttgccatccatggctggtcctacgggggcttcctctcgctcatggggctaatccacaagccccaggtgttcaaggtggccatcgcgggtgccccggtcaccgtctggatggcctacgacacagggtacactgagcgctacatggacgtccctgagaacaaccagcacggctatgaggcgggttccgtggccctgcacgtggagaagctgcccaatgagcccaaccgcttgcttatcctccacggcttcctggacgaaaacgtgcactttttccacacaaacttcctcgtctcccaactgatccgagcagggaaaccttaccagctccagatctaccccaacgagagacacagtattcgctgctccgagtcgggcgagcactatgaagtcacgttgctgcactttctacaggaatacctctgagcctgcccaccgggagccgccacatcacagcacaagtggctgcagcctccgcggggaaccaggcgggagggactgagtggcccgcgggccccagtgaggcacctttgtccccgcccagcgctggcccagcccccgaagaagcccgctgcctttcaccggccccgaaggcccttttaatcctttttttaaaacgcctcttggggtttttatggtccgcctgcctttcttgggttgcccaagaacagaagaaatggtgggtcctcggggccaagcccccttcttcttccccggcctttctggggaaggaaggaaggccaccccccctggagtgggcactgggaaaaggcccaaaaagaaaaactccaaaggaacgcgggcctggcctttcccgccctgtggggcctccctgggggaccctcctccaattccccctgggcccgggaccaaggccccccggtccccacagacc

SEQ ID NO: 64324 - DNA, 514 bp, Homo Sapiens
aggaacagttgtactttcagaggtgaggtgtcgagaagggaaagtgaatgtggtctggagtgtgtccttggccttggctccacagggtgtgctttcctctggggccgtcagggagctcatcccttgtgttctgccagggtggggtacggggtttgacactgaggagggtaacctgctggctggagcggcagagcagtggccttgatttgtcttttggaagagttttaaaaacgcaaaaagcataaacattctggtccttcagcaatgctttctctgaagaaatacttaacggaaggacttctccagttcaccattctgctgagtttgattggggtacgggtggacgtggatacttacctgacctcacagcttcccccactccgggagatcatcctggggcccagttctgcctatactcagacccagttccacaacctgaggaataccttggatggctatgtttccaccccagagcatagacccagaccagcttacgggatcgtctagatcgacc

SEQ ID NO: 64325 - DNA, 477 bp, Homo Sapiens
attggaagtggggatattggttttttagaacctcttcatgaggagaacttcattcacaaacttaagaagcctttgaacacggtgaatatacacttacttggaagtgtggttatatctgttaacccatatcggtctttacccatttattcaccagagaaagttgaagaatacaggaacagaaatttttatgaactgagccctcacatctttgccctttcggattaagcatacagatccctacgagatcaagataaggaccaatgtattctcattactggggaaagtggagcaggaaaaacagaggccagtaagcttgtcatgtcctatgtggcagctgtttgtggaaaaggagcagaagttaatcaagttaaagaacagcttttacagtccaacccggtcctggaagcttttggaaatgccaaaactgtaaggaatgacaactcctctagatttggcaaatatatggatattgaattt

SEQ ID NO: 64326 - DNA, 613 bp, Homo Sapiens
  misc_feature (37)..(37): n is a, c, g, or t
gggcaggagcatccataggaaagcaaattcttgcccntgtggaagaatcagcctgtcagtttttctttgatttaaatgaaaagcagggaaggaagcgttcatccacaggtagagatagcaaatcttctcctcatccaaagcagcctcgcaaacctcctcagcctccaggaccctgctggttttgccttgctagccctgaagtggaaaaacatttggtggtcaacatcggcacacattgctaccttgccctggccaaaggaggcttatctgatgaccatgtcctcatcctgcctattggacactaccagtcagtggtggagctttcagcagaggtggtagaagaggtggagaagtataaggccactctgagacggttctttaagagtcgagggaaatggtgtgttgtatttgagagaaattataagagccatcacctccagctacaggtcattcctgtcccaatcagctgctctactactgatgacattaaagatgccttcattacccaggcacaggagcagcagatagagctgttggaatcccagagcactctgacatcaagcagattgcacagccaggagcagcatattttatgttgactgcgaccagcgta

SEQ ID NO: 64327 - DNA, 683 bp, Homo Sapiens
gggagcaggcgagacgggccattttcactctgtggtccaaggaaatgactggtctgactcggtctgggagcggggcacccaggtctaaggataactctggggccatgacagccatgagtctcacagaggaccccgagacttctgtgctgcgagtaaccggacttgttctgagacctttgccctagaggatggccaaggggctcctggtgacctatgccctctgggctgtggggggccctgctgggctccaccacctgtacctgggaagggacagccacgccctgctctggatgctgaccctggggggaggtgggctgggctggctctgggagttctggaagctcccaagctttgtagctcaggccaacagagcccagggacagaggcagagccccagaggggtgacaccccctctgagtcccattcgctttgctgcccaggtgatagttggcatctattttggccttgtggcactgattagcctttcttccatggtcaacttctatattgtggccctcccactggcagttggcttaggggtcttgctggtggctgctgttggcaaccagacctcagactttaagaacactctggggtcagcatttctcacttcacctatcttctatggccgccccatagccatactgcccattagcgttggccgtcagcatttacagctcaga

SEQ ID NO: 64328 - DNA, 700 bp, Homo Sapiens
  misc_feature (103)..(103): n is a, c, g, or t
attcttattgaattatacccctggggttcacagttcttcagacttcaatgatagaaagagcacctggcaatgatggaacgaaatattaggaccccatcccccnaacacatgatcaaaaacaagaaaacgcaaagattttcaccataaccagctaattgggatgaacacaggttcgctggtagatatgttaggagacgctgcaaaccgttgaaggaatttatgctttgtcatgatgaagaacatgagaaactgtttgacctggttcgaagaatgttagaatatgatccaactcaaagaattaccttggatgaagcattgcagcatcctttctttgacttattaaaaaagaaatgaaatgggaatcagtggtcttactatatacttctctagaagagattacttaagactgtgtcagtcaactaaacattctaatatttttgtaaacattaaattattttgtacagttaagtgtaaatattgtatgttttgtatcaatagcataattaacttgttaagcaagtatggtcttgataatgcattagaaaaattaaaattaatttttctttttgaaattaccatttttaaatacctttgaaaaatcctttgtgtccagtgataaatgtgattgatcttgccttttgtacatggaggtcccctctgaagtgattttttttgagtaaaaggaaatcttgactacttt

SEQ ID NO: 64329 - DNA, 904 bp, Homo Sapiens
  misc_feature (55)..(55): n is a, c, g, or t
  misc_feature (255)..(301): n is a, c, g, or t
  misc_feature (432)..(444): n is a, c, g, or t
  misc_feature (560)..(568): n is a, c, g, or t
ccgtgcgtcgtgcgcccgcaacagaagcccaaccgggcctttgcccgggtaaggngctaccgcgacgccacttgtccacgcagccaccaccggcccgggccagtccctgccagtccgtccgcctgtccgtccgtgtcctcagctctgtccacgcttcgataggcctgacgcagcccccagcccagggccgccctagcaacttcctgtacatatgactgtaaaatggtaaacgtgtgtattatatctggcctcgtnnnnnnnnnnnnnnnnnnnnnnnnnnnnnnnnnnnnnnnnnnnnnnngaagactgtaaatgttaagacgactagtgttcttattagtatattgcttcacactgaagattgtgtgtatcgagctgtttctaaaagatgtttattttccttaagagtaaaaaacagtcattgcattcagnnnnnnnnnnnnngtcaataaagatacaacgattgttttggaaaatctgcagcccgtggattccgaccagattcagctgggagccgggccaggctttaggttggggaatgggaatgaagggaggggctnnnnnnnnncatgaatggagtcagggagtcggcctttcacagaacaggaaacctcccccgcccctgtgccccctctccagtgtggcggcaggtcgggagggaggaggcttctttgctgtgagatgaccaggggccgggatgggggaggtgagacgtgccagacttcttgcagggagacccaagctgtagctcctgtcacacaacaggtcctggaagtcagtccatcctcccgtgccacccaaggacctgatggggacagagctgggaggtgagaagggacaactgaccccatggaggccctaagggttgacacagcccaaccatgtgccctgggagcagggggaa

SEQ ID NO: 64330 - DNA, 691 bp, Homo Sapiens
gggtgcactggaggtgccagcccagcaggccagggggcctggccagcaatgtggagatggcctgtccccgccagctaccggggggactcatgccaggaatgtgcccccggcttctatcgggacgtcaaaggtctcttcctgggccgatgtgtcccttgtcagtgccatggacactcagaccgctgcctccctggctctggcgtctgtgtggactgccagcacaacaccgaaggggcccactgtgagcgctgccaggctggcttcatgagcagcagggacgaccccagcgccccctgtgtcagctgcccctgccccctctcagtgccttccaacaacttcgccgagggctgtgtcctgcgaggcggccgcacccagtgcctctgcaaacctgcttatgcaggtgcctcctgcgagcgcccgcgcccggattctttgggaacccactggtgctgggcagctcctgccagccatgcgactgcagcggcaacggtgaccccaacttgctcttcagcgactgcgaccccctgacgggcgcctgccgtggctgcctgcgccacaccactgggccccgctgcgagatctgtgcccccggcttctacggcaacgccctgctgcccggcaactgcacccggtgcgactgtaccccatgtgggacagaggcctgcgacccccacagcgggcgcgttgtgag

SEQ ID NO: 64331 - DNA, 583 bp, Homo Sapiens
tttttagagatgaaaggtagatcataaagtcataggctccaactgatccagatgctacgctccagactgatccagatgttatgctcctgctgatccagatgcccagaggctccatcgtccatcctctatcctccccagatcggctgaactctccccttgtctgcactgttcaaacctctgccgccctccacacctctaaacatctcccctctcacctcattcccccacctatccccattctctgcctgtactgaagctgaaatgcaggaagtggtggcaaaggtttattccagagaagccaggaagccggtcatcacccagcctctgagagcagttactggggtcacccaacctgacttcctctgccactccccgctgtgtgactttgggcaagccaagtgccctctctgaacctcagtttcctcatctgcaaaatgggaacaatgacgtgcctacctcttagacatgttgtgaggagactatgatataacatgtgtatgtaaatcttcatggtgattgtcatgtaaggcttaacacagtgggtggtgagttctgactaaaggttacctgttgtcgtgatctg

SEQ ID NO: 64332 - DNA, 882 bp, Homo Sapiens
ggggaagcgctcgtccgtggacgaggacctcggaaggtcccgaggaggccgcaggaaagtcgtcgagggacgggcggcccgcctcgacaggtccagctcctgttcggctcactgcaaggaaacccctggaggctgaggagagaggctggcaccgcctagcattcgtgccccagctcaggtgagccgcccagtcatccgtgcccgcctaccagggacctggccacccctcccaagctccacacttgtgagaagtgcagtaccagcatcgcgaaccaggcctgtgcgcatccaggagggccggtaccgccaccccgggtgctacagccgtgtgccgactgtgggcctgaaccgtgaagactgcgcgggcacttcatgggtgggtgacgagctgtactgtgagaagcaatgcgcacgcctagcagcgtacgtccggctaccctgccaacgcacgtcacgacgtgcttctgcggcctcgaggaccacgccgatgccgcatcaagcactgccgtctactgctggagcgcagggtcatgcctatataagttggcatggcagggacacatggtgggcagcttgctcgttacactgagctaagtcttggagacgctgatggccccttatgtcctcgctagggtgggcacaaggtactgggacctgtcttggatctgtgggagactcaccctctaccttgccaggcctctcccctgcaggactggcattgcactagtctgaggtggccactgcctttgatcaaccatttgtgtgcgagggtctaagtagggtcgaacacagaagtgggaaggagaggggtgggccaggggctaatggtgtcactgtgtaaagtttttgacatactagctctataaatatatgaatatggac

SEQ ID NO: 64333 - DNA, 521 bp, Homo Sapiens
ctgcaggcacctgtactgccatcctgctcaccgtcttgacctgctacttttggaaaaagaatcaaaaactagagtacaagtactccaagctggtgatgaatgctactctcaaggactgtgacctgccagcagctgacagctgcgccatcatggaaggcgaggatgtagaggacgacctcatctttaccagcaagaagtcactctttgggaagatcaaatcatttacctccaagaggactcctgatggatttgactcagtgccgctgaagacatcctcaggaggcccagacatggacctgtgagaggcactgcctgcctcacctgcctcctcaccttgcatagcacctttgcaagcgtgcggcgatttgggtgccagcatcctgcaacacccactgctggaaatctcttcattgtggccttatcagatgtttgaatttcagatctttttttatagagtacccaaaccctcctttctgcttgcctcaaacctgccaaatatacccacactttgtttgtaaatt

SEQ ID NO: 64334 - DNA, 428 bp, Homo Sapiens
cccttcctgggtatttattctctatttattggggataggagaagaggcatcctgcctgggtgggacagccccttcagccccttctcccctccccgcctggccagggcagggccaccccacttctacctccttagctttccctgtgccactttgactcagaggctgggagcatagcagaggggccaggcccaggcagagctgacgggaggccccagctctgaggggagggggtccgtggtagaggcctggggccggtagaggctccccagggctcccttatgtccaccacttcaggggatgggtgtggatgtaattagctctggggggcagttgggtagatgggtgggggctcctggtggccttctgctgcccaggccacagccgcctttgggttccatcttgctaataaacactggctctgggactag

SEQ ID NO: 64335 - DNA, 529 bp, Homo Sapiens
  misc_feature (210)..(471): n is a, c, g, or t
  misc_feature (474)..(486): n is a, c, g, or t
ctgcggggtgagactgtgtcagagatacactgctggccacaagtgtcccctctcagtcccaccttttcgggctgtcccatgtctatctcaggggcccgttacctctctgcagcagtcccccatcccagccacaccagggtctgtccggccaaccctcttccccagggaaaggagaaaagagaaaacaggctgggcccggtggctcactcnnnnnnnnnnnnnnnnnnnnnnnnnnnnnnnnnnnnnnnnnnnnnnnnnnnnnnnnnnnnnnnnnnnnnnnnnnnnnnnnnnnnnnnnnnnnnnnnnnnnnnnnnnnnnnnnnnnnnnnnnnnnnnnnnnnnnnnnnnnnnnnnnnnnnnnnnnnnnnnnnnnnnnnnnnnnnnnnnnnnnnnnnnnnnnnnnnnnnnnnnnnnnnnnnnnnnnnnnnnnnnnnnnnnnnnnnnnnnnnnnnnnnnnnnnnnnnnnnnnnnnccnnnnnnnnnnnnngagaaacagctgtcacctcccgcagaccctaatcctctctcgc

SEQ ID NO: 64336 - DNA, 450 bp, Homo Sapiens
agtggccataggaaaaggcccggcgtccacgcctacctacagccctgcacccacccagccggcccctagaatcgcgtcagccccagagcccagggtcaccctggagggaccttctgccaccgccccagcctcatctccaggcttggctaagccccagatgcccccaggtccctgcagccctggccctctggcccagttgcagagccgccagcgcgactacaagctggctgccctccacgccaagcagcagggagataccactgctgccgctagacacctatccgcgtggctaagagctttgatgctgtcttggaggtcactgagcacggggtgagcccgtggacctctcctgcctgccccctccacccgaccagctgcccccagacccaccgtcaccaccgtcgcagcctccaccccccgctacagcgaccaagggatcctctagacagc

SEQ ID NO: 64337 - DNA, 941 bp, Homo Sapiens
caggctgtacaggtcccagcgtcgtaagatggagccaagagcagagcgccagcatgaacttgggggtcagcatgctgaggatcctcttcctcctggatgtaggaggagctcaagtgctggcaacaggcaagacccctggggctgaaattgatttcaagtacgccctcatcgggactgctgtgggtgtcgccatatctgctggcttcctggccctgaagatctgcatgatcaggaggcacttatttgacgacgactcttccgacctgaaaagcacgcctgggggcctcagtgacaccatcccgctaaagaagagagccccaaggcgaaaccacaatttctccaaaagagatgcacaggtgattgagctgtaggtgagcagtgacgtgaagaggggttctagccccgtggaaaacagcccatggttaacatctcaggatgttctgcattcaaacacccaaggctggtaatgaactttcacatggactgaatattggaggcaaataatagaaggaatagaatatacagtgcctctgtcctgaaggaacaatatcatgcctcttctggaagaaacggactgcacagaggaaggattgagcaatttagcctgcagtggaagaaggtggacaccacaagcttcaccctgtgttggagctgttcatgcttccatgaggccatggtgtccatgtccgtggaacctaccacagaaaatggctcatgaaaaggggaatccgacccaacacacagcttcctacactgccatcttatcaacagttaggcactactttgtagaacgattagcttcaccctcttagctgccaggagatcccttcttaaagatggactatgtgaagattcgggagtcctgaaacatggggactccgggatggtctctagccctatcgatgatgaacactggccttctggaggggaaatggcagtct

SEQ ID NO: 64338 - DNA, 440 bp, Homo Sapiens
gggaggagctaggtctgatcgagcaggcctacgataacccccacgaggcgctgtcccgcatcaagcgtcacctcctcacacagagagccttcaaagaggtgggcattgagttcatggatctgtatagccacctcgttccagtatatgatgttgagcccctggagaagataactgatgcttacctggaccagtacctgtggtatgaagccgacaagcgccgcctgttcccatcctggattaagcctgcagacacagcaccacctccgctgcttgtttacaagtggtgtcaaggcatcaataacctgcaggacgtgtgggagacgagtgaaggcgagtgcaatgtcatgctggaatcccgctttgagaagatgtatagagaagatcgacttgactctgctcaacaggctgctgcgcctcatcgtggaccactacatagccgt

SEQ ID NO: 64339 - DNA, 533 bp, Homo Sapiens
agctgcctctagaggatccaccaaggtaagtcgagaccgactgcatgtttttcacaaggcagtttattcatatattgacatattttggtagtagctgagaacctaagacttgaaattatacattgtgtagtattttttaagctaagcaatgcaattttggtcagatcttatttgtgtgaagataggctctgaaatcctatggtattgcgtttgtaacgttgatattaatgcaaaatagtttaggaaatggagtcttctgcaagggttctgtatacttttcccacattgtatgagattttccaaaattttggtgtgaattgggcacttttggaaaactcctgaaaaagaattagtttccttcatctgcagacctttgtccaatacgggtaccatttctttatagtaactcgattagccatatatgtttgtttctagtcctgctcctttgctcctctcctatgccttcccagtgctggctccattttgaagactcaagggcagaggggaagcagatcataaagagaaaaaggggc

SEQ ID NO: 64340 - DNA, 518 bp, Homo Sapiens
  misc_feature (405)..(405): n is a, c, g, or t
  misc_feature (480)..(480): n is a, c, g, or t
  misc_feature (487)..(487): n is a, c, g, or t
accaaggtaagtcgggaccgtatcaaactgcactctgacagggaaggactgcattaatggtttcaaacgcgatcacaatggttgtcggacctgtgagtgcataaacaccgaggaactatgttcagaacgtaaacaaggctgcaccttgaactgtcccttcggtttccttactgatgcccaaaactgtgagatctgtgagtgccgcccaaggcccaagaagtgcagacccataatctgtgacaagtattgtccacttggattgctgaagaataagcacggctgtgacatctgtcgctgtaagaaatgtccagagctctcatgcagtaagatctgccccttgggtttccagcaggacagtcacggctgtcttatctgcaagtgcagagaggcctctgcttcagctgngccacccatcctgtcggacacttgtctcaccgtggatggtcatcatcataaaaatgaggagagctggcacgatgngtgccgngaatgctactgtctcaatggacgggaaatgt

SEQ ID NO: 64341 - DNA, 386 bp, Homo Sapiens
gagtcttggaatgatgagctttctcagcaaatgaatgacttcgacacagaagatctcacgattgcagagcagcgcctccagcaccatgcagacaaagccttgaccatgaacaacttgacttttgacgtcatccaccaagggcaagatcttctgcagtatgtcaatgaggtccaggcctctggtgtggagctgctgtgtgatagagatgtagacatggcaactcgggtccaggacctgctggagtttcttcatgaaaaacagcaggaattggatttagccgcagagcagcatcggaaacacctggagcagtgcgtgcagctgcgccacctgcaggcagaagtgaaacaggtgctgggttggatccgcacgagagtctccgtcgaact

SEQ ID NO: 64342 - DNA, 1219 bp, Homo Sapiens
  misc_feature (38)..(38): n is a, c, g, or t
gctgggggaggacggtggcccgcgaggctcgtcgcagnaacgcggcggcgatgtccgcgagccagagcacaaagttatcattgttgggctggataatgcagggaaaactaccattctttaccaattttctatgaatgaagttgtacatacatctcctacaataggaagtaatgtagaagagatagtgattaataatacacgtttcctaatgtgggatattggtggccaagaatctcttcgttcttcctggaacacttactatactaacacagagtttgtaatagttgttgtggacagtacagacagagagaggatttctgtaactagagaagaactctataaaatgttagcgcatgaggacctggagaaaagctggattgctgatttttgctaataaacaagatgttaaagaatgcatgactgtagcagaaatctcccagtttttgaagctaacttctattaaagatcaccagtggcatatccaggcatgctgtgctctaactggcgagggattgtgccaaggacttgaatggatgatgtcacgacttaagattagatgatctctactgacctcttctcatagattttgtataaatgaagtgctggactttacctgaaagctgcaaaaattaatggtttagatatatttataataaactgatttaaactttttctataagaagaaaaattaagaccacttatttgaaaacaaagatgaagtctcaccttccagtttgctttctcattagttttttccaaagtaagttattgaagctgtgattgacatttttctcataatgaatcctctcaggacattgtgtagcctatggtaagtacaaagggagaggaagacattttgaattttaagagctttattatcagtttaaccctccctagttgaatgttattttcttcttgttccattaagtcagaatacaaatcagcacagatattcgaatgtttccaatattttaaaatgtaatgttacttatgaaaagtattttgcttaaggttgtgtgtgtattgtgtatatacctcaagttcaagttaatggcattgatttatgttccagacaaaaataacacaaataataatatccttcgttataaccacaatgagataagtattggcattagtgttcagtgccattttatactttctctctgtgttctctgtattgtactaaccaacctcccaaatcgctgagctgcttgtttaa

SEQ ID NO: 64343 - DNA, 924 bp, Homo Sapiens
agctggtacccggcccggaggtcttatggatggcttggctagcgcgcggcggcgtggctaaggctgctacgaagcgagcttgggaggagcagcggcctgcggggcagaggagcatcccgtctaccaggtcccaagcggcgtggcccgcgggtcatggccaaaggagaaggcgccgagagcggctccgcggcggggctgctacccaccagcatcctccaaagcactgaacgcccggcccaggtgaagaaagaaccgaaaaagaagaaacaagcagttgtctgtttgcaacaagctttgctatgcacttgggggagccccctaccaggtgacgggctgtgccctgggtttcttccttcagatctacctattggatgtggctcaggtgggccctttctctgcctccatcatcctgtttgtgggccgagcctgggatgccatcacagaccccctggtgggcctctgcatcagcaaatccccctggacctgcctgggtcgccttatgccctggatcatcttctccacgcccctggccgtcattgcctacttcctcatctggttcgtgcccgacttcctacacggccagacctattggtacctgcttttctattgcctctttgaaacaatggtcacgtgtttccatgttccctactcggctctcaccatgttcatcagcaccgagcagactgagcgggattctgccaccgcctatcggatgactgtggaagtgctgggcacagtgctgggcacggcgatccagggacaaatcgtgggccaagcagacacgccttgtttccaggacctcaatagctctacagtagcttcaccaaagtgccaaccatacacatgggcaccacctcacacagggaaacgcaaaaggcttacctcgctgcagcgggggtcattgtctgtatctgctcgcgagcc

SEQ ID NO: 64344 - DNA, 446 bp, Homo Sapiens
  misc_feature (17)..(17): n is a, c, g, or t
  misc_feature (173)..(173): n is a, c, g, or t
  misc_feature (223)..(223): n is a, c, g, or t
tttaatgtttagatttntagtctagtctattctgaagatatttgattaatatatttctaagaagaccactagtcccatgaagtctcaccttgttgacttccaccagaacaaaacctgttaattcagcttgacttctcatatgtgttctgtgttcaagctcctgtgggcaactnaattgttttaagaaaactctatttctgttcatattaattcacttgccagnctccaattctgaaagttgtctagttcttccttcatcacacgtgcttctcatcgaaaccctggtttcaggatggatcaagtgctgttacagctcatgttccttagacctgatttgttcttgatattttactgcctttccttttaatttttgtttgaatgagaaaagtttaatacaacaggtgtccagaatacttgcagtataaatgaagatttggtttttgtat

SEQ ID NO: 64345 - DNA, 582 bp, Homo Sapiens
  misc_feature (159)..(159): n is a, c, g, or t
tcccactccacataagggttttagtaagagaagtctgtctgtctgatgaggaatagggggcaaatctttttcccctttctgtaaatagtcatcacatttctatgccaaacagaaacgatccataactttagtcttaatgtacacattgcattttgatanaattaattttgttgtttcctttgaggttgatcgttgtgttgttttgctgcactttttacttttttgcgtgtggagctgtattcccgagaccaacgaagcgttgggatacttcattaaatgtagcgactgtcaacagcgtgcaggttttctgtttctgtgttgtggggtcaaccgtacaatggtgtgggaatgacgatgatttgaatatttagaatgtaccatattttttgtaaattatttatgtttttctaaacaaatttatcgtataggttgatgaaacgtcatgtgttttgccaaagactgtaaatatttatttatgtgttcacatggtcaaaatttcaccactgaaaccctgcacttagctagaacctcatttttaaagattaacaacaggaaataaattgtaaaaaaggttttctatac

SEQ ID NO: 64346 - DNA, 587 bp, Homo Sapiens
acctctatcagggtttttatttgaaagtgtgttcttaccatttccttgtttgagtaagagagtgaatggttctgagtgtttaggaaggatttgcttgcttgcagcagaagttctaggaaaagcaggcacctcccaaatatcttgaggacactggcagccttatggtgactaaatccacactttctttaaagagatgcagatgaattacttttctgttaatatatagaaaaatacacaggagaacatgcagatacatgtaaatatctacatacagggatatttgtatgtgtggttgtgaaacccatacacaagtggatttggccatctttgggcagtgaggtcaaatgtgaatatgtgtaaaagtgcttttcagaactgcattactatgagaaaacatcaaaactgctgtagttttccatttctactgtatttcagttgcaacctatttttaataaactttgtatgtatttaagtgtatttgctattgttttgaaagtgctgacaaagtttatatttgtaacatcagccttcctcgcccatctctttccatctgtctcttcttcattaaacacttactgagctatgaa

SEQ ID NO: 64347 - DNA, 439 bp, Homo Sapiens
tgatcatgtgatgtgtacaaactatggtgaaaagtgccagtggtagtaactgtgtaaagtttctaattcacaacattaattcctttaaaatacacagccttctgcctctgtatttggagttgtcagtacaactcatcaaagaaaactgcctaatataaaaatcatatatatggtaataatttccctcttttgtagtctgcacaagatccataaaagattgtatttttattactatttaaacaagtgattaaatttagtctgcacagtgagcaagggttcacatgcattcttttatactgctggattttgttgtgcatcatttaaaacattttgtatgtttcttcttatctgtgtatacagtatgttcttgaatgatgttcatttgtcaggagaactgtgagaaataaactatgtggatactgtctgtttatattataaa

SEQ ID NO: 64348 - DNA, 730 bp, Homo Sapiens
  misc_feature (578)..(578): n is a, c, g, or t
  misc_feature (588)..(588): n is a, c, g, or t
  misc_feature (607)..(607): n is a, c, g, or t
ggaatagtgggttttgctgcaaccggtttattttccttctgttttcacccattctggcacaatctggcgccatcgtccttcttgtgaggccaagcctgaaaatgcgaagcagaggaggcaggaccaaaattgaggcgaatccaggaacctgccaatgggtctccgggtgcggtctctgaaactggaggatatcgggaggaaaggctctccgatgcggagataatggggaagctcttggcatggttggctgtaggtatgtgataccggaggagcaggagtcaaataggatacgccgacttttaattcaaggaacccttttctgaaacactttgccacaatgaaggaaataaggaattgtactctcagagatgttgagaaaagatacatgggtcttggaagataattactcaaaatatgcagggaaggaataaaattgaagggtgtttttcttagagaacatcatttgtcatatttatttgatcaagaagttgaagatttatataataaggatctagtttgaagcactaggaagaataagacatcagtttgaaaaagaggctctatccagaacaacacgnaattctgctnaaaattggagcaagaacanaccatcaaatatatgttgacacttgggtggaagaatggtgaactaattgatgctttatgaaaagttgatagggacagtgctccaaagaaatcagtttacaaatggataactcgttttaagaag

SEQ ID NO: 64349 - DNA, 590 bp, Homo Sapiens
ctcggaacgtgttatccacctgggtgagtcaggtctgcgctcccagaggtggatgtgggtcctcctgcacctgatgctggccttcctgtccctgcgctctttgacagcctcctgacctgtaggacgagggattccttgttcttctgcctgaaattttgtacagcagcaatttcttactctctctgcaagttttcttcccagtcacgagatactttgtgcagctgcttatctccaggccttattaaaaagtttcagttcctcatgttcagattgttctcagaggcccgacagcctctttctgaggaggacgtagccagcctttcctggagacccttgcaccttccttctgcagactggcagagagctgccctctctctctggacacacagaaccttccgaggggtgttgaaagaggaagatgttcacttaacttaccaagactggttacacctggagctggaaattcaacctgaagctgatgctctttcagatactgaacgctcaaggagttatgaccactcagaaaattctgatttggtctttggtggccgcacaggaaatgaggatattatttccagattgcaggagat

SEQ ID NO: 64350 - DNA, 425 bp, Homo Sapiens
catcatggggttctggaggcccaatgcttcagagtcatctctgtcctgcccgggatgcacttttaaatgaagagttagaatattttattggctaatatacttttcttgttatttttacaaaggccacctttatcctttttgatgccatattttcagtgttacacttttatggcttttaattttcgatttgacagatgtaagaagcagcatgaatagtttatactgtggtttttcagagactgaatgccaagagaactcggtaaatgtttattcttctcagctttctctttagattcccctaaatagcgccccatttgggaacagagcaagagtgttgaactgaagaccaaaatgccctcaaggtgttaaataatccgagggggaatatttgctgggcgtcaggaaagactcagatgaattcaaca

SEQ ID NO: 64351 - DNA, 636 bp, Homo Sapiens
  misc_feature (73)..(73): n is a, c, g, or t
aactctcccaggtttagattaccgttttcgacgacagattaaccaaaaatgccccacacaggttttattactnttatatactatacttttaacagtacagaccctaaattttattatttgttgctcccccaatctgataccaaatgtttaaagttgtttgaaatccaaacatggtagtgttcatgggtaaatattttctaggctatgtaagagttagcagcccatagcatagaagtaatcaagtagcatctgagactgttggaggcactagggcctctctgggccctacagcctcacttccccagcctcaccttgctgtcctctgacactgccatcagggctgttagtggcacctgtatgaggccaagtgtgcgtccaggggaacagcacaggttaatgcgtctccctagaactcatgaagtcagtttaattcatgcatgaacatgagttcattttatgttttatatagctttcttagacataccaaaccatcattcataaatcagataaattattcagtttttgtgtttagaaagctaagtatgtgtagctggaaacaaaaatgagcgtgttttctctcctgttaatctagagtgtgcagttacacatgtgtggataacacgttcgcgaggggta

SEQ ID NO: 64352 - DNA, 896 bp, Homo Sapiens
ttaataattccttatagccaatatcaacagtggcaatcagcacacagaggaaaggacccaaatcactatgtagcttaaagatttctgttaatttgaaagaacaaaaacaagacagaacttctggtactctaatcaggatgattcctaacaagtcagtcatttgtgaacttagtggactttttggttactttaatttgcatatattctccagttacatcggactctatctgtggccttgttcttcatttcagtgttaatcagctaaacagaagttgttgcttatgatgtgtgagtgaacatatgccactgcctggcctttttttcttcagagcttgttgtctttttcgctatattagactttgcagtatgcccagaagctttccttcataaaatagaaagaaaaaaacatttggcttatttttcactgtagctagtcttttatacaataatcttgtaagaaaatttcttgaattctaaatattactctttctagatttttgaaatcaaaaagttttcagtaaaaagtttcttactttattttattatattaggtagtaaaaaatgtagggttatttaccataacctgttcattaatatcagaaatttacaatagcattttaagaccatagtaggattctagcataccgtgtagtacctatggagtattgtaagagctaattgttggagatgaattgcttctcatcttgttctccagtttccattgttggtttattgcagatttgtatcctgtgtcaacattcaaggtattattgataaaccttttcaaccagcagcaagaagttcaaatttttttctgtcactgtaacagaaaacacaatatgtatataacatttatgtagcaataaatgtgccatcttttttttaacacagtaaaa

SEQ ID NO: 64353 - DNA, 868 bp, Homo Sapiens
cctgattttttgttccccagtatcccccggagctgtctctggaaagtagctggcgaggttaccttaactatcactgaagaaagaaattttctgacacactgatggcatgtgacttgtctcctaagtcagtgaggcatcactttgtttgcataaagtatacggtttgttaaggcctttgttcttgtgagatgcaaaacagctgctagtctgcaacctagttttccctctcacctttaactgacgttttgtcctcaataattacacaaggacctagagtacctataggacaaaaagtatagaataaatatatgcctttagtcatttggttttttcttaaaaagttgagattcttaatctgacttacatgttactttatccgtatgtctttgttagtggagaccgctaaactaatgatgtttgaaaacagttcctctgtttttagaattggaagatagcactctagagtggacatacggaaagactgtgactttattttgtaatgggaggaagaaattttctcagagcaaactttctattttttacctgtgatataacagtgactttttaaaatggtgacagtgttggcaaggaaacagcaacacaggctgcgctgttggtaggagtgaaaaccagtataatttttttgaaaaacatttatcagaaacttaaaatatttcataccgtttgatccagtagcttcttttaaatcataaatgcagacaatgtttaggtaaagacatactcattaagtgttatttattttactcaagaactggaaaccaactaaatgccttctatagaagtaatttttgatgaggagataaacaccaacccaggaattttcaataaatttttattacttaacctg

SEQ ID NO: 64354 - DNA, 639 bp, Homo Sapiens
gcaggtgatctagaggatcccatctcaggcaggacgaccgtgaggcccagagcatctgtgagcgggtcacccccaggctctcccatgcctactccgctgtggtgctctctgctgtgaaggtgctgatgaagttcatggagatgttgtctaaggacttggactactacggcacactgctcaagaagctggcccacccctggtcacactgctgtcagccgagccagagctgcagtatgtggccctgcgcaacatcaatctcatcgtgcagaaaaggcctgagatcctgaagcatgagatgaaggtgttcttcgtgaagtacaacgaccctatctacgtgaagctggagaagctggacatcatgatccgcctggcctctcaggccaacatcgcccgaggtgttggcagagctgaaagagtacgcaacagaagtggatgtggactttgtacggaaggctgtgcgtgctattggccgctgcgccatcaaggtggagcaatctgcggagcgctgtgtgagcacgctgctcgacctcatccagaccaaggtcaactatgtggtccaggaggccatcgtggtcatcaaggacatcttccgcaagtaccccaacaagtatgagagtgtgattgccacactgtgtgaga

SEQ ID NO: 64355 - DNA, 1011 bp, Homo Sapiens
  misc_feature (591)..(638): n is a, c, g, or t
cttcaggcctgaagctgcacgactgaagttcgcctgcatttatcagccctcttgtggggtcctgccacctggggttcctgctggggaccatgtgtggttgtggcatgtgtgagcagaagggaggatgaggaaaaagagaagaaaccccggtactgacaagctgtttttgagtgccactgtttggcatcatctaagccactgaatcaagtgtatttcaggcttatttcaacattccaatgccctggttttcctgcttgaatctgttcgtggtcaaaggtttgggggaatttgtgaccctggaacatccccagagtgaaagatggagctgggccacatcagaataaggcttggcccatcctctcacagctaggtgctctgcaggcatgctgactgtcctgattgcgatccagcccgaaattccctcctctgctttcaaaagtcaaatcccccattcttaggccacactgggtgtcacaagctcctgtcagggagctggggtttgggaatgtgctttgtgaactctgctttaaagtgaggggccgaggaaaacttagaaacaggcagagttggaagcagcccaatcacagtggnnnnnnnnnnnnnnnnnnnnnnnnnnnnnnnnnnnnnnnnnnnnnnnnaaagcaggtggaccattccactttttagctcctattgatgcaccaaaccaagtgcctcatttctgtgccaaatgtttgccttggtcgttgtggacctccttctctaacttgcggtggcatgactgtcaggaggtgctggcattttcagcagatcctcatgtgttgaccctgatgtctttagcagaggcctctagcatctcggtttttcatccactgcaggaatgtggccacagggagcagaggtttgtactttccccaagaggtcctcatcctgagacggtctctacccatgtttaaccccaagagtgcaggccaggttccttatccttctgatgaaggatgagagagctcatttagaagtataaagcttgag

SEQ ID NO: 64356 - DNA, 382 bp, Homo Sapiens
  misc_feature (280)..(280): n is a, c, g, or t
ttctggagagaagccctttagatgcgagaactgtgacgaaaggtttcagtacaagtaccagctacgctcccacatgagcattcatattgggcacaaacagttcgtgtgccagtggtgtggcaaggatttcaacatgaagcagtacttcgacgaacacatgaaaacacacactggagagaaaccctttacctgtgaaatctgtggcaaaagcttcaccagccgccccaacatgaagagacaccgcagaactcacacaggcgagaagccctatccatgtgantgtgtgtggccagcggttccgcttctcgaacatgcttaaggcccacaaggagaagtgctttgggtgaccagccccgtgaatgtgccacctgctgtccagacc

SEQ ID NO: 64357 - DNA, 732 bp, Homo Sapiens
  misc_feature (96)..(96): n is a, c, g, or t
agctcgtgtcatcgatagcaagccattgtgatggaactgagctcatctaggtctgtgtggcgctgatctccactactccatctccatgccgtgtgngaggatgaaggggatgatgatgccaagaagcagacgccaaagcagaggctgctggggtggattcagaacaagatcccctacttgcccatcaccaactttaaccagaactggcaagacggcaaagccctgggagccctggtagacagctgtgctccaggtctgtgcccagactgcgaatcctgggacccgcagaagcctgtggataatgcacgagaagccatgcagcaggcagatgactggctgggtgttccacaggtcatcactcctgaagaaatcattcacccggatgtggacgagcactcagttatgacttacctgttccagtttcccaaagccaagctcaagccgggggctcctctcaaacccgaactcaacccgaagaaagccagggcctatggcagaggaatcgagcccactggaaacatggtgaagcagccagccaagttcactgtggacaccatcagcgccgggcaaggagacgtgatggtgtttgttgaggacccagaagggaacaaagaggaggcacgagtgacccctgacagtgacaagaacaagacatactctgtggagtatctgcccaaggtcaccgggctactacaaagtcacagtcctcttgcaggacagcacatctccgaa

SEQ ID NO: 64358 - DNA, 424 bp, Homo Sapiens
cagatgaatgtacaagaggctaaacagtctcatgaactacagcgcagatagcaggttaacaaacgctttgaagccagcaaagaagatcttacgaaaagactttaacattcacccaagccaccagtatcgaccaggaataaactgtaaatgatgtcaacagcaataatagcatgtcttacagaaatgcaggcacagtgagacagatgctggagtccaaaagaaatgtaagcgagagtgcaccaccatcctttcaaactcctgtgaatacagtatcttcaaccaatcttgtcactcctccagcagttgtcagtagtcaacctaaattgcagactccagtgacttcgggttccctcacagcaacgtcagttcttcctgcacccaatacagctactgtagttgctactactcaggtgcctagtggaaa

SEQ ID NO: 64359 - DNA, 470 bp, Homo Sapiens
  misc_feature (241)..(242): n is a, c, g, or t
aaatggaggcatctggtgcccatagagattctcaaaaggcaggagaaagggacgacgatgaggaaaaccttcctgagggagagatccctcctccccaagaccccagtgaagaatgggtggattacgtggactctttggggcgttcccggcgctgtatgagaaaggatttgccagatctgctggagatggataaaaatcttcaggggagacttttttattagtcctgctaatgaaaaaaccnnctattatctgaagatatgagaaaagaacttccagcgccagcaatgggaggaagaagaaagagaggccctgaagaggcccatggggcccgtacattatgaagacattcgggaaaatgaggcccggcaacttggtgttgggtattttgcctttgcccgagacaaagagttgagaaacaagcagatgaaaaccttagagatgctgcgtgaacagacaacagatcagagaac

SEQ ID NO: 64360 - DNA, 456 bp, Homo Sapiens
gctaaagtcatccagtgaaacttttagagccagaagtaactttgtcccagtcctacaatgtgaaaagagtgaatagttgcctctttttagccattttcatggctggtacatattcgtacgcattacttttcagaatcaatacgcactttcagatattcttatttttattctcttaagtctttattaactttggagagagaaatgatgcatctttttattttaaatgaagtagatcaacatggtggaacaaaatgataaagaacagaaaacatttcaatatattactaataactttttccaatataaatcctaaaattcctataacatagtattttacagttttatgaagctttctattgtgacttttatggaattaagagatgaagaagatgagatattttagcatttatatttttcaaaattatatgtatacttaaaaataaagtaactttatgc

SEQ ID NO: 64361 - DNA, 636 bp, Homo Sapiens
ctgtctgaacaggacaagcaagacaagaaaagcatgcaaggacctctatgaaatcataccaattaatgtgaatataactacgagcacagacacacaagccacctgggacatgcagtactcccaagtaatgccagggccccattttgagcagatcaaccagcactggaagtgcagccagctctgggagcaacagcagtgcctcttctgaacagggactgttaggaaggtcaccaccaaccagaccagtccctggtcataggtctgaaagggcaatccggacccagcccaagcaactgattgtggatgacttgaagggttccttgaaagaggacctgacacagcacaagttcatttgtgaacagtgtgggaagtgcaagtgtggagaatgcactgctcccaggaccctaccatcctgtttggcctgtaaccggcagtgcctttgctctgctgagagcatggtggaatatggaacctgcatgtgcttagtcaagggcatcttctaccactgctccaatgacgacgaaggggattcctattcagataatccttgctcctgttcacaatcacactgctgctctagatacctgtgtatgggaagccatgtctgtattttactgctgtcctgatcgcggccga

SEQ ID NO: 64362 - DNA, 464 bp, Homo Sapiens
gaaagaacaagtcatacaggtctggaacaaaaagaatgcaaatgaaaaaggaagaagtcagacttctaagcttcctccaagatttgccaaaaaacaggcatacagggatccagcaagcacagtcttcagcctcagttccacctctagcttcggctccacttccaccttcaacctcagcttcagttccagcctcaacctcagctccacttccagcaaccttaactccagttccagcctcaacctcagctccggttccagcctcaactttagctccagttctggcctcaacctcagctccagttccagcctcacccttagctccagtttcagcctcagcctcagtctcagcttcagttccagcctctacttcagctgcagctataacctcttcttcagctccagcctcagccccagctccaacccccatccttgcctcagtttcaaccccagcttctgtcaccatt

SEQ ID NO: 64363 - DNA, 410 bp, Homo Sapiens
ccacgcgtccgtttgattcggaagactaagtctggacgtagacattataatgctatcaaagaagtttgatctctgttttgactaaactagaggaaaaatgattggatgtgtttattcttttctaagcagaatggtttaactttgtactctttgaaaaataatgctgatttataaatctctgcctataacagaatggaaaccttatgaatgaattgtgtttctctgtcctgagctggagaagggaatgagcaggctgacacgttgcacagccccaggtggcgccattctctcacgcaaggatggggctgcagggtgagcagcgtgggctgcagtgtgtcagtcccaggagtgagggagtggcaagcaccacagattaccacgtatgtgtggaagacattcgtactcttatc

SEQ ID NO: 64364 - DNA, 510 bp, Homo Sapiens
gtctgcactgtcactgcccaagggagtcattcgtgattacagccccagctggcatgcctgtgggcttgatccaggcccacctgggtcatccatgggctaggatcccatggatgggcacatgacccaggagctgtgccacccaaatccagaggaagcaaggaggagggaggtggggtagggaggagtgtaggatgccttgtttccttctatagaggtggtgtaagagtggggaacagggccagcaagacagaccaccagccagaaatctctgatatcaacctcatgtcccccacccctcaccccatcttgtcacatctggccctgaccccagctggaccaaaaggggcagcactggtgctcaccatacacacaggtgtctcatgtgactcacagtgctaaagactcatgcttgacagcttggtaaggtcaactctgtagacctgcagacacaaagctggttaggtttccggtgtgatactttagagtgcggattgtagacgggactccagg

SEQ ID NO: 64365 - DNA, 436 bp, Homo Sapiens
agcagcccgtggccaagtccgaggggagcccgaccgccatcctcatcggctgcctggtggccatcatcctgctcctgctgctcatcattgccctcatgctctggcggctgcactggcgcaggctcctcagcaaggctgaacggagggtgttggaagaggagctgacggttcacctctctgtccctggggacactatcctcatcaacaaccgcccaggtcctagagagccccccccgtgccaggagccccggcctcgtgggaatccgccccactccgctccctgtgtccccaatggctctgcgttgctgctctccaatccagcctaccgcctccttctggccacttacgcccgtccccctcgaggcccgggcccccccacacccgcctgggccaaacccaccaacacccagcctaaagtggggggtatatggagctg

SEQ ID NO: 64366 - DNA, 369 bp, Homo Sapiens
ttactgatatgaccataaatatttttattaaatgtgaaaatacacgggcataaaaatagtacccatatttgtagacatgtctgagacccatttcaaatattaggttccttttttattaaaacactacattgagatggattaagttacttagtcttttctcattcaaaacaaactaaaacctcacagcaagagtaatattttcacaaacatctccaatgtttacctcctccttgctcggctttccactgcaggtaagtgtttcagccacagacaagtgcaacaaaaccggttactatacacaaagccacgcagtggctaattttactcttaaatcaatcattcagcaaatgagatcatctgtaaacaaac

SEQ ID NO: 64367 - DNA, 804 bp, Homo Sapiens
actggatgcagcccgaggacagcggctgtgtcgtgggggccccgcgggagaagcgcttccactgcagagagccaacagaacgggagggctgtacagctgcgacatcaccgcccgggggccatgcacgcggatcgagtttgataacgatgctgaccccacgtcagaaagcaaggaagatcagtggatgggggtcaccgtccagagccaaggtccagggggcaaggtcgtgacatgtgctcaccgatatgaaaaaaaggcagcatgttaatacgaagcaggaatctcgagacatctttgggcggtgttattgtcctgagtcagaatctcaggattgaagacgatatggatgggggagattggagcttttgtgatgggcgattgagaggccatgagaaatttggctcttgccagcaaggtgtagcagctacttttactaaagactttcattacattgtatttggagccccgggtacttataactggaaagggattgttcgtgtagagcaaaagaataacactttttttgacatgaacatctttgaagatgggccttatgaagttggtggagagactgagcatgatgaaagtctcgttcctgttcctgctaacagttacttaggtttttctttggactcagggaaaggtattgtttctaaagatgagatcacttttctatctggtgctcccagagccaatcacagtggagccgtggttttgctgaagagagacatgaagtctgcacatctcctccctgagcaatattcaatggagagggtctggcctcttcatttggctatagtgtgg

SEQ ID NO: 64368 - DNA, 694 bp, Homo Sapiens
tctgctggtcatctagaggatcccgatcacgtgcattgtggacgcctagtgaaggaagcactccattaacaactatgcctgtcagcaccacacgtgtgaccagctctgagggtagcaccctttcaacaccttctgttgtcaccagcacacctgtggccacttctactgaagccatttcatcttctgcaactcttgacagcaccaccatgtctgtgtcaatgcccatggaaataagcacccttgggaccactattcttgtcagtaccacacctgttacgaggtttcctgagagtagcaccccttccataccatctgtttacaccagcatgtctatgaccactgcctctgaaggcagttcatctcctacaactcttgaaggcaccaccaccatgcctatgtcaactacgagtgaaagaagcactttattgacaactgtcctcatcagccctatatctgtgatgagtccttctgaggccagcacactttcaacacctcctggtgataccagcacacctttgctcacctctaccaaagccggttcattctccatacctgctgaagtcactaccatacgtatttcaattaccagtgaaagaagcactccattaacaactctccttgtcagcaccacacttccaactagctttcctggggccagcatagcttcacacctcctcttgacacaatggcacgt

SEQ ID NO: 64369 - DNA, 544 bp, Homo Sapiens
cgctggaatggagagaggcggtcgctctccagcccgatgtggacccggggaggggaggctgaggcgtttggccccggctggccaggagagggccatccccagggcagtttcaggtgccggctgggcccgtgatatgtcgaggatagtatatagcccgctcctgggtcctggagctgtggccctttgtgctcgtgttgtgtccattgtgtgtgtgcgtggggacagaggcctggaaatgcggaggactatacagagaaggcaggttttgtgaaggccaggcagggttggaggccgggggtgtgagaggagaggcccatagggctgagtggggtcgggtgaggcagaggtcagaaacagaagagctgcagttgctggagctgggctgagaactgggcttgctcctgccatccccctgtttcctccccttctccccttgtgtgcccctctctgctcagaatctgaagtagttccctcctacagcaatttcatctctagaacacgtgactcacacccttttatggcacctaactgtgtcgcatagcat

SEQ ID NO: 64370 - DNA, 323 bp, Homo Sapiens
ctcgtagcccgcacggttagcctctcagcctctcgcccagagtcccggaaggcatcgggcacctatgcagggccacccaccagtgccctgcctgcccagcggggcctggccaccttccctagccggggagccaaggccggcccagtggcagtgggtagcagcggggctggggcggacccctcctttcagcctgtcctgtccgcgcgccagaccttcccaccaggacgagcagcaagctatgggctaactccagccacttcagactgccgggcagccgagaccttccccaagttggtgccccgccctagcgtgcggtacgatgg

SEQ ID NO: 64371 - DNA, 654 bp, Homo Sapiens
aggccttcgcctctgaatgagccttttgaattttggcactcagagcaccaccgagaagatccacaacctgattcccgtcatgctgaggcaccgtctcgtccccccacccgaggaaacctactccctgcacaggaagatggggggctccttcctcatctgctccaagctgaaggcccgcttcccctgcaagccatgttcgaggaggcctacagcaactactgcaagaggcaggcccagcagtagggctgcgggccacgcccaggccggctccgcgggaactctctccctcagacaggccaaaaaccagtagcgaggtcgtggtgatgctctttttaactcctttgcccaataaggggggtggctgcctggagccccgtagccagcgctttccacggtttctgttgctaaatggttgtagggtgagaagtgcaagaatgaagatgaagccccactgctcggtcagtctgcctccgtgtgtcctctgaaataagcagatgaagatgaaagggcaactttgttttcttctttttcctgatgtgaatgttaagcagaagggagagagtccttactcccttccaatctctgttcagtgcaaaacccagaaacatgaacagatacgattgtgggattttatcatctgtgtagtaggtgtgt

SEQ ID NO: 64372 - DNA, 802 bp, Homo Sapiens
ggcggcactgcgcctcgggagggtccggtccaccgctggaacccgaggccggggctgggggcgctccgggctccgatccaggggccggccgggcctgccccgggctgggtgaggggcgcccgcctcgagctagaggaggagcggaggccgcgcgcggcccgccgagcgccttcaggatgctcatcaaggaataccacattctgctgcccatgagcctggacgagtaccaggtggcccagctctacatgatccagaaaaagagccgggaggagtctagtggtgagggcagcggcgtggagatcctggccaaccggccctacacggatgggcccgggggcagcgggcaatacacacagaaggtgtaccacgtgggctcccacatcccaggctggttccgggcactgctgcccaaggctgccctgcaggtagaagaggaatcctggaatgcctacccctacacccgaacccggtacacctgccctttcgtggagaaattctccattgaaattgagacctattacctgcctgatggggggcagcagccaaacgtcttcaacctgagcggggccgagaggagacagcgcatcctggacaccatcgacatcgtgcgggatgcagtggccccaggcgagtacaaagcagaagaggacccccggctttatcactcggtcaagacgggccgagggccactgtctgatgactgggcacggacggcggcacagacggggccccttatgtgtgcctataagctgtgcaaggttgagtaccgctactggggcatgcaagccaagatcgagcagtt

SEQ ID NO: 64373 - DNA, 511 bp, Homo Sapiens
  misc_feature (87)..(87): n is a, c, g, or t
  misc_feature (99)..(99): n is a, c, g, or t
ctcacagctgcagggaaaattgagatcaaaattgtccgcccatgtccctagctcccgggtattggggctgaggctctggggcctgtntccctgccagcntgagggcaagaccccagagccttagctgagcaagcccagaggggcagcgtggcccctccctccccttttcctgccccgtcccatgcctcagcttgctgctttgtgccagtttgcctgtttcgcttcagtgtttgattctagcacttacatgtgtcctccccaccaagccctctatctccttttaatccttcaacccctggccccctcccggtaacagtgacttttccaggttaggaagaggcagcaggagctgttggccttggtttgcacagagcgggtagggctgtagggaaagcgggtgagctgttgtgctgctgggcctccctttggccctcgcttcccaccctacgatgtatgaaatgtatgtacagaccagagatgtttatacagccgataaagatggagtttccgt

SEQ ID NO: 64374 - DNA, 424 bp, Homo Sapiens
caggccgctggctccttccccttcacctagctttactgtgtcctctcgccaaatctggggggtctcttcagcctctgtctccttgctgcccatggcctccctttgctcccgtggcgccttctagtggtccgcctggtggtggacttgtcctgtgggatggagaccctccatacatggggttcaaaggtcctggggtattcctggatcttcaggacatctgcctaccctcaggtttcccaggcctcgggtggggaggcatcagatccctggccaacctgctatccacacccagggtttagacctctcttcccgtgagggaacagagtagtagcttcatttgtggcagattatctgccttgtgataaactttagtggcctccctttctgttttgccataatctgcctcctcccccactcccatacc

SEQ ID NO: 64375 - DNA, 326 bp, Homo Sapiens
gaacatggtgctgaagctggcaaatcaaaagaacaagcttctaaggggcatcgacctaggcagtctggtggacaatgaggtggacctgaagatcgaggactttaatcagaatgtccttctgatgtcccccccagcctctgactcagggtcccaggctggcttctctccctactccattgactctgagccaggaagccctctattggatgatgcaaaggtcaaagatgagccagactctcctcctgtggcgctgggcatggtagaccgctcacggattcttctgtgtgtcctcaccttcctgtgcctctcctttaaccccctgactt

SEQ ID NO: 64376 - DNA, 667 bp, Homo Sapiens
  misc_feature (229)..(229): n is a, c, g, or t
gagacgctcaggagcccatggtgcctcgtgctgttctccccgcctttctagtcaccctgtgtacgggagtgctcacctccagctgctgtgtccatccccacatacgacctcatctctcccactctgcaccatctatcacttccagaaggtggctggcaaatctctctatccttaactttgttttgaatggtccatccatctcctgactttatttgaaacctgattattnccctgaggacattgattgtcttataaccttttaaatagaggctgcttttccaccctcacccttcattcttctaaccagccctgacattctcatgagtaaccttctgccttcacttccctcttgtgtagcatcaattccgtagtccaccctacacccctctgtctccctccaactgtcacagccccactggggagtgtgaccagacccatttccatggttaatatttaattcctcagccctgaacacatgcagctaaatgaagtcactcctttcccataaatactagatgaagcagatgcaggtgaggccgggtgatggccctcgcccttgtgagttccactgccttcctcgggcctcggccgttgtctcctgcctacttggccaagcaagcaagcacatgaatcccaccagccacagtgccagagaggggcggagcag

SEQ ID NO: 64377 - DNA, 506 bp, Homo Sapiens
tgctactcattgaagaacgggcaccatcatgtcatgcctgatgacagtagcagtggggtgtggcgctcaggcaaggatgactacatcaatgccagatgcgtgtaggggctctcaccatactgccccccgctagtggcaactcaggccccactgcctggcacagctgctgacttctggctcatggtccatgagcagaaagtgtcagtcattgtcatgctggtttctgaggctgagatggagaagcaaaaagtggcacgctacttccccaccgagaggggccagcccatggtgcacggtgccctgagcctggcattgagcagcgtccgcagcaccgaaacccatgtggagcgcgtgctgagcctgcagttccgagaccagagcctcaagcgctctcttgtgcacctgcacttccccacttggcctgagttaggcctgcccgacagccccagcaacttgctgcgcttcatccaggaggtgcacgcacattacctgcatcagcggccgct

SEQ ID NO: 64378 - DNA, 440 bp, Homo Sapiens
gggagtcagccagacccccatcctgacaaggcttgtggaactgctgactcaggatgtcggggttcaggctgggtgaccacgtgtggctggagcctccttccacccacaagaccagcgtggccatcgggggcatcatcaaagaggcaaagccaggcaaagtcttggttgaagatgacgagggcaaggaacactggatccgagcagaggactttggtgtcctcagtcccatgcaccccaactcagtccagggtgtggacgacatgatccgcctgggggacctgaacgaggcaggcatggtgcacaacctcctgatccgctaccagcagcacaagatctatacatacacaggctccatcctggtggccgtcaacccgttccaggtgctgccgctctacaccctggagcaggtacagctctacccacacacctgacgggatccc

SEQ ID NO: 64379 - DNA, 452 bp, Homo Sapiens
atcgtggtcgccatcatgggctcgggcatcttcgtgacgcccacgggcgtgctcaaggaggcaggctcgccggggctggcgctggtggtgtgggccgcgtgcggcgtcttctccatcgtgggcgcgctctgctacgcggagctgggcaccaccatctccaaatcgggcggcgactacgcctacatgctggaggtctacggctcgctgcccgccttcctcaagctctggatcgagctgctcatcatccggccttcatcgcagtacatcgtggccctggtcttcgccacctacctgctcaagccgctcttccccacctgcccggtgcccgaggaggcagccaagctcgtggcctgcctctgcgtgctgctgctcacggccgtgaactgctacagcgtgaaggccgccacccgggtccaggatgcctttgccgccgccaagctcctggccctggc

SEQ ID NO: 64380 - DNA, 521 bp, Homo Sapiens
ggtttttttctcattgattaagccacttatttttataaggtatatttaaataattcccatcttctgatatgattttaaactctaaatcatgtgttactgttacaaaactttctctctccatgtaatcacacttagttatgagcaaagcagtgagaaagttgaggtgataaacaactttgcagcattaatgtaacaaaaagtttcagtatttgtcaggaaaacaaaagcttaggctgttaaataaaagctattctattttggtaagttgaaattcaagaatgtatatataatttcttaaatgtaagagtgcattaaatcaaatacaaaaattggtttttcaatgcatcattatttattgccataacaaattgtttggtccaaaatgaaagctatattcagaaggtttgcacctcaaaattgagtaataattaatgaaatgtctgtacaaaataaagtgcaagcagtgtaaaattgaagtctgtctttgtttcaaaatgattaagattaaatgatgaaataat

SEQ ID NO: 64381 - DNA, 235 bp, Homo Sapiens
tgctgggaaggtacacaacttcatgctgggcttgaatctcaatacatcttatccactgtctcctttgagtgactttgccacacaggactcctttgatgatgatgaactggatgcagctgtagcagatcctgatgaatttgagcgaatatatgagcctctggatgtcaaaagtaaaaagattcatgtagtggacagtgggctcacatttaacgccgtatccgcggaatcctctgat

SEQ ID NO: 64382 - DNA, 582 bp, Homo Sapiens
aggggccgttccttggaagaaacccataatccctggagtgtgaaaaagggcaaaaagaaaaagctggcctggtttccttcctccctgattgattgattgataggcacttcctcttgctcagtgcaatacctaccagtgctgctaaaccagggactcgcccagacctcagcaggcccccagggcctctccgtgcaacactccgtagccatgacagcagctctctgctgcccgcccctgcccagagctggcagaagccctctgttgcctttcctccctcagagcagagaggccccaggggggccagggccgagtggatcactaggatggccacggagagccactcgctcccagaacaggcaccccttcccaaaccagcttttctgcagccaattgcctgttgcagctgtggccactgcctcccggcactgtggcagactccccccaaggagggatggggggggcgccagtgaggatgccccatcctgcctcaggtccagaactctgaaaggtagggtgcccaccccgtgcttacttccggcccctagaggttgggggtggtcgtttctctcaggggtacgagct

SEQ ID NO: 64383 - DNA, 456 bp, Homo Sapiens
ggttggtggaggttttggaaagttgtcaaggctctagcaacggagcccaggaccaagaggcttctgagcagttcggcagcccagtggctgaaagggggaaacgtctcccaggagtggccggacagtacctgtttaagtgtttgataaacgttaagaaggaggtggacgatgccttagtggagatgcactgggttgagggccagaacagggatctgatgaaccagcttttgcacctacatacgtaaccaaattttcaggcttgttgcagttaactagaaacctcctgcacagttggagacgtgttgatagtaacttgctttggagtggcctgtggggtggcaagaggaatcctaccagcggcccattagtagcacgatgtggaatatcttcgaaaacaccaacctatgaatctgtcccccacctcccccgcctccttcccgctttctgatacagtgt

SEQ ID NO: 64384 - DNA, 485 bp, Homo Sapiens
aagtcgctttgcctgatattccaaaagtgtctgaacttatgccaaagaagatgtagacttcctgcccgtacatgagctggcagggggagccccaagaagccgtcaggaaccagtctcttttagcatcctccgcagtggccagaattacgtttatccgaacgaatacataggagaattccattttctaaaagaaaaatggaattatctcagccagaagtttctgaagattttgaagaggatggcttaggtgtactaccagctttcacatcaaatttggaacgtggaggtgtggaaaagctattggatttaagttggacagagtcatgtaaaccaacagcaactgaaccactatttaagaaagtcagtccatgggaaacatctacttctagcttttttcctattttggctccggccgttggttcctatcttcccccgactgcccgcgctcacagtcctgcttccttggggacctggcctctacaagc

SEQ ID NO: 64385 - DNA, 653 bp, Homo Sapiens
gccctcatcaggtcttataaaccacagcactttgttccaagttcagagttttaaattgagagcattaaacatcaaagttataatatctaaaacaatttatttttcatcaataactgtcagaggtgatctttattttctaaatatttcaaacttgaaaacagagtaaaaaagtgatagaaaagttgccagtttggggttaaagcatttttaaagctgcatgttccttgtaatcaaagagatgtgtctgagatctaatagagtaagttacatttattttacaaagcaggataaaaatgtggctataatacacactacctcccttcactacagaaagaactaggtggtgtctactgatgggagcaagatggacaccattggcagcttttgcatgaccctgcctcccagggtcttcctgcgtttttccttaagttgccttattctttggttgtttccctacttgtttttgttagactgtgggaggaagaaatccatttcaaatctgctgaaacctgttaccaagcaacagcagtgattaaaagcaacctgatgagtgagtaaagaattagggtttcagacctgtagttaatgatggtctctgtctccctgctgccctgcattcccttcccttccgttcactgatgggagaagatgcg

SEQ ID NO: 64386 - DNA, 868 bp, Homo Sapiens
aacacccttacccacagtgatgtgattcttttcccaccggcgcctattctcacagatcgtccctgctcctcatcagttttccgtgcctaaacaatattccgtggatcacagggtcctcgttccagccggtgctactgagtcatctcttgcctggccttttgccatcagcaatcctcctccccagtgcctcctggatcaagctagagactgctggcaccccaggaatgtccctgcccatcctgccgtgtctctgttcattcttggatttaacttattactttttctgcttctgtttccaccccagctgcctctcttgtcctgagggttaggctggagtgacagtttccgcccaccccccagcccaagaaagaggctgccggaaagaaaatgctgaccattggaggtgcccaacagtagaatgggctactgtgaggggtagtaagagccccatttctggaggtatgcgaatcttgactggacagccagctctgagattttatcagggcacttctatacctgtgggacattggactggatgagccctgagccagcttccactcctacctgaatagagaactcactgcacccacccacaacacatgataaacacatgtcctcactgaatgttactgattgcggctgagggcctcctctggctgtgtggggaggtgggtggagaggtgagcccaggcactgctgaggggtgcggtgatggggtcgtgcgccgcaatcccaccactgatgagccacctgggaggtctgggaggacagtccatccatgggccgccctcggagagaggcttgttctagatgtattggctgtctgttttttgatgtctctgtgtgccaaacagcctggaaatggggt

SEQ ID NO: 64387 - DNA, 800 bp, Homo Sapiens
cagacatactctcatatttctttggtgtattttggttggtaaaacttaccagcattaaatgtaaaatataatgaggagttaattccttacctagaactatttcttccttttaagattcataagtaaccttttatttttacagagctacgtataacttccacattacagtcagggacctgaggtgtaacttactaagtgaaccccaaggttattttatcttgcaaaagaaacctaaaccaaactaagggccttacagtttatggttagactgaatcaaaagctataacctcaatttttccaaaaacagcttctgactgcaaaagcaagtcatacagttgttaggtatgaaatagcactgatcaggaaatgcatcttcgcagatggtatttccttcagaaaagacttttctacttttaatataaattaagccataacagtttcatgctgtggaaagagggtgaaaaggttcattttaagagattatataatatgaactttcacatttactgtgaaatgtctaactttgccagtgcttcagcaagtttttttggggggtgatggggaggggtagtattggttttagaggtttcaaatctgtgaactttggagaggggacagttgttggctctggtatttactagttttgtagtaacgttttgctagcctgactgacttttcttactggtttttatgcccacggtccgtggggactgttcttcttgtttggggtgtctgcggaatggcgtctcgtctacggtgaatactctttcctggtttttgacctgcggcccgtgcatccg

SEQ ID NO: 64388 - DNA, 203 bp, Homo Sapiens
ttttttatgaggctcctgagaatcaacccaactgaagcatttcaattcacttgaatgagaaacgtgtttagtatcaaaagagcccaagaagacactggtgtgaaaggtacaatctcagaggttggtcaattaccgtggcacactttctggtcactttgtacaatgtagatttgaagtacagtggtgaaaacattaaatgtgac

SEQ ID NO: 64389 - DNA, 674 bp, Homo Sapiens
gagacacgagccctttgcctgggtgtaaccatggaggtgtgtgccgtcgggacctactacatcctggtcacgactgtgctgcccctctaccagaaaagcgtgtggacccaggaatccaagtgccacctgattgagaccaacatcagggcccaggaggagctgaagggcaagaaggtgccccagtacccatgcctgtgggtcaacgtgtcatctgccggcaggtgggctgtgctgtaccacacggaggacactcgggaccagaaccagcagtgctcctacatcccaggcagcctggacaattaccagacggcccgggccgacgtggagaaggtcagagccaaattccaagagcagcaggtcttctactgcttctccgcacctcgggggggacgagaccagcgtcctattccagcgcctctacgggccccaggccctcctcttctccctcgttctggcccaccttcctgctgaccggtgcctcctcattatcgccatggtgaagacaaccagtacctgtcatcctgcgcccagaagtgaccatcatcatgcatacactgtcaggcacagggactggctggcccaggctgctccccactgcagcacaatgccttctccacctgccctcccactcttccagtccaatccacgctgtgggtgcagaatggatctgtaga

SEQ ID NO: 64390 - DNA, 866 bp, Homo Sapiens
ctactcgttaccaccaagctgctagtgatagttacctggaacttctaaaagaggctaccaagcgagatctaaatctttcggatgaagacggcatgactcctactctcttggcagcctaccatgggaacttggaagccctagagataatctgcagtagaggaggggaccctgataggtgtgacatctggggaaacactcctctacattttgcagcctccaatggccatgcccactgcgtctcattcctggtcaactttggtgccaacatctttgccctggataatgacttacagactccactggatgctgctgccagcagggagcagaatgaatgtgttgctctcctggacaaggctgccactgcacagaacatcatgaaccccaagaaggtcaccaggctgaaggagcaggctcagaagaatgccaggaggcagatcaaagagtgtgagaggctccaggagaagcaccaaaataagatggcccacacctacagcaaggaggaatccgggactctctcttcttccaagggtaccttctccagatcatccccttcaaatgcttctgctcctggcacattcgggtcactatctaagggcattaaagacactttcaagatcaagttcaagaagaacaaagatacagcagaacaggtggggaaggaaggcagaagtgggcagaggaacgtgatggaagtgttcagagaggaagaggaagactcgttctcaggggacttcaaagagaagctccagttgtcagcagaggaggacggcggtgtgcaccatgaatccattctcaatcgtccaggtctaggaagtattgtttttagaaggaacaggatatcgagtcctgaagacatctcagatagc

SEQ ID NO: 64391 - DNA, 525 bp, Homo Sapiens
  misc_feature (56)..(56): n is a, c, g, or t
ctaattgctaatgcttcacaactaggagagcatgccgtcttgatgtttaaaaaacncagggtctccacccttcctttgatttgtgcaattctgtcttccacagttccggagccttcagtgaggggtagctacatgccccatgcctgccctttctttccttctttgctcactttactatgggtgtattttaatcttgtataaaaatatgcatgaatgagtcatgcacatgtatacgttatgtatttgacaagtggtggtgaaacaaaatcaaaacagatttgatttgtgtttttgaaatgtcagtacattttgtgccactaacactgtgatgtataaaagagctgtttgaatgccttttaatgttgtgttttgtactctggaatcatatggaaaaagtttgatttgtaatttcaatacatattttaaatgtattgtgtcttacgtagtttgtcccccccttaagcagggattcctttttaaagctattttggctgaaatacaggtgacttttgtaaacccaaaaaa

SEQ ID NO: 64392 - DNA, 419 bp, Homo Sapiens
attccataccatgtaaaataccatgatatgctgattatactacattaacacatttttaagttgcgttcactaaattctgtcctgtttcttcaaaataatatagcttaaattgcatgttaattgtatatcttacctattttgtttttatattattcttacaatataatcatgtatattaacaaacagccctgggattttaatcttcctctgcaactgtcttccaggacttactggcacttattacactgtgataagtggcagaaaagtagaatgaaatattctttttccattagatttgttcttatgtgaccatgtaccaagccagctataaagtattgtatttctgtagaatatggaaaatagtatttgtcttacctttgctaaatgtttgcaatttctaagtaaaccttttatctcct

SEQ ID NO: 64393 - DNA, 858 bp, Homo Sapiens
ctgcttcgcccctctctgaatgtgttgggggctctgcacttgaaggcaggaccctcagacctcgctggtaaaggtcaaatggggtcatctgctccttttccatcccctgacataccttaacctctgaactctgacctcaggaggctctgggcactccagccctgaaggccccaggtgtacccaattggcagcctctcactactctttctggctaaaaggaatctaatcttgttgagggtagagaccctgagacagtgtgagggggtggggactgccaagccaccctaagaccttgggaggaaaactcagagagggtcttcgttgctcagtcagtcaagttcctcggagatctgcctctgcctcacctaccccagggaacttccaaggaaggagcctgagccactggggactaagtgggcagaagaaacccttggcagccctgtgcctctcgaatgttagccttggatggggctttcacagttagaagagctgaaaccaggggtgcagctgtcaggtagggtggggccggtgggagaggcccgggtcagagccctgggggtgagcctgaaggccacagagaaagaaccttgcccaaactcaggcagctggggctgaggcccaaaggcagaacagccagagggggcaggaggggaccaaaaaggaaaatgaggacgtgcagcagcattggaaggctggggccgggcaggccaggccaagccaagcagggggccacagggtgggctgtggagctctcaggaagggccctgaggaaggcacacttgctcctgttggtccctgtccttgctgcccaggcagcgtggaggggaagggtagggcagccagagaggggcggagcag

SEQ ID NO: 64394 - DNA, 754 bp, Homo Sapiens
agatgaggtccccaaagcctcaggggctcctccagcaggattgggctctgctagggagacccaggcccaggcatgccctcaggaagggacagaagcccatggagctaggctgggcccgagcattgaggataaaggttctggagacccttttggaaggcagagactcaaggctgaagagatggacactgaggacaggccagaggccagtggggtggacactgagccaaggtcaggaggcagagaggcaaacactaagaggtcaggagtcagagctggggaggctgaagagagttcagcagtttgtcaagtggatgcttagcagaggtcaaaggtgagacatgtggacactaagggaccagaggcgacaggggtgatgcctgaggcaagatgcagggggacccctgaggctcctccaaggggctctcaggggaggcttgggagtcaggaccagggatgaggctccctcaggcctgagcctgcccccagcggagcctgcagggcactctgggcaacttggtgacctcgagggggccagggctgctgcaggccaggagagagagggtgcagaagtgaggggtggagcacctggtattgaggggacaggcctggagcagggcccttctgttggagcaataagcaccaggccccaggggagcagctggcacggggccctgttatcaactgcccagggggcaatatccaggggtctgggaggctgggaggcagaagctggggatcctcgagagtctcctgc

SEQ ID NO: 64395 - DNA, 417 bp, Homo Sapiens
cttaaaagctacacctccctaaaaaacgagcggcacagaatcgtcaaggaaatccatgaacagctgaaagccttttggagggagagggaggaggagcttgaagtcagctttgagcctcccaagtggaaggctcccagggtgctgagcttctctctgaaatcccaagtcctcaacgaaagtgtcagctttgatgtgcttcctgcctttaatgcactgggtcagctgagttctggctccacacccagccccgaggtttatgcagggctcattgatctgtataaatcctcggacctcccgggaggagagttttctacctgtttcacagtcctgcagcgaaacttcattcgctcccggcccaccaaataaaggatttaattcgccttgtgcaggcatacctcgcgatcctctagagcacct

SEQ ID NO: 64396 - DNA, 427 bp, Homo Sapiens
  misc_feature (220)..(220): n is a, c, g, or t
gcacttggcctctccataagccttggagggtcagggctgataccaggggtcctggcaagccattgggcagagacagaaccacaagagcagggcatttttttacgctgggcatacatatgcacacaagcatgcacagaggcatgtcccgtgcccagcctctccaccgtcactgtccgctgctggctggaggggatgcaggggtagtgtatgcagacccttnccactgggcaaatgccatgtgtcaggagggaaaggcctaggaagcccccatggggaaggttctggatttattccctcctctaaatgctataaatacgttagcacttgagtcgactggaggctgccaggaattcaggatgcatacagctgtaatttaacccagagcagctccacgtgagagcattaaagatgtaatgaagatgtttaa

SEQ ID NO: 64397 - DNA, 255 bp, Homo Sapiens
cctcctcattgccctggtggtttcgctcatcatcctcttccagttctggcagggccacacagggatcaggtacaaggagcagagggagagctgtcccaagcacgctgttcgctgtgacggggtggtggactgcaagctgaagagtgacgagctgggctgcgtgaggtttgactgggacaagtctctgcttaaaatctactctgggtcctcccatcagtggcttcccatctgtagcagcaccagcagcaccacgaa

SEQ ID NO: 64398 - DNA, 629 bp, Homo Sapiens
ctcaacgctttatacttcctcacgcctttatattccaggtggcttccccatcatcagagaccaaattttcagatatgttcacgatccagaatgtgtagcaacaactggggatattactgtgtcagtttccacatcgtttctgccagaacttagctctgtacatccaccccactatttcttcacataccgaatcaggattggaatgtcaaaagatgcacttcctgagaaggcctgtcagttggacagtcgctattggagaataacaaatgctaagggtgacgtggaagaagttcaaggacctggagtagttggtgaatttccaatcatcagcccaggtcgggtatatgaatacacaagctgtaccacattctctacaacatcaggatacatggaaggatattataccttccattttctttactttaaagacaagatctttaatgttgccattccccgattccatatggcatgtgcaacattcagggtgtctatagcccgattgggaatgggtcctgatgaatatgaagagatggaagaagaggcggaggaggaagaggaggaagacgaggatgatgattcagacgatatggatgaatcagaatgaagttaaagcgttggctcaaagctta

SEQ ID NO: 64399 - DNA, 308 bp, Homo Sapiens
gacgatccctattacagcgttagggggagcctagcgggtatacccgcgtacaagataggcggcagaagcagctggtgggaaatacagaagcacagtcagcaaaagcaaagacccctcggggctgctcatctctgtgatcaggactctgtctacgtagtgacgatgtcgaagacagggaaaatgaaaagggtcgccttgaagaagcctacgagaaatgtgaccgtgacctggatgaattgattgtacagcactacacagaattgacgacagccattcgcacataccagagcatcacagagcagcaccac

SEQ ID NO: 64400 - DNA, 479 bp, Homo Sapiens
tggggactgtcacggaacatttttggaagcccgttattctgcccacggcaccctccgttcatcccctgccctgccgggcacctcgttctaccccaggaaaatgtgagctcgttttcctgctcggcatgtgctccccctaaggctctgctcctccctgggcctgaaagttccttctcagcctgaaagggggcccttcgatctcaggcatgactcagcccggctgatgcctctgcagtgctgagtcaggatttggggccggctctcttgggtctgtccccttttcccaggtactgccttacaaagctgtggccaggaagtggccggtataaaggatgcccaaggtctttgtacgtgtgtaggagttagcgtgtttgatattgttaatataataataattattttttagagtactgcttttgtatgtatgttgaacaggatccaggtttttatagcttgatataaaacagaattcaaaagtg

SEQ ID NO: 64401 - DNA, 370 bp, Homo Sapiens
tgtctatatgggcacaattattattaaatgaattatttctgtagttggaatctgtaccttctgaacctctacaccaataactgctgcaggtgtgattttggtctgtcacactgtacatctatcataatgtgccctgtatctattggcagtgaccttggaaaatctggccaagcctaggggtttccttttccatttgccaagttccattgtgccaggactgccgtgctccaactgatgttctctgtcacaccccattcttggccctcactgggcaggcccatgggctacaagcttgcaggggagtcaagcagtgccgcctccctttttttccattcacatactcctcttctggaagggaaccaaggggtta

SEQ ID NO: 64402 - DNA, 264 bp, Homo Sapiens
agagtgaaactctgtctcaaaaatggggttcttttcctgccatcaaaaatcatgtttcttttaaaaacaagttcacacattaccaaagtttatagcacagtaaatactttttctgtaatctcccttaaccaatatatccctcaacattctcctcacccccaactccaccctcccaggataaccagttgggacataatctttatttaaaaatggtttccggatagagaaagcgcttcggcggcggcagccccggcggcggccgct

SEQ ID NO: 64403 - DNA, 495 bp, Homo Sapiens
cgcgtgggttccttgcagatcagtgactaccccctgggaaataggaaagttcctaggccctgtgtgcttctgacagatcccactctgagtctctcatttagcccaccccctgaaagatcctgtagtcttggggaggaattaattgatggggaagggggtagcttggtttctgggacataacagggctaagccctgtcttgcccttgagtcacttctaacagctaacactgctctgcttttgtctgtctgtctgtctgtctctgtacaaagtgggagggaattcatcacagagcagctcccccagctccagcatgcccagttccccagccggctctgggcacacacggcccagctccctccacggtctggcacccaagctccaacgccagtaccgctctccacggcgcaagtcagcaggcagcatcccactgtcaccactggcccacaccccttctcccccacccccaacagcttcaccttctgcaagaacgcacc

SEQ ID NO: 64404 - DNA, 536 bp, Homo Sapiens
  misc_feature (390)..(417): n is a, c, g, or t
aggatccgttcaccgaggggtggctatgaggcacaggagcgttgttgcccagctgtgccccctaggaaggctgtccctgtcaccagcttcacctacatcaatgaggacttccggacagagtcaccccccaagcccaaagcagtgatgttgaggatgcccgagagcagcgggcacacaaatgcccacctccgcggcccaccaccaaagctcatccctgtctctggaaagctggagaagaacatggagaagatcctgatccgcccaacagcctccaagccagtgctgcccaaacctcgaggggctccgtcccctgcctagcttcatgggtcctcgggccaccgggctgtctgggagccaggtcagcctgacgcagctgtttgggggccctgnnnnnnnnnnnnnnnnnnnnnnnnnnnnttcagctgctgacaaacccctggcatttagtggctgggccagtggctgcccatcagggacgctatccgactctggccgaaactcactgtccagcctgcccaccccgtcggttggagcga

SEQ ID NO: 64405 - DNA, 786 bp, Homo Sapiens
gcgtgagctgctgtgcccggcccagcatcacttttatagctttctgtgcctcttcctctgggccttggtgtatgaagccacttgcctttctctgttgggaagcgagcagaatcagattgctactcatgatgcagtccgggcagggcatactgtcacctttgcctgtggacacagttgtcaggataggggagaagccctttaggtccgtcttcttgacacagccctcctacctggttacgctggtgctttcgcttggtttagacaaccaagacacttgagaattatgctgtcctcagaatgtctgatgaaaagaacagattcacttttttgacacaatgcccattagccatctttggcagtgtttctgatcaaaggttccccatgcctgctctaggaaagtaaacttttttcagaataaatcctcaaatggattactgagtagtctttgcaccattcccatcaggctaatcagactgaatggtcacgctcagtgcaaaaagctgttttgctgttaggatgtttcagtgtttcttgtctttcctagagcaggcatggggaacctttgatcagaaacactgccaaagatggctaatgggcattgtgtcaaaaaagtgaatctgttcttttcatcagacattctgaggacagcataattctcaagtgtcttggttgtctaaaccagcgaaagcaccagcgtaaccaggtaggagggctgtgtcaagaagacggactaaagggcttctcccctatctgacaactgtgtacacaggcaaagtgacgtatcca

SEQ ID NO: 64406 - DNA, 487 bp, Homo Sapiens
tgggtgttagacatcaactctacatttattgcagtcctttaagtctatgacggcggggcagccgctgacagcatgcagagcaagttaggaaaaaccgaggccctgtgggaacagcaacgcgggctccagccaggctctcgtcctcgcagcctcccacaagacctggggctcagggcagccgcttccccacccagcacagcagcagaggggccctagagcccccacagaaaggactgtcccagcctcgggagcaagagatggctccctccggacgggcctcatccaactccgccctggagtgtggctggaaggaagggacagagaaagaagggacagaggaaaggggctgtcccagcccaagaaggcagttccactgggaagtcagtcaggtccggcggcagcgcttcctctggcagggccgaggctcgcgactgctggggtgggcggaggtcgctgccttgggatcggacactggagccttgcggcg

SEQ ID NO: 64407 - DNA, 456 bp, Homo Sapiens
ttcacggtgaaaaaattttattttccatacaggccaacagatgttctccagacagtcaagttattagatctttcctctaatcaattaattgatgaaaatcagctgtatctgatagcccacctgcccaggtaatttgcccctaaatgcctgatacaatagtgttcagtcaattcttagtgaagcagttttcatatgctatgtatgctttctcaatagaaacgtggtaacaatgatggactttctaaattgagtaattccctttgggaaattttcatttgaattcatttagaaaatttacttgtgaaccctgtataatgtggactatgtctgtaccagataatttgaagaatgaataatttgaccctggtgataatgcggaaagtcttcattcattaaactccgggcagtagaccgtgtctctttcctctgagacgcatttagcacctgacatagcag

SEQ ID NO: 64408 - DNA, 458 bp, Homo Sapiens
gagaagctgaaggagccctggcccaacagtgacccccccttctccttcaagaacgtcatcagcctgacagaagatgtggatgagttccggaataaactgcagggagagcggatctcaggcaacctggatgctcctgagggcggcttcgatgccatcctgcagacagctgtgtgcacgagggacattggctggcgcccggacagcacccacctgctggtcttctccaccgagtcagccttccactatgaggctgatggcgccaacgtgctggctggcatcatgagccgcaacgatgaacggtgccacctggacaccacgggcacctacacccagtacaggacacaggactacccgtcggtgcccaccctggtgcgcctgctcgccaagcacaacatcatccccatctttgctgtcaccaactacttctatagctactacgagaagcttcacacctatct

SEQ ID NO: 64409 - DNA, 1160 bp, Homo Sapiens
ggattcccgggatcgaagggagcaccttctccggggctggaggctcagttccagtgtgtctttgggacgagagcgcctggccacagccacgttggacacaggccttgaagaggtggaccctaccgaggccctcccagtgctccctggcaacgcccacaccctgtggaccccagacagtacaggtggtgaccaggaggacgtgagcctggaggaggtccgagaactgctggccaccctggagggcctagacctagacggggaggactggctgcctcgggagctggaggaggaagggcctcaggagcagccagaggaggaggtgaccccagggcatgaggaggaggagcctgtggcccccagcactgtggcacccaggtggctggaggaggaggccgctctgcagctggccctccaccggtcactggagcctcaaggtcaggtggctgagcaggaggaggctgctgccctgcggcaagccctaaccctctccctgctggagcagcccccgttggaggcagaagagcccccagatggggggactgatggcaaggcccagctggtggtgcactcggcctttgagcaggatgtggaggagctggaccgggcgctcagggctgccttggaggtccacgtccaggaggagacggtggggccctggcgccgcacactgcctgcagagctgcgtgctcgcctggagcggtgccatggtgtgagtgttgccctgcgtggtgactgcaccatcctccgtggcttcggggcccaccctgcccgtgctgcccgccacttggtggcacttctggctggcccctgggatcagagtttggcctttcccttggcagcttcaggccctaccttggcggggcagacgctgaaggggccctggaacaacctggagcgtctggcagagaacaccggggagttccaggaggtggtgcgggccttctacgacaccctggacgctgcccgcagcagcatccgcgtcgttcgtgtggagcgcgtgtcgcacccgctgctgcagcagcagtatgagctgtaccgggagcgcctgctgcagcgatgcgagcggcgcccggtggagcaggtgctgtaccacggcacgacggcaccggcagtgcctgacatctgcgcccacggcttcaaccgcagcttctgcggccgct

SEQ ID NO: 64410 - DNA, 647 bp, Homo Sapiens
tgtccgaaggtgagcagctgagaagtgtggcatcaccgtgtctcaggtctccactggtttggcaacaagaggattcgctataagaaaaacatcggaaagttccaagaggaggcaaacatctatgctgtcaagaccgccgtgtcagtcacccaggggggccacagccgcaccagctccccgacacccccttcctctgcaggctctggcggctctttcaatctctcaggatctggagacatgtttctggggatgcctgggctcaacggagattcctattctgcttcccaggtggaatcactccgacactcgatggggccagggggctatggggataacctcgggggaggccagatgtacagcccacgggaaatgagggcaaatggcagctggcaagaggctgtgaccccctcttcagtgacatccccaacggagggaccagggagtgttcactctgatacctccaagcgtgatcttgcccctcagggtcacaggggtgggggctctcacaaggcgacttgaagaggacgcaggcttccagaggacaaaccccaatacaggagaagcacaagacagagaagggccaatggggtcatccctctcccttacgagactctctgtgctgggggctgcccgtcttgcgggggctg

SEQ ID NO: 64411 - DNA, 690 bp, Homo Sapiens
  misc_feature (341)..(341): n is a, c, g, or t
gctaaagaaagagcagagagggtgggtctgaccgtgggataccagattcggttagaaagtgtcaagtcctcagccaccagactgttatactgcaccacgggagtcctgctgagaaggctagaaggagatacagctctacaaggagtttcccatatcattgttgatgaagttcatgagaggacagaagaaagtgacttcttgctgctagttttgaaggacattgtatcgcagaggccaggtcttcaagttattttaatgagtgcaactctaaacgctgagcttttttcagactattttaattcctgccccgttattactataccaggtcgtacatttcctgntgatcaattttttttggaagatgcaattgctgtgacaaggtatgtattacaggatgggagcccatatatgcggtccatgaaacagatttcaaaggaaaagcttaaagcaaggcggaacagaactgcatttgaagaagtggaagaagacctaaggctctcccttcacctccaggatcaggattctgtcaaagatgcagtgccagatcaacagttagattttaagcagctcctggcccgctataaaggggttagcaagtcagtcatcaaaacaatgtccatcatggattttgaaaaggtgaatcttgaattaatagaggccttatcagaggattgtggatggaaagcactc

SEQ ID NO: 64412 - DNA, 467 bp, Homo Sapiens
tatgatgtggaaggtggtatgcaagattacaattatgtgtgggccaactgttttgagatcacattagaactgtcttgttgcaagtacccacctgcttcacagcttcgacaggaatgggagaacaatcgtgagtctttgatcacattgattgaaaaggttcacattggagtgaaaggatttgttaaagattccataacaggatctgggttagagaatgcaaccatctcagtggctggtattaatcataatatcacaacaggcagatttggtgatttctaccgattacttgttcctggaacttacaaccttacagtagttttaactgggtatatgccattgactgttactaatgtagtggtgaaagaaggaccagccacagaggtggatttttctcttaggccaactgtaacttcagtaatgcctgacacgacagaggctgtatcaactgctaccacgtgctaaaacgg

SEQ ID NO: 64413 - DNA, 433 bp, Homo Sapiens
catccacgcctgaaatgcggcgctcagtcctggtcagtaacccaggccacaaaggcctgagacccgtttatgaagagctcgactctgactccgaggacctagaccccaatcctgaagatctggacccggtttctgaagacccagagcctgatcctgaagacctcaacactgtcccggaagacgcggaccccagctatgaagatctggagcccgtctcggaggatctggaccccgacgccgaagctccgggctcggaaccccaagatcccgaccccatgtcttcgagtttcgacctcgatccagatgtgattggccccgtacccctgattctcgatcctaacagcgacaccctcagccccggcgatccataagtggaccccatctcctctggcctcactgccaccccccaggtcttggccattcaacgcctccg

SEQ ID NO: 64414 - DNA, 387 bp, Homo Sapiens
  misc_feature (312)..(328): n is a, c, g, or t
ttacaaccccacgatcacccaggcagactgtctgccccactccttcacacaagcccagctcctctgcccaaggggtgcggcgcccccttggggtttcctcccagttggagagtagagttaagacaaggcccagttttgtgttagccgaccgtctttgcccacctctatgacccagcctcttgcagtattcccatacttgatgcagggaaggaaccagaagcagaggggcctctacgcaggtacacacgtgtacctgagtgtgttcatgagggcatctggtgtttatgtgtctgagtgtagctttgtatttannnnnnnnnnnnnnnnnatgtctgattgcacgggtgtacttttgtatttatgtgtgtgtgtggttgcacgggtgtg

SEQ ID NO: 64415 - DNA, 458 bp, Homo Sapiens
cgggtgtgcctctgtgtgtctctgaccctggctgggtgtgtgtgcaaatctgtgtgactggagctctaggggcatctctgtgtctgagtgtgcctggtgtgtgtttacaaagggagagttggctgctccagctccacagccctgggaccccaactcctgtcttccctgctcctttccctgtgttcaccctcagctctgacacattgaactgcagttggggggattggcagttggccctctgtgcttctccctgcagccctacctctgccaaggtctctccctccagggacctctgcttccacccacatatgtccacttagtcacccacacttgacacagttcctggagtaccctcttcccccaaccccagacctgctttcagagcaaaactcaagtccctcttcctccgtgagcttctccctcagctgagcagtgatcgtggggtataaggaccgagt

SEQ ID NO: 64416 - DNA, 401 bp, Homo Sapiens
ttgcatctaaccaaaaagtcttggttttatcttaatccattaaaaagttgttctttgtttccagcttgcattgattgctacaacatcactaatttggctttcacatttaaatggttctgtgctaatcaaaactttcgttgttattattcattatggtagaatcatttttaattcacgtgctttgtgttcagttttgtggtctgagagatgtaccaattgtcaaattaccgtgtaccacctaatgtttataggagaaagctaaatacatcagcttggtagttaacacatcaaatatttcttgctgcttctaggagaacttttttggtgtgtgttggaatggctgagcaaatattaaaattgttaatatgcagccatatatggaaggtgatcgtgggttgtaa

SEQ ID NO: 64417 - DNA, 526 bp, Homo Sapiens
acagctgggtcagcctggaaaatccatctattagggacttttggcagccagatggcagcaatagcccattaggtctcatcccgagttccaagtcttggctgcaaatgagcctcagttcgccttactggagagcacccccagattcctgggcacagttcatttccagccctttctagatctgatcttttagggggaaagacagcttaaaatgttcttttcattttaaagaaaattattctgtctgcttaagttggaggctacttactctttcacctgacattttctttccttttattcttccagatcaggaatgaaatttccatgctgctcataaagataatattattgtactaattatttttattaccattgtaattatgatcattatgttgatattttagtcagggttttaaatgcacatttattccaagtatctttgtgttttctctttaatatttaaacttattctctctgtgagtatataagtagactggagggacatccagatgtccagttttgtcaggca

SEQ ID NO: 64418 - DNA, 589 bp, Homo Sapiens
tttttagccataaaaagattttattaccccttcaaaccacatttgccaactaaagaatttctgttgagtctcttgcaaatttttgatgcagtgattgtgcacaaacagttctatttgttttataagttttgaatattggtttttacctatgaaattcccttttattaaaataacatatgaagaaatccctttacctatcagaaacaaaacactctctggtttataaaacaccttaattctactgctcttttttctccaatcaccagcatctgtttttcagggggtgattttacttttgtgaattccttagcctttcttccttggtgcataaagttaaaatgcacatcagcagaattgctgcatattaacatctcaggactcttctcttgtaaagaagctgaaattcgtactatattggccaaagtgagcgagttaggtgatcttggtttcaatttccgagcctttgttaatatggagaattatggttcatatcagttatgtaggacctttggacccagggtcctacagatagatatggtgtgcccagattttaaaaataccttcaaaaataaaaaatacattcagtgac

SEQ ID NO: 64419 - DNA, 497 bp, Homo Sapiens
tttccctttttcttagaatatttattcttcagaggaaacatgcagttgggtataaagacctttcctccaatcagcccaacccagctccagaatgggcttttgtggggagctgaggagtttatcagtattcatcttccatcctttcagagtcacaagttttgttattttgttttttagagggggtgatggtgtaattgttaacctcatttccgtttcctacctgtttgcttccccccccagttcctcggcatgagctgttgccctccaggggcttggcacagctggccttggggacgagggagaggacttattcagggccccctcagctgtctcctccctccctctggaaaggagggtggggctcaggggcctcaagttgggatatgtgtgaggcctgccccccactcccacccttggctttagactgtaatttttaagctttaaaaaattttcccattgatgactattttaaaatcaaataaacctattttgttggt

SEQ ID NO: 64420 - DNA, 139 bp, Homo Sapiens
accaccatctttttctactctgtatggaagtagatctttatggggaaaagagaatttggggtgttctgcaagccagtcaaagtggcacagcaaatcatataaatcgaattaaatggacaacaccgttagatgtgtatgt

SEQ ID NO: 64421 - DNA, 380 bp, Homo Sapiens
cccgctggcccaatggcatcgagtccctgggtgtgaagccagacctgccgcccccacccagcaaagcccccatgaagaaggaaaaccagtggtttgatgtgggagtcattaagggcaccaatgtactggtgacacactattttcctggcaccagattattgtgtcccatcagacgatgatttgggcaccgtccctgactataaccagctgaagaagcaggagctgcagccaggcacagcctataagtttcgttcgccaggaatcaatgcctgtggccggggccccttcagcagaaatctcagcctttaagacgtgcctgcctgtttcccaggcccctgtgccattggacacggtgccattgccagcgggcgatcctctaa

SEQ ID NO: 64422 - DNA, 903 bp, Homo Sapiens
ctctgggactcgtctggcgtcctcagaggcagaagaggcctggaccttggcgcacacagacccaggaacagatgagcaggatgtctgcatccacacctggccgtgcacctactacctggagcccaagaggcgatgggttactggacagctgtccttaacatcgctgtcgctcaggttcatgactgacagcactggagagattctggtcagcttccccctctccagcatagttgagatcaagaaggaggcttcacattttatcttcagctccatcaccatcctggagaagggccatgccaagcactggttcagctccctgcggccaagtcgaaatgtggtcttcagcatcatcgagcatttctggagggagctgctgctgtctcagcctggagccatggcagacgcatttggtcccagggacccgggggcagagagacgctagacggagactcagtggcgtggatcccagaaacgcctggaggacacggcgagggtcctgcaccaccagggccagcagctggacagcgtcatgagaggcctggacaagatggagtcagacctggaggtggcggacagattgctgacagaactggaatctcctgcattggtggcccatttagctccaagcgtttggaagacaccacccggaaacaaagcaccagggagagatgtctcacatgaccaagttgtgaaccctttgggaaagaaggtatactgataaaaattcctgctgttatttcccacagaaacagagtctcacgttaaaccagggaggctcaccgtccttgtgtctgggttggaaatacatgactccagttctttgctcatgcacaggtttgaaacgagaagacgtggacgacatcaaggtccactcaccttacgaaagtagcatccgccacgcgg

SEQ ID NO: 64423 - DNA, 521 bp, Homo Sapiens
  misc_feature (131)..(131): n is a, c, g, or t
  misc_feature (391)..(391): n is a, c, g, or t
  misc_feature (410)..(410): n is a, c, g, or t
  misc_feature (499)..(499): n is a, c, g, or t
atgcgggacacgctgtagaacagctcacactggctggcactgctaagcaggtgcggaggggagtcagagacccccggatggaggggtgtggtggacctcagttttgaggccgagagtcctctggcgccccnccacagagctcctggagagactgcccagctatgactggcttcttcaagggggcagaggacagatattcttcccacctttggaggccccagggaggccccaggagcaaaggtcctggccctcgttcctggaacacaggagatgccctccccagttggactgctgagggctttaccactaccgtggcctcagtttctcgcctgcacgttgaggaggctggctggcccgcgtgagtccacaggcccttcccagaagcccccgnctctctgttcggtcccctncagagtccctgcgatgacggaggaggtggcccgggaagccctcctcagctttgtggactctaagtgctgctacagcagaagggtggctngagacctcgtcatccaggagct

SEQ ID NO: 64424 - DNA, 420 bp, Homo Sapiens
ggagcacgggaacagctttcttaaggcctcagggtcctgttttccctggcctcttctagagggcccgtggacaggtcgcagtgcgtgcttatttggaaaccaggtgtgtgagccgaatgcctgccaggccatgcactcagcagaggagcccttgtacctggctgccctgagaggagcaagaggccacctcccatgtggctctagacaccacgtgggctcattagccccagcgtctgtgccggctccaggtgcctgcctctgggtgtgtgagtgggagactttgctccctggcctcatcctagagagaggcccctggtgcctagtgctgaggcctctggggctggaaagcctcagcagaaaggaggcactactgagcaactatgcattgtcattgtcgggttggggtttcggtggttcctt

SEQ ID NO: 64425 - DNA, 626 bp, Homo Sapiens
ccggccatgtctcccacaacccctgtgctcactggacccatttccttgcacacgcgagcaccatatgccatgcctgagttccagcggttcaccttgagcggagattactgtcccgagatcactgtgggggtctgtgaccaggcacccaagatttttgaaagccttaattaatccgggagatatattgcgcgtctcgcttatctaactttccggcgaacacacatcccagtacctgggttcatccgcgggcggatactgctcctccggaagagggccttccagacttccaccctcctccactgccccaggaagacccctactgcctggatgatgcaccccccaacctggattacttggtccacatgcaggggggcatcctctttgtgtatgataacaagaagatgctggagcaccaggagccgcacagcttaccttaccccgacctggagacttacacggtggacatgagccacatcctggctctcatcaccgatggccccacgaaaccctattgtcaccggcgactgaactttctgaaatcaaaagtcagccctcatggagatcgtaaacgaaatgtccgagttcaaagagttgaagagtaacccctcaccgggacttctataacg

SEQ ID NO: 64426 - DNA, 609 bp, Homo Sapiens
  misc_feature (32)..(32): n is a, c, g, or t
cactgaggtgcagagaggctaaggggctttcnccgggattacacagccactaagccacgagctgggattccaacttgggaactggagttccgttggctcatactggagataacgcccttctgccttggttttttccttcgcctgtggtagatttatgtcccagcgagggtgagagcgacgccgaggccgagagcaaagaggagcatggccccgaggcctgcgacgcggccaagatctccaccaccacgtcggaggagccctgccgtgacaagggcagccccgcggtcaaggctcaccttttcgctgctgagcggccccgggacagcgggcggctggacaaagcgtcgcccgactcacgccatagccccgccaccatctcgtccagcactcgcggcctgggcgcggaggagcgcaggagcccggttcgcgagggcacagcgccggccaaggtggaagaggcgcgcgcgctcccgggcaaggaggccttcgcgccgcctcctctgcggcagcctccagctcggtgcaccgccaccccttcctcaatctgaacaccatgcgcccgcggctgcgctacagccccgactccatcccggtgccggtcccggacgg

SEQ ID NO: 64427 - DNA, 372 bp, Homo Sapiens
ccggaggaagttcggcttctcggccgaggactaccgcgagctggagcgcctggcgctccaggctgagccccaccgcgccggccgccagtggaagttccccggctccttctacttcgccatcaccgtcatcactaccatcgagtacggccacgccgcgccgggtacggactccggcaaggtcttctgcatgttctactcgctcctgtgcatcccgctgacgctggtcactttccagagccttggcgaacggctgaacgcggtggtgcggcgcctcctgttggcggccaagtgctgcctgggcctgcggtggacgtgcgtgtccacggagaacctggtggtggccgggctgctggcgtgtgccgccaccctggc

SEQ ID NO: 64428 - DNA, 893 bp, Homo Sapiens
tggtacggccggagtgttagatcagcggcgcgcgacgtgctttgctgtataaatgcggtggcgcccggcgtatggacacttcggtcctgagcgcttgggagttaggttgtttgccggcgtagcggccagcgcctgagcccgcccttgatcttcgctgtggcatggcggacgaggggaagtcgtacagcgaacacgatgatgaacgcgttaatttccctcaaagaaagaagaaaggccggggtcccttccggtggaaatatggtgaaggaaaccgtaggtctggaagaggcggttctggtattcggtcttcccgccttgaggaagatgatggagatgtggcaatgagtgatgcccaggatggtccccgagtacgatacaacccctataccacccgacctaaccgtcggggtgatacttggcatgatcgagatcgcattcatgttactgtgcggagagacagagctcctccagagagaggaggggctggcaccagccaggatgggacctcaaagaactggttcaagattacaattccttatggcagaaagtatgacaaggcatggctcctgagcatgattcagagcaagtgcagtgtgcccttcacccctattgagtttcactatgagaatacacgggcccagttcttcgttgaagacgccagtactgcctctgcattgaaggctgtcaactataagattttggatcgggagaaccgaaggatatctatcatcatcaactcttctgctccaccccacaactatactgaatgaacctgaagccagaacaagtagaacagctaaggctgatcatgagcaaacgatacggatggctcccaagaaggccgtgaacctcaaagggcctcagggcaggacccagattggatgcccaaaaca

SEQ ID NO: 64429 - DNA, 539 bp, Homo Sapiens
  misc_feature (522)..(522): n is a, c, g, or t
ggttcatggaagccatagagtacatcgatgccgtgaaggactgccgtgggcgcgtgctggtgcactgccaggcgggcatctcgcggtcggccaccatctgcctggcctacctgatgatgaagaaacgggtgaggctggaggaggccttcgagttcgttaagcagcgccgcagcatcatctcgcccaacttcagcttcatggggcagctgctgcagttcgagtcccaggtgctggccacgtcctgtgctgcggaggctgctagcccctcgggacccctgcgggagcggggcaagacccccgtgcacccccacctcgcagttcgtcttcagctttccggtctccgtgggcgtgcactcggcccccagcagcctgccctacctgcacagccccatcaccacctctcccagctgttagagccgccctgggggccccagaaccagagctggctcccagcaagggtaggacgggccgcatgcgggcagaaagttgggactgagcagctgggagcaggcgaccgagctncttccccatcatttctc

SEQ ID NO: 64430 - DNA, 732 bp, Homo Sapiens
  misc_feature (624)..(624): n is a, c, g, or t
  misc_feature (668)..(679): n is a, c, g, or t
catccctaccacggcacctgcaaatatgacggactatctagtcacattcattaactacacttactctcgaagatccatcgcaatacatctgtatcatattctctgcactctgccctactttaagttctatacccaattgttcttgtaggcccttcaatctattgttgctagtagaacaacgagggtcattatttggagtatctggagtccttgggcaatctgtaatatcttctggatctgatacaacaatatgtgcatttaattcctgcagcttgtgatgtagttcttctaattttttatttgattttttcaaaatgttgtctacataagccaaactttttttatctgttgtgactttcctcagattttcagctccttctttgattttcagttctttccttatttctctcttaattcgatccttgatatcatccaatttctgctgcaccattgtatctgaaaagtctaatttttgaacagcactcacattctcagaaaacggaagacttcgggaatccccctgcagttccgtgagcagaatctgcccccgttcggggttggacgccattgcgctccggtatggactccgcacctggacgcggcccctctggcgaagggagaagncgggacggggctcggggtgggggtgaggagaggggagagaaagnnnnnnnnnnnncaactagggattcatggaggcgcagcccctgctggaggcgcggcttattccgt

SEQ ID NO: 64431 - DNA, 206 bp, Homo Sapiens
gctgcggaggagccggatgctgagccgggaggcaggaagaagtcggaggagccgggcgacagctaccacgtgaatgcccggcacctcctctaccccaactgccctgtcacgcgcttccccgtgcccaacgagaaggtgccctgggagacggagttcctgatctatgacccacccttttacacggcagagaggaaggacgcggccgc

SEQ ID NO: 64432 - DNA, 309 bp, Homo Sapiens
gctatggtcacaccacagacaatgcaggaagaggctttttattgcttgtgtgtgttttcaaatcaagtaggcacaacccagtcctcataacagccctcgggagtggacgcaccggggcgggagagcgcaggagggagtgtgcttggctatcctgcccagtggaaaggaaagtgacgtgcattgatcttagagtccttggcaacagactgtggaggcaataacaggataaagaaagcagggagaacgaggcatggccagggtccccagtgcgccttcaaggagaccttaaaacagatagatagcaccacc

SEQ ID NO: 64433 - DNA, 528 bp, Homo Sapiens
gcggcccgcgggcgggtcgcctcccctcctgtagcccacacctatcttaaagcggcggcgggaagatgaggcttcgggagccgctcctgagcggcagcgccgcgatgccaggcgcgtccctacagcgggcctgccgcctgctcgtggccgtctgcgctctgcaccttggcgtcaccctcgtttactacctggctggccgcgacctgagccgcctgccccaactggtcggagtctccacaccgctgcagggcggctcgaacagtgccgccgccatcgggcagtcctccggggagctccggaccggaggggcccggccgccgcctcctctaggcgcctcctcccagccgcgcccgggtggcgactccagcccagtcgtggattctggccctggccccgctagcaacttgacctcggtcccagtgccccacaccaccgcactgtcgctgcccgcctgccctgaggagtccccgctgcttgtgggccccatgctgattgagtttaacatgcctgtggacctggagctcgtgg

SEQ ID NO: 64434 - DNA, 608 bp, Homo Sapiens
ctcaacgctttatacttctgtttcaccagcagcttgcaaaacttatccaggagtcgccaaccgttgaactgaaagacaagtggagtgtgaattggaggcattagtgggaaggatggacgcaaaagccacccaaataactaaagttcgaaaataccaagcccagctggagaaacagaagttagagaagcagaagaaggaattaaaagctaccaaaaagactcttgatgaagaaggaaacagcagcagccgttctggaatcacagggaccacaaataagaaagattttatgaaactgagacctggagaaaaaaggagaaaaaatcttcagttattgaaggacatgcaaagcatacataattcattacaaagcagtagtttgtgttgggattactgactcataaccaggtcagaaattttattcagataatctgtacctcatcaatcagatgatgacaatttacttcccaggtctcatactcacttatgttggaattaattaatagcaggtgttaaaggacccaggcttcattacacaggcttttcatgtatgcaggatgactcaatgttaaagcttttaaatggaaacccagggaagtataaagcgttga

SEQ ID NO: 64435 - DNA, 723 bp, Homo Sapiens
  misc_feature (38)..(39): n is a, c, g, or t
  misc_feature (45)..(45): n is a, c, g, or t
aaagaaaagattcatgatgctgctgctcccagaaggtnntgctgnatgtgtttacataggactctaacttgtgtgcactacagttgttcaccagggccagtgattcaccccagtgtgtggcaagaccatgactgtgtagcaggaatgttttaatttgtgcctccttagtaaattgaaatatcagctgagagattatttgctgctgttattcaaaaggccatttatgaagttagtatttgagccccataagatctttaaaaagcctccaatcatttaaaggaagaaatcagagttgctataaaattcagtaaaaagctcatagccaaacggctgtgctcagatggaaagtctgagctgaggttggtctcttgccaaaccgtggctgttgtgtgttgttcttcatgtcttcgagtttattttctttcattctgcctattctggcatcagctcacttgaggagtccctcagccttcttgtatttaaggcatcgtcttagactttgtggctctaaagtacctgtctgttgagatttcaagtctcttgtcgccatcctcacacatgacaacgaaacccataatgcataagtggcctttttgaaccagactttgcaactgatctctcccccgtgaaggagttgagcacattagcaacatgtacattaattttggattttcattttcatgttttattttgtaaatattatctgaagtataaagcgttgag

SEQ ID NO: 64436 - DNA, 1049 bp, Homo Sapiens
ctgtagggagccagcccctgggcgcggcctgcaggtaccggcaaccgcccgggtaagcgggggcaggacaaggccggagcctgtgtccgcccggcagccgcccgcagctgcagagagtcccgctgcgtctccgccgcgtgcgccctcctcgaccagcagacccgcgctgcgctccgccgctgacatgtgtgccgctcagatgccgcccctggcgcacatcttccgagggacgttcgtccactccacctggacctgccccatggaggtgctgcgggatcacctcctcggcgtgagcgacagcggcaaaatagtgtttttagaagaagcatctcaacaggaaaaactggccaaagaatggtgcttcaagccgtgtgaaataagagaactgagccaccatgagttcttcatgcctgggctggttgatacacacatccatgcctctcagtattcctttgctggaagtagcatagacctgccactcttggagtggctgaccaagtacacatttcctgcagaacacagattccagaacatcgactttgcagaagaagtatataccagagttgtccggagaccactaaagaatgggacaaccacagcttgttactttgcaccaattcacactgactcatctctgctccttgccgacattacagataaatttggacagcgggcatttgtgggcaaagtttgcatggatttgaatgcacttttccagaatacaaggagaccactgaggaatcgatcaaggaaactgagagatttgtgtcagaaatgctccaaaagaactattctagagtgaagcccatagtgacaccacgtttttccctctcctgctctgagactttgatgggtgaactaggcaacattgctaaaacccgtgatttgcacattcagagccatataagtgaaaatcgtgatgaagttgaagctgtgaaaaacttataccccagttataaaaactacacatctgtgtatgataaaaacatcttttgacaataagacgtgatgcaccggctgctactctctgcagaagtataaagcgttga

SEQ ID NO: 64437 - DNA, 531 bp, Homo Sapiens
cagattgtgggcacgctgtccaagcctgacagcccgcggcctgactttgcggtggagacgtactctgccatctctcgagaagaccttctcatgcgcctgctggagtgtgatgttattatttataacatcactgagagctcacagcaaatggaggaagccatctgggcagtctctgcactcagtgaagaagtcagccactttgaaaagcgaaagctatttattttactgtcgacggtgatgacttgggcgcgctccaaagccttggaccccgaggattctgaggttccattcactgaagaagattatcgaagaagaaagtctcatcctaattttctggaccacataaatgctgaaaaaatggttctcaaatttggaaaaaaggctgttatctacgcacattgatgtcctcagcgcatttcctggcgtggagctgagattcagtctgagagccatcagccaccaaagcctgctgggttcgctttttttctttggaatccaaaaccccatcattcaatagaatttatcttgaca

SEQ ID NO: 64438 - DNA, 556 bp, Homo Sapiens
tattatatttcatgacaatggagttctagaaagcagcatctgttttttgttgcgtgtttccattttaaagtgagttgagttctcaaattggaaagaaagattccttgagacgtacttttaaaatctaaagtgtgaaagaaacagcagagtaaaagccagactcattgcaccttcaatgtctgcatagatccagaagttgtacattttacctaacaacatcacttttgttgaacattccaactccagaatgatccccaatcaccctaatctcagaatgctggaatgatgtctgttggaaaacccaggactccacacacaaaactcctgggattttgtttcccatctctttctaggtgtttgcaatgtacaaataatacagctgtgctaatctcacatttagccatgatagatgatggttctagagtgtacttccatttgtaagtcctcctgataagtgctttcttgtttatcactatgtaaatctgaaatattttgtacgtcatttgtttttatccattctgaattttcaaagcataaaaatgtcaaagaaaaattg

SEQ ID NO: 64439 - DNA, 359 bp, Homo Sapiens
gtgcacttccagcccctggacagggtctcaggtgagggtgtgttcggacacgcacctccgtgattcggctgcgcctgtacaccggcatggacaagcgggggttcacctcaccatctgcctgcgggcctacaagacagagatgcggaacgagaccgtcgtagtggcctgcgtgtatgctgcctcgcccttccttggcttcaatacttcgctcaactgcaccacagccttcttccagggctaccctttgtctctgagcgcctggtctcgcagggccaaacctcatcatcccactacccagagacagacaactggtacctctcctgcagctcatgtgcctgagaaagctgaggaccagcatt

SEQ ID NO: 64440 - DNA, 675 bp, Homo Sapiens
  misc_feature (287)..(287): n is a, c, g, or t
gatacccagaacttctcctccgagtccaagcgggagacagaatatggtccctgccgtagagaaatggaagacacactgaatcacctgaagttcctcaatgtgctgagtcccaggggtgtacacattcccaactgtgacaagaagggattttataagaaaaagcagtgtcgcccttccaaaggcaggaagcggggcttctgctggtgtgtggataagtatgggcagcctctcccaggctacaccaccaaggggaaggaggacgtgcactgctacagcatgcagagcanagtagacgcctgccgcaagtttaatgtggagctcaaatatgccttattttgcacaaaagactgccaaggacatgaccagcagctggctacagcgtcgatttatatttctggtttgtggtgacctgattttttttaaaccaaagtttaggaagaggtttttgaaatgcctatggtttctttgaatggtaaacttgagcatcttttcactttccagtagtcagcaaagagcagtttgaattttcttgtcggcttcctatcagaatattcagagactcgagcacagcacccagacttcatgcgcccgtggaatgctcaccacatgttggtcgaagcggccgaccactgactttgtgacttaggcggctgtgttgcctatgtagagaacacg

SEQ ID NO: 64441 - DNA, 720 bp, Homo Sapiens
ggttcggttggaggtctatataaatgtttctttggtattcttcagcctgtgattgaaagttgttacgtaaagcagagctttttcctaagtgacttttcagttaggtaactgtgtgatccagttcttccagctgcttctataatgaggcacatattaatacagtttttatatggtatctatgaaagagttcacttcatagagaataatacttgagcaaatgtatccaagaaagcaagcaaatgaaaagaaacctatttatggaataaactccagatctgaaattcagtattttagaaaaatgccagctcttcttactgtatttattaaaacttgtaataatgtgatttttttcaaggatattagttcaaattgaaatggtttcacgccacacggaaatctttaagttatttgttgaggtaccatatatttagggtgctaggggcaagtaatgttaatatgtgcaataggaactactggtttgaatgtgtaaatgggtgatctctctgagtcctggcaacatccagcaaaaagtactgctgtattctccaaagaatattgggagctctcaatcctcggtgatatagggaaagagaactgagtatttgccgctatgactgagctttctataggaattttattaaagaatgtttaattttgttgtccttcttaatgttctcagtcaaataaatgagtgagctggtttcggctgctcttggaatg

SEQ ID NO: 64442 - DNA, 479 bp, Homo Sapiens
  misc_feature (54)..(66): n is a, c, g, or t
  misc_feature (442)..(442): n is a, c, g, or t
gcggccgcggtggcggcggcggcgagacttctcctagaggcgtctcggcgcaannnnnnnnnnnnngacccaggggccgacgccaggcccagccccgacacccaaggctttccttccgcagcctcgctggagcctgctgtctgcgccctgcagaagtcctgacggcggcgtaccccgggagaccccggcagccccgagaagccagccgccgccgtcattccagtcagaaaaatggcctgcggggcacgcgccggtgcgccctgccaaccacgtccggactttggactttagacaggaaggcgtcccggctcagctgtggtttggtcagagtttaacctgtcccacgcaagagaacctcgatctggtttcctcgcttacctgagtcacctgggcacttgttaggcccagctgtcttcagttccattagcggccagttacccanatgctaaatcaaatccccgtggaccttggcctggcgc

SEQ ID NO: 64443 - DNA, 472 bp, Homo Sapiens
ggcgtcttcgcgctcacgctgctgctcatcctcaccaccaccggcctcttcttcgtctttgactgtccctacctggctcgcaagctgacccttgccatccccatcatcgctgccatcctcttcttcttcgtcatgagctgcctgctgcagacaagcttcaccgaccctgggatcctgccccgggccactgtctgtgaagcagccgccctggagaaacagatcgacaacacaggcagttctacataccggccaccccctcggacccgggaggtgctgatcaacgggcagatggtgaagctgaagtactgcttcacctgcaagatgttccggccaccccgaacctcacactgcagtgtctgcgacaactgtgtggaacgatttgaccatcactgcccctgggtgggcaactgtgtgggggagacggaactatcgcttcttctacgcgtttattctctccctctcattcctgacg

SEQ ID NO: 64444 - DNA, 641 bp, Homo Sapiens
gtggacatcaacgtcggctgccccatcgacctcgtttacaagaagggtggggcttgtgccctcatgaatcgctccaccaagttccagcagatcgtccgtggcatgaaccaggtgctggatgtgccgctgactgtgaagatccgcacaggcgtccaggagcgtgtgaacctggcgcaccgcctgctgcccgagctgcgggactggggcgtggcactcgtcacgctccacggccgctctcgggagcagcgctacaccaagctagccgactggcagtacatcgaggagtgcgtgcaggccgccagccccatgcccctgttcggaaatggggacatcttgtcatttgaggatgccaaccgcgccatgcagactggtgtcaccgggatcatgattgcccgtggcgccctgctcaagccgtggctcttcacggagatcaaggagcagcggcactgggacatctcgtcgtccgagcgcctggacatcctgcgggacttcaccaactacggcctggagcactggggctcggacacgcagggcgtggagaagacccggcgctttctgctcgagtggctgtccttcctgtgccggtacgtgcccgtggggctgctggagcggctcccacagaggatcaacgagcggccgct

SEQ ID NO: 64445 - DNA, 547 bp, Homo Sapiens
tcaggatgccattattcagcaccaggtttgctatgcgtcctgcagaatccggctagaatatgagaaggagctccagctctgcaaggagtcctggcaaacccgggagccctcctgctcagagcaggcacaggcagcccgggccctgagggaggagtatgaggagcttctccgccagcagaagagcgagtacctggatgtgatcgccattgttgaaagggagaatgcagagctcaaggccaaggccgccctgctagaccatcagcagcagtgtctggaggatgcagagagccagcaccgcatgagcatgttcaccctgcggggcaggtgtgaggaggagattcggtgtgtggtggagcagctgaccaggaccgagagcacactgcaggctgagcgcagccgggtcctgagccagctggatgcctcggtcagagacaggcaggacatggagaggcatcatggtgagcagataccgaccctggaggaccggttccagctcaaggtccgggagctgcagacagatccacgaggagactgaggaccatcgttg

SEQ ID NO: 64446 - DNA, 668 bp, Homo Sapiens
attacggcgtttctactgtctacaaaatgagcccaacatgacaactcagtaaggacctgtacacttacattatgatcaggcctgtcagacatctcggaccaagatgacaggttcagcaccaccgccttctcctacacctaacatagagatgaagaacaaagcagttctttgctaacctttaacaatgacacaagctacttactgtaaacctcacatgcagaccaaatcttgtcagacagatgatacttggaggacagaatatgttccagtgcctatccctgtgcctgtgtatatcgcagttcctatgcacatgtacagtcagtatattcctgttcctactacagttcctgttcctgtgccagttcctgtttttctgcctgctccattggacagcagtgagaagattcctgcagcaattgaggagctaaaaagcaaggtttcttcagatgctcttgatacagagttgcttacaatgacggatatgatgagtgaagacgaggggaaaacagagacaaccaacatcaacagtgtaattattgaaacagatataattggttcagaccttttgaagaactctgacccagagacacagtccagcatgcctgatgtaccatatgaaccagatttggatatcgaaatagattttcccagacgctgaggaccatctt

SEQ ID NO: 64447 - DNA, 926 bp, Homo Sapiens
ctcggaggccggcgtcggctgttgcagcctgctgcgcgcccaggggtcccgcgggttttcgggcgcagggtggcgcccgcggcaggcggcggccatgaacttctccgaggtattcaagctctccagcttactctgcaagttctccccggacggcaagtacctggcttcctgtgtccagtaccggttagtggtccgggatgtgaacacccttcagatccttcagctgtacacgtgcctagaccagatccagcacatcgagtggtcggcagactcgctcttcatcctgtgcgccatgtacaagcgagggctggtgcaggtctggtctttagagcagcccgaatggcactgcaaaatagacgagggctcagccgggctggtggcctcgtgctggagcccggacgggcgccacattctcaacaccacggaattccatctgcggataaccgtctggtccttgtgcacaaaatccgtgtcttacatcaaatacccgaaagcttgtctgcagggaatcaccttcaccagggacggccgctacatggcgctggcagaacggcgcgactgcaaagattacgtgagcatcttcgtctgcagtgattggcagctcctgcggcattttgatacggacacccaggatctcacagggattgagtgggccccaaacggctgtgtgctggcagtgtgggacaccttgcttggaggtacaagattctgctgtactcattggatggccggttgttggtccacgtacaagcggcttacgagttggtccctgggcatcaaggtctgtggccttggaagccccaagcagtcaggtccctggcaattggggagcctatgatgggaagggtgcgccatccttaatcacgtgacttggaaaatgatcacggaagttgggcatcctggcagcactaattgatatccaagaa

SEQ ID NO: 64448 - DNA, 674 bp, Homo Sapiens
  misc_feature (426)..(426): n is a, c, g, or t
  misc_feature (501)..(501): n is a, c, g, or t
atgcattcaaagtggctttataaaagaagattttctttagcaagaataatgaggtcatgtcatttgttaataagtatctgtgataaatccgtggttcaaggttaagccattctggtattctggtattagcaactgtaaattctgccacctcatacatggaacagagcttgtgggatgctaatagttagtgaagtatacatgatttaatttctaataatctttatgttttctttaaggatggtggtgtattgctctttttcagctttatttttaagagtacagtcaggaaaccaacaaggggcctaagagtggctgcccctgcttgggacattacagcaagtgaaacaaagttaatgtgacaagctttgctttgttatcaattggtcttcactagaggataccttttacatgtacttctctcttggntcaaatatgtctttaactgtacatctcagtggctggaggccatgccttttaagcatgtgtaaaatttttaaaganatgaacatacacatagttattttagtaatatttcctgaaagaaaaaccaaattctgctataagtcttgatcttcaatgaacttttaaataatgcatttagctggaaaacaagactttcccagcttgtgttacctagaagcgtgaaatgtataggatacctgactactaagact

SEQ ID NO: 64449 - DNA, 586 bp, Homo Sapiens
  misc_feature (405)..(405): n is a, c, g, or t
taggtactttgaactcaagtaaacaaaagggaagattttctcgttgatactggagactgcacaacaatggggccacgaaagaaaagtgtgaaaacatgtatcatgaataatgaaattccagaagaaatgacagcagatgaaacaaaggactatatgaatcaactttcacatgaagtactttgccatatttttaggtacctccctctgcaggatatcatgtgtatggaatgtctttcccggaagctaaaggaagcagtgaccctatatctgcgagttgtgagagttgtagatctctgtgcagggcggtggtgggaatacatgccaagtggctttacagatgccagttttctaacactattaaagaagatgccagatgttgaacagctatatggccttcaccctcgntaccttgagaggcgaagagtaaggggccatgaggcttttagcattccaggagtcctagaagctttgcaggcatgcccaaacttagtgggtgtggaaacttctcatttggagttggtagatccattggacatatatgccccatgttcatattttggggaaatttcgtaatcgtaatggagct

SEQ ID NO: 64450 - DNA, 546 bp, Homo Sapiens
  misc_feature (232)..(232): n is a, c, g, or t
  misc_feature (510)..(510): n is a, c, g, or t
  misc_feature (514)..(514): n is a, c, g, or t
tgggaggagggtccgagacagcctggttgaggcgctgcttgtcgaggttgaagcaggtccacgccaagcggcccgtgcacttcgacacctctgcggttgattactcggcttcactcgtgtttcattcaccaatcatgtgcagtgaccacagatttggggatcctgaaatgatgtcttctcaaaatagcgaggagagtgagaaagagaagagcccggtgatgcaccccgatgnccctggtcaccgccttccagcagtcaggcagccagagccctgactcccgaatgtccagagaacagataaaaataagcctgtggaattgaccactttgtggaatacggcagaaccgtgtgtatgtttcgcacagagaagattcggaagctcgtagccatgggcatccctgaatctttgcgagggagactctggcttctcttctcagatgcggtgacggatcttgcctcacaccctggttactacgggaatctggtggaggagtccctggggaaatgctncctngtaaccgaggagatagaacgagacctgcaccg

SEQ ID NO: 64451 - DNA, 456 bp, Homo Sapiens
  misc_feature (240)..(289): n is a, c, g, or t
  misc_feature (436)..(436): n is a, c, g, or t
taccaaccgctgagccctttgggaggaagggaggcgttagaggactgccttcggaggctcagggagtccctttggagctggttgtttccttggccctgcagcgcactgctcggggctcccaaggaggttgtgtgtatggttcttaattcatcaggacaaagacccccagcatgtgtgtaccctgggacccgatttctctgggcccacatctatctccaatacctcagcctcagatcagannnnnnnnnnnnnnnnnnnnnnnnnnnnnnnnnnnnnnnnnnnnnnnnnngagcattccatctctctttttgaccctctcaggactgggcttagctgtccagagccctgccggagggtgctgggggctgtccctctgcaggcactgtgttttcctcaggggctgtcctcagaacacccctcctgctccctggggctnctcagggagccatttcagct

SEQ ID NO: 64452 - DNA, 548 bp, Homo Sapiens
gaactgccaaagttatttttaagtggctgtgacattttatattctaccagcagtgaatgaaatttccaatttctcatcctgggagccaaggatgaggaactgatttccagagttaccacattataatactattcaaaatgtcacatttttagcaaagattacatgacaaggaaaaaccagaaaagtatggcccatacacaggtaaaaaaagaaattaatagaaactaccccctgaagaagcacagacttcggatgtacaaaacaaagacttttcatcaactcttttagatatgctagaagagctaaaggaaaccatggacagagaacaaaaaaattaggaaagcaatgtctcatccaatacagaatatcaataaagagattgaaattgtagaaaagaaccaaatagaaattctggagttgaaaagtattataactaaaactgaaaattcactagaggtattcagcagcagactggagaagtcagaagaaagaatcaacaggcttcaagataggtcaattaagattatacagtctgaggagcagaaagg

SEQ ID NO: 64453 - DNA, 493 bp, Homo Sapiens
gcactttttataccaataatgctgagctttaagtgtaggatctggtagtacagacagtgtgatggatgatgctgctggttgtaaatttcatcgtgtgtgtctaattttttttcctgttgaatgggtaaaaacaaaacaaaactttttttagaagatgaatttgctgtcatgttttgtggaatgagggaccgttgagctcactaccacctggagtttgagttgaagcatgaaaatggtgcccatgcctgacgctccagcgcctggatctgcacgtgcccttgtagaggatccttaccgtcctagagagcagacgctttctgaaaactacttgctccaaaagaccctctgagttaacgtttcagctgtatcattagacttgtatttagagcgtgtcacttcctctgaactgttactgcctgaatggagtcctggacgacattgggtttttcctctaggagaatacaagccttaataaacaatactatttagcaaa

SEQ ID NO: 64454 - DNA, 535 bp, Homo Sapiens
  misc_feature (236)..(236): n is a, c, g, or t
cgaacgtgttatccatacgtaagtgtaatgactcattgcgtcattcaccaagaggttgagacgacagtattgtccagttcctcctaaaagaatgagactgagaagctacaagacaaaataggattataaccaaaatagatgtatgagaggtgactgagagaagaggtcattggtctcagtaagaatgccctgctttctgcatctctgtttcaggaagacccaagagggtgacttanccagactgagtatttctggggacaatacaagtacctgggcatgaatttccatttcgattcagatgggagtggagacaacccattcaattttatgaatcttactggacattatggatttactggaattattccagatattatgccctttggttgtcactaccttgtagatgtgtgagaggaaaatgtgctaatgtggcagtgactgtcaaactggcacatggggtttattaatcctgaagaaaagtacatgtactatttttcagtataaatataatgaacatgtcagaactatttcttga

SEQ ID NO: 64455 - DNA, 320 bp, Homo Sapiens
tttatgcaacaactttggaggaagggcccagggcttcttgggatcctaaggaaaaggtgccctgcgtaattggtcatgttttgatgtagaaatcccgttgcctgggttgtgggtcttctggtgagggctgccaccacctcctcctgctcacagtctgggaagccggttctgcagcatattctgccctattaaaatcagcccaggaggggcgtggggctcacagctgtgattactgtgcgttggggggccgaggtggggggatcaatggagcccaggacttttgaggccagcctgggcaacatagcaagatcccatctctc

SEQ ID NO: 64456 - DNA, 440 bp, Homo Sapiens
ccgcggctgggagacagcgagccagagtctgggtgtttgtgcgagagccacggcgggggctggggcgagtggccggcatggctgaaggctgcgctctgcaaccttgaagagccgctgcattgagaggccagggacagggagaccggtgcgatggcagagcgcggcccccgccgctgcgccgggccggcccggctggcctgagccgccggaggagcggggctgcctctgcgcgtccatggagcagcgggaagggcgaaactccggagcgccgcgtccctgcgccgctgcggcggactgctgaaggggccgagcccgcgcggaccgccgaggaagagacccccgctccagcccgcaggccggctgcccgggggcggcgggggacatcggagggcagcggagcgagcagcgccgcgggagaggccggcgcgggaggcggccgc

SEQ ID NO: 64457 - DNA, 1063 bp, Homo Sapiens
  misc_feature (654)..(654): n is a, c, g, or t
  misc_feature (889)..(889): n is a, c, g, or t
  misc_feature (930)..(930): n is a, c, g, or t
gcccggcagagcgcgttatcaaattgagaatctgatggtatggcattaatcaccttgaggaagaacctttatcgtttatctgattttcagatgcatagagctctggctgctttaaaaaataaacctctaaatcatgttcacaaggtagtcaaggagcgtctgtgcccttggttgtgttcacgacaacctgagcctttcggggtcagattccatcatgcccattgtaaaaagtttcattcgaaaaatggaaatgaccttcatccactcggtggaccagtgttctctcaagtatctgactgcgacaggcttgaacaaaatgttaaaaatgaggagagtcagatgttttacaggagactgagcaacttgacttcatcagaagaagtgctaagttttataagcacgatggaaaccctgcctgacactatggcagcaggagctttacaacggatttgtgaagtggaaaaaaaggatggtgatcaagggctgccaaaaggaatactggagaatagcatctttcaagctttatgctttcagtttgaaaaggagccctcacagctgtcaaacactagtttagtgactgcttttcaagctctgattctgttgcatgtggatcctcaaagtagcctgttgctgaacctggtggcagaatgcaanaatcgtctcagaaaaggtggcatggaagttcgcaatctttgtattcttggggaaagtctgattacactgcacagttcaggttgtgtgacactagaactcattataaatcaacttcaaggtgaaaaattggaaacatttaccccggaggatattgtggccctttatagaatcttgcaggcatgtactgaaaaagtggatgaacaccaaacatttttaaataagataaacaactttnccctatcaatagtttccaacctgagtcctaaattgattagncaaatgctcactgccctggtggttcttgatcaaagtcaagcatttcctctgattataaaattgggcaaaatatgtcgtgaggcatgtcccacatttcacttaacgaggagcttaggagagtcttttgaggcgt

SEQ ID NO: 64458 - DNA, 466 bp, Homo Sapiens
cgacaacaggaattttctccgagagcgggccgggctcagttcagctgctgtccagacccggatcggcaacagtgccgcctccagacgttctcctgccgctcgcccgcccgtcccagcgcccccagccctcccgcgagggcgccccgggacggaaggatccaccagtctgtcggcgcccgccgttctcgtggtcgccgtcgccgtcgtcgtggtggtagtctccgccgtcgcctgggccatggccaattacatccacgtccctcccggctccccggaggtgcccaagctgaacgtcaccgttcaggatcaggaggagcatcgctgccgggagggggccctgagcctcctgcaacacctgcggcctcactgggacccccaggaggtgaccctgcagctcttcacagatggaatcacaaataaacttattggctgttacgtgggaaacaacatggaggatgtagtctgg

SEQ ID NO: 64459 - DNA, 588 bp, Homo Sapiens
cagatttaactctatgacagctacagtaggaaagccacagaatataaatgatacttccttaaatggaaatcaggttactgtgaacctttcaccagtacctgcccttcagtcaaaaatgactcttgatcaacagcacattgaaacacctggtcaaaatatacccactaaagtaacttcagcagtggttggaccaagtcatgaagtccaggagccaagttctggcccattcaagaaacagtctgctaccaatcttgaatctgaagaagacagtgaagctcctgttgatagtacattaaataataacagaaaccaagagtttgtttctagtagtagaagtataagtggagagagtgctacatcagagagtgaatttactttagggggtgacgacagtggtgtgtcaatgaacccagctaggagtgcacttgcactgttggccatggcccaatctggggatgcagtcagtgtcaagattgaaggaagaaaacccagatttaatgcattttaaccttcaaaagaaaagagctaaaggaaaagggcaagttaaagaggaagacacagtaatcagaaacagctgagaccatcgtt

SEQ ID NO: 64460 - DNA, 476 bp, Homo Sapiens
  misc_feature (439)..(439): n is a, c, g, or t
gctggctgccgcgcggccgagtgtgttttatggaccatgtgctgctatgtatgcctgaagaagtacttgaaatgcaaatttggggagactttgccatataaatgcttggctggattaagcgcctaattaggatggtttttcaacaagttggagtaagcatgcaatcggtactttggtctaggaagccatatggttcgtctcgaagtatcgtaaggaaaattggtactaatttgtctctgattcagtgtccaagagttcagtttcagattaacagccatgcaacagaatggagtcccagccacccaggagaggatgcagtggcgtcttttgctgatgttggatgggtagccaaagaagaaggagagtgttcagcaagactaaggacagaggtcagatcaaggccaccccttcaggatgaccttcttttctttgagaaggncccaagcagacagatttccttaccagacttgtctcaa

SEQ ID NO: 64461 - DNA, 483 bp, Homo Sapiens
aacgatggtcctcagctactggcaagatactgaagaagaatcatactgacctggttctgctacataccagctgagttactttggtcaagctcttggacttctgagcctgtttcctaatttcagaagtggtgatatgatgtgttaggccctggtgggttgcaaggaagaggcatacacacaccacctttggtggtgaaggctgaatgttaactttgatggaaagtcatcccagcagccatattgtctctggccctagtactttccaaaccccacagaacattaatttagcagtatttaggataggatttgagctctgaagacctatagtgtggttatttgttcatatggctgttttccatactagaccatgagctcatgagggccgggtctacagtctcatctttctatccctaggcattcagttcagtgcctgatacatagtaatagaggcaccaatgtttccaaagctgaggaccatcgttg

SEQ ID NO: 64462 - DNA, 579 bp, Homo Sapiens
gcggccgcatcctgcaggagcaggcccgcctcgtgtgggtggagtgcggcagcagcagaggctgccccagcagcagtgaggcctgaggctcatctgatacctgcaccttctccccaagccagcgtggaccctggtgtctatggtgaagctgggccctcccaccctgagccttcctagacccttggactctcagatgcagggcccttggctctggcctctcacccccaaggctgtctctggccctgccgagcctatgggagtcccgggacagagtgcccactcccctctacttgctgctctgggcctccccacctttcctggggtctccacattcccactagtgggtcttatgtgtgtctgtgtcttctccttaaacactcgccctggagtctgttctcacacctgtgcgcaggtttgcacactcaagttctcatgggcaggctcaggtctgtcccgctgccctgtgcacgaggtctcctgaggacctgggcctgttctgctcctaggagacctgagcccgttaccgcgtgactcccaccatccagctcgcgctcctcgtggattcagccatgcatggac

SEQ ID NO: 64463 - DNA, 361 bp, Homo Sapiens
ctgtggggctttttttaatataagaaatgtttatttttgtccttatatttaaacatgatggaatttgtaaatcttggcattgattgtaattctgcctttttggaagaattttttctcccagcatgttagctgagaatattctctattttataaataatatgaagtaggttggtctctctgcttctctataccaggacttcttagctcagtatcatctcccttcatgtaagcagcacgttttaactcttaggaagctgaatgttgtgttatcactaatactttgtacaggtcacctgcctactctaattgtccttagtacttggacaggctttatcattaaagagtgttctcctaatcccag

SEQ ID NO: 64464 - DNA, 439 bp, Homo Sapiens
  misc_feature (331)..(374): n is a, c, g, or t
actttttgaagacaacaatatgcacaggttttcgcccaacagcagaaagcagcactgtcttcccagcagcagcaggtgttggcacttcttcttcaacagtttcagaccttgaagatgagaatatctgatcagaacatcattccctcagtaactaggtctgtgtccgtgccagatactggctctatctgggagcttcagcccaaacagcttcacagccctacagtttgggaaggtggtagtgtatgggatcttcctctggacaccacgacaccaggccctgccctggaacatgcttcagcatagctagagaaggccaaagctgcaaagctannnnnnnnnnnnnnnnnnnnnnnnnnnnnnnnnnnnnnnnnnnnggaagagcgaaagaggcaggaagaactccgaagacaacaggaggaaattcttcggcgacagcagg

SEQ ID NO: 64465 - DNA, 586 bp, Homo Sapiens
  misc_feature (15)..(15): n is a, c, g, or t
  misc_feature (37)..(37): n is a, c, g, or t
aacgatggtcctcangcttcggggaaggatctcattntgcccaacggtggtactccagcaggtacttcaagtccagcttcttcatcttcccttctcaacagacttcagcttgatgatgatattgatggtgagactagagatctcttcgttatagtcgatgatcccaagaagcatgtgtgtacaatggagacttacatcacctataggatcaccaccaaaagtactcgggtggagtttgacctcccagaatattctgttcgtcgaagataccaggattttgactggttgaggagcaaactggaagaatcccagcccactcatctcatttcccctcttcccgagaagtttgtggtaaaaggtgttgtggatcgtttttcagaagagtttgtggagaccagaagaaaagctttggataaatttctaaaaagaattacggaccatcctgtgctgtctttcaatgaacactttaatattttccttactggtaaggacctgaacgcctacaagaagcaagggatagcattggtgaccagaatgggcgagtcagtcaagcacgtcactggcggctacaagctgaggaccatcg

SEQ ID NO: 64466 - DNA, 745 bp, Homo Sapiens
  misc_feature (648)..(648): n is a, c, g, or t
ctgcttctcctcctcgcgtggtgactatatgtcctcagggctgcctgtgcccaccctgatgggagacctctgtttgcttctggtccactgcagttggcctcctcaatacaagctgatgtctgcagggagcgccgcgtgctgggattgcaccacgtgttggtcacattatcgaggtcgccttttggcctggtctgctcaggctggccctgacccacgtggtttcctggcttctgagacgcagcgcattcttcctgttagcggtagcgttctctgatttcactgcttcattgccaagggcgtggaaagggggtggtggatggacgccgggaggtggcgagcacaggaccccggggctgcattctgccgtgtggggttctgcactgtctagcttctgcggggactgcaaagagggatgaagggacgtggtcctaggggtcggctcagactcggagcagggcagggaggggagggcaaggagaggaggcctgggtcctggatccactgctctgggctcataaccatgagattttgaaagagtttttggtcatctgagcaggtaccatgcctggctcatgccggaacttgtcttggaaccggtagccagaggcccaggaagggacagggcccaaaagggttgcatgtcccggncacaaagccctccctgttgtgccctgagccagcccagcaagggcctcccaggcaggcgctttcgcagaaagcagagcacagggcagggggaacgggg

SEQ ID NO: 64467 - DNA, 578 bp, Homo Sapiens
  misc_feature (321)..(321): n is a, c, g, or t
ttttcatcttttttggttttcttggcatgactaagaagcttaaatgttgataaaatatgactagttttgaatttacaccaagaacttctcaataaaagaaaatcatgaatgctccacaatttcaacataccacaagagaagttaatttcttaacattgtgttctatgattatttgtaagaccttcaccaagttctgatatcttttaaagacatagttcaaaattgcttttgaaaatctgtattcttgaaaatatccttgttgtgtattaggtttttaaataccagctaaagggttacctcactgagtcatccagtaccctncctattcagcttccccaagatgatgtggtttttgcttaccctaagagaggttttcttcttatttttagataattcaagtgcttagataaattatgttttctttaagtgtttatggtaaactcttttaaagaaaatttaatatgttatagctgaatctttttggtaactttaaatctttatcatagactctgtacatatgttcaaattagctgcttgcctgatgtgtgtatcatcggtgggatgacagaacaaacata

SEQ ID NO: 64468 - DNA, 627 bp, Homo Sapiens
  misc_feature (26)..(26): n is a, c, g, or t
  misc_feature (40)..(40): n is a, c, g, or t
  misc_feature (316)..(353): n is a, c, g, or t
gatggtgcaacagctgcagccggaanagaggtgataaggnacaagatccgagcaataggcaaaatggccagagtgttctcagtgctcagagaagagagtgagagtgtgctgacgctgaaaggcttgaccccaactggcatgatggggattgctgcgtatcagcagttggatgttcttgcctctgacagtagcttatttgctctgggggccaggaattggattcagtttacactatcattaaaaaagagggagagagataataaactatattttggtggggatggtgattaaacacctcttttgggtatgccttttnnnnnnnnnnnnnnnnnnnnnnnnnnnnnnnnnnnnnnctaatgctagtatatactgcaatgttaggggaatgaacatgttttcctactgcattggggacttctagataggttaatgaaaggccttttattatgttactggacatgaaaactttgtctaatttcttactctattgtacgtttacagtcgcagcactaaaaatggatgacatcaaacatttttaacaaaatgatgtacaaactaaggactatttattgataatgttttgctactcttgtcagacaatggctataaactgaattagaaagtatt

SEQ ID NO: 64469 - DNA, 572 bp, Homo Sapiens
aacactgagggcagctaccagtgcctgtgcccacccggctaccgtctgctccccagcgggaagaactgccaggacatcaacgagtgcgaggaggagagcatcgagtgtggacccggccagatgtgcttcaacaccccgtggcagctaccagtgtgtggacacaccttgtcctgccacctaccggcagggccccagccctgggacgtgcttccggcgctgctcgcaggattgcggcacgggcggcccctctacgctgcagtaccggctgctgccgctgcccctgggcgtgcgcgcccaccacgacgtggcccgcctcaccgccttctccgaggtcggcgtccccgccaaccgcaccgagctcagcatgctggagcccgacccccgcagccccttcgcgctgcgtccgctgcgcgcgggccttggcgcggtctacacccgtcgcgcgctcacccgcgccggcctctaccggctcaccgtgcgtgctgcggcaccgcgccaccaaagcgtcttcgtcttgctcatcgccgtgtccccctacccctactaaacgggagagggcattggcggccgct

SEQ ID NO: 64470 - DNA, 493 bp, Homo Sapiens
acgagcattaacgcgaggccgaggacatggagatggaagcgggagatacatgatgagccaccaagaattactcagaaccctgtgatcaatgggaatgtggccctgagtgatggacacaacaccgcggaggaggacatggaggatgacaccagttggcgctccgaggcagcctttcagttcactgtggagcgcttcagcagactgagtgagtcggtccttagccctccgtgttttgtgcgaaatctgccatggaagattatggtgatgccacgcttttatccagacagaccacaccaaaaaagcgtagggattctttctccagtgcaatgctgaatctgattccacgtcatggtcttgcgaatgcacaagcagtgctgaagataataacttacagagatgatgaaaagtcgttcagtcgtcgtattagtcatttgttcttccataaagaaaatgattggggatttccaatattatgggcatggagtaaatggca

SEQ ID NO: 64471 - DNA, 1012 bp, Homo Sapiens
tggaccggtccggaattcccgggatccccacccgcctgccgtcctggggcgccgccgccccgccgccggcagtggaccgctgtgcgcgaaccctgaaccctacggtcccgacccgcgggcgaggccgggtacctgggctgggatccggagcaagcgggcgagggcagcgccctaagcaggcccggagcgatggcagccttgatgaccccgggaaccggggccccacccgcgcctggtgacttctccggggaagggagccagggacttcccgacccttcgccagagcccaagcagctcccggagctgatccgcatgaagcgagacggaggccgcctgagcgaagcggacatcaggggcttcgtggccgctgtggtgaatgggagcgcgcagggcgcacagatcggggccatgctgatggccatccgacttcggggcatggatctggaggagacctcggtgctgacccaggccctggctcagtcgggacagcagctggagtggccagaggcctggcgccagcagcttgtggacaagcattccacagggggtgtgggtgacaaggtcagcctggtcctcgcacctgccctggcggcatgtggctgcaaggtgccaatgatcagcggacgtggtctggggcacacaggaggcaccttggataagctggagtctattcctggattcaatgtcatccagagcccagagcagatgcaagtgctgctggaccaggcgggctgctgtatcgtgggtcagagtgagcagctggttcctgcggacggaattctatatgcagccagagattgtgacagccaccgtggacagcctgccactcatcacagcctccattctcagtaagaaactcgtggaggggctgtccgctctggtggtggacgttaagtccggaggggccgccgttttccccaacaggagcaggccggagctggcaaggaccctggttgggcgtggaaccagcctaggctcgcggtcgcgggaccttgaccgcatggcaagcccg

SEQ ID NO: 64472 - DNA, 289 bp, Homo Sapiens
ttacaaccccacgatcaccctgtatcccagcatcttgacatttccgtggcaaccaaagacgggcgcctatcagtacacaataagggcccacggtggcagtgggaacttcagctggtcttcgtcaagccacctggttgccacagttactgtcaagggcgtgatgaccacaggcagtgacatcgggttcagtgtgatccgggcacatgatgtgcagaacccactccatttcggtgagatgaaggtgtatgtgatcgtggggttgtaagtgatcgtgggagtaaggtccgag

SEQ ID NO: 64473 - DNA, 715 bp, Homo Sapiens
gcactgtgcctcacaggcgacggcttggcccacctgcaggccaccgacccccagcagctgctccgcctcatcccccatgtgcaggtgttcgcccgtgtggctcccaagcagaaggagtttgtcatcaccagcctgaaggagctgggctacgtgaccctcatgtgtggggatggcaccaacgacgtgggcgccctgaagcatgctgacgtgggtgtggcgctcttggccaatgcccctgagcgggttgtcgagcggcgacggcggccccgggccagcccaaccctgagcaacagtggcatcagagccacctccaggacagccaagcagcggtcggggctccctccctccgaggagcagccaacctcccagagggaccgcctgagccaggtgctgcgagacctcgaggacgagagtacgcccattgtgaaactgggggatgccagcatcgcagcacccttcacctccaagctctcatccatccagtgcatctgccacgtgatcaagcagggccgctgcacgctggtgaccacgctacagatgttcaagatcctggcgctcaatgccctcatcctggcctacagccagagcgtcctctacctggagggagtcaagttcagtgacttccaggccaccctacaggggctgctgctggccggctgcttcctcttcatctcccgttccaagcccctcagaccctctccccgagacgcccgcc

SEQ ID NO: 64474 - DNA, 633 bp, Homo Sapiens
  misc_feature (326)..(373): n is a, c, g, or t
  misc_feature (498)..(543): n is a, c, g, or t
acccctttttcttcctcgggtcagccagatagtctggatctatggtgtgactcaagctcctccttacccagggggggtaaggccaggcctctagctacttggagttgtctgtaataatcttgaaaggcccaagggcctgtccccatcctgacttaaaggcatctgcttccctgtttcatatcacatgacagagaaacctgttctcatggcatgtaacatcccctgtgaagagagcgttgtatatgattttgtattttttaattcattttaatctacaggttggaatctaatttttaaattttattggaactcacattttaaaagannnnnnnnnnnnnnnnnnnnnnnnnnnnnnnnnnnnnnnnnnnnnnnncctttgaccagtgtcttccaagtagtttgatcagagaatttataggtgttttcaaaacacagtccggagtgtaaagattggaaagccccatggccttgcctgtgtgtatgaagtgtaaatctggnnnnnnnnnnnnnnnnnnnnnnnnnnnnnnnnnnnnnnnnnnnnnnaagatcagacagtgatcactctgaaagattgaagccaagaatttgtaactatggtatttactgtaagctgtagaacactcaataactatt

SEQ ID NO: 64475 - DNA, 506 bp, Homo Sapiens
atactatttaattatttcactttagaaagctgagtgtttcacaccttatctatgtagaatatatttccttattcagaatttctaaaagtttaagttctatgagggctaatatcttatcttcctataattttagacattctttatctttttagtatggcaaactgccatcatttacttttaaactttgattttatatgctatttattaagtattttattaggagtaccataattctggtagctaaatatatattttagatagatgaagaagctagaaaacaggcaaattcctgactgctagtttatatagaaatgtattcttttagtttttaaagtaaaggcaaacttaacaatgacttgtactctgaaagttttggaaacgtattcaaacaatttgaatataaatttatcatttagttataaaaatatatagcgacatcctcgaggccctagcatttctccttggataggggaccagagagagcttggaatgttaaaaacaaaaca

SEQ ID NO: 64476 - DNA, 847 bp, Homo Sapiens
  misc_feature (581)..(592): n is a, c, g, or t
gtgcaggaatactccaagtttctgcagcaggcttggacagaactagccaaaatgatgcctatttgaatagcccgagccttaactttgtgactgataaccagaccctcccaaatcagccagcattctcttccatagacaagcaggtctatgccaccatgcccatcaatagctttcgatcaggaatgaattctccactaagaacaactccagataagtcccactttggactaatagttggtgattcacagcactcatttcccttttcaggtgatgagacaaaccatgcttctgccacatcaacacaggactttctggatcaagtgacttctcagaagaaagctgaggcccagcctgtccaccaagcttaccaaatgagctcctttgaatcagcctttccgtgctccctatcatgtatcaagagctggaatagctactcaatttagcactgccaatggacaggtgaaccttcggggaccagggacaagtgctgaattttcagaatttcccttggtgaatgtaaatgataatagagctgggatgacatcttcacctgatgccacaactggccagacttttggctnnnnnnnnnnnngtgtaaataatactggcactttagaacagattaatcaagagtggggttactctgtgtaaatggagtgctgtacagatttaagagcaatgcgtaataacaagttaagctgatatgaatagcaagataatccaataactgcatttcgtttggttagtcagcattctttgaactgccttacatgttgtcacctttatagaagcaatgcattacttgttttagatcagaaacttgctattccacccacaccaagttaaa

SEQ ID NO: 64477 - DNA, 646 bp, Homo Sapiens
  misc_feature (459)..(517): n is a, c, g, or t
gtgtctcccacaaatcgaaaaaaatgaaacctctctatgtgaacacagagacactgacccttcgggagcctgatggtttaaaaatgaaacttattctgtcaccaaaggagaagggaagcagctctgttgatgaggagtcttttcaatatccctcccaacaagcgactgtgaaacaatcctcaaagaaatcagctcgggatgcgcagggtgctttactcctaggacatgagttacagagctttctgaatacagcccggaaaaagcacaagtcatcctcagacgcacattcatctcctggccctgaaggctgtgggtctgacgcctcccagttcgcagagtcccacagtgctaaccttgatctttcagggcttgaacctattctggtagaatcagactcatcctctggtggggaactagaggctggggagttagtgatagatgattcttaccgagaaatcnnnnnnnnnnnnnnnnnnnnnnnnnnnnnnnnnnnnnnnnnnnnnnnnnnnnnnnnnnngaagcgacactccaagtccaagagaagtttaggactttctgccgtgccagtgggagaggtcacagtgacatctggccctcctcccagcatcccatacgctggagcagcagcacctcccctgccacttcc

SEQ ID NO: 64478 - DNA, 984 bp, Homo Sapiens
  misc_feature (508)..(520): n is a, c, g, or t
ttactggtatacccacccaaccactattcagaatgagaatctaaaaagcatgacacataagcgaagccaacgttcaagttacacaaggctctccaaagatcctccggagctccatgcagcagcctcttctgagagcacaggctttggagaagaaagagaaagcattctttgagaaaaacaagcaaaggagaagagtgttactgtacccttatgacagaattgtcctggattttgactccatccacgcccatcacctttctacattttgctgacagataactaaccgatgatgaggccgaggtaaaagagacatctgcagtgtgacagaagggagcatgagaagcatggctcaccagccagcctctgtggtctttgtaattagaagcttcagaactcactaatactactgtacctttcattggcgcattaccccataaaactttttgagacgaggtgagatctgagtataaagataggtcagaagtattttaaagggcttaatgtgccnnnnnnnnnnnnngctagagaccctttttgcaaacatttggtgaccacacatttgagggaagacgtggcgttaggtgaagcagaagcaaaccctgctcttaggggctcacctaggtgagtgcacagcctgtgacgctacagggagaggctgagtaaaccgagatccagcgttctgtatggcaggggtattgcttatcacagaggttctgaagagtaggaagtacataatgaagagggctttaaaaattgccaacaaagtgagtcaccagggctggcagtagtgtgacggggctgtcctgagctgttaggagagtagatgcggggagggctggtgacctccgtgggtttatatgtcggaaactcttctctccaaatcccaggcctggcttccagcaccatccagctgtgcccaagaagccaccctggtctgttctccaactcttttaaatggtgcccaacttttctaagtgagcttag

SEQ ID NO: 64479 - DNA, 386 bp, Homo Sapiens
ggtgaatgctggatgcacttggagatagcaggtgaggtccgggatatccttgaggtcctggatggtcggcggcccacagggtggcgactggaggtaatggtccggattcgggagccactgacagcccagcagttggagacgacgacagagaggtggctggtcattgaccctgtgccggcagctgtgcccacacaggttgctgggcccaaagggaaggcgcctcctgtgcctgcccctgcaagggagtcagggaacagatcagcccgggccctgcatagcctcagtgtgctggcgtttgaccaagagcgtctggagcggaagatcctggccctcaggcaggcgcggcggccggtgcccccagaagtgcgcctgggtgggggatcctc

SEQ ID NO: 64480 - DNA, 1738 bp, Homo Sapiens
ctggcccgcattaaggcgcacttctcaaggagcccacgccattatcgcctcggacatctcgctgcccatcgccatccaggagctgcggcaaaggctgaggcagctggaaaacgggacgaccctgggacagtctccactggggcagatccagctgaccatccggcacagctcgcagagaaacaagcttatcgtggtcgtgcatgcctgcagaaacctcattgccttctctgaagacggctctgacccctatgtccgcatgtatttattaccagacaagaggcggtcaggaaggaggaaaacacacgtgtcaaagaaaacattaaatccagtgtttgatcaaagctttgatttcagtgtttcgttaccagaagtccagaggagaacgcttgacgttgccgtgaagaacagcggcggcttcctgtccaaagacaaagggctccttggcaaagtattggttgctctggcatctgaagaacttgccaaaggctggacccagtggtatgacctcacggaagatgggacgaggcctcaggcgatgacatagcgcgcagcaggcaggaggcgtcctcttcagcgtagctctccacctctacccggaacacaccctctcacagacgtaccaatgttatttttataatttcatggatttagttatacataccttaatagttttataaaattgttgacatttcaggcaaatttggccaatattatcattgaattttctgtgttggatttcctctaggatttcgccagttcctacaacgtgcagtagggcggcggtagctcttgtgtctgtggactctgctcagctgtgtccgtaggagtcggatgtgtctgtgctttattatggccttgtttatatatcactgaggtatactatgccatgtaaatagactattttttataatctttacatgctggtttaaattcagaaggaaatagatcaaggaaatatatatattttcttctaaaacttattaaattcgtgtgacaaataatcattttcatcttggcagcaaaaagttctcagtgacctattttgtggtgtttctttttgaaaagaaaagctgaaatattattaaatgctagtatgtttctgcccattatgaaagatgaaataaagtattcaaaatattaacattttcataaatataaggatgtattattgagaagtaagttgaagggcttataaggaaaaatgttttataactgagtaatatattaagagaattgtcatggttcataaatcccattatgctaatctgaaatttcttacataaaaatgaagtgtcttatgtttattttaattgctgttgtaacttactcatgaaacagtatacagacacctgatacttttcctcaactgtaagagcagactttcaatgttagcaattaagctgttgtctaacaatcagtcatgagctttgttaattttcaatgttttcccagcctataaaaaaaggaaggtacacgttgtccttttaaaggttgtgaggtagattggagtgagtagacaggatattgcattaaaaattgaaagctcgatctcattattgtcaggaacccccagtgtgtacctcacacataggatgtgggacctttgagccgatgtgcactggccaccaccagggttgggggcgccacagctgcgagcccggcccctgctgttctcagcagccacttcccaggctgcctcactttatgccatgactgaccttaatattgggatattgtt

SEQ ID NO: 64481 - DNA, 583 bp, Homo Sapiens
tcaacacagcagcatactcctgtgtcttttcctcataagtaagaacaaggtagcacattcattttccattagtgcattcagattcttttcctgcaagttgcattgctagttgcttttctgaattgcttgatgatgaactgtgaagctgatgcttagctgcttgtgaaacttttcttaaaggaactgggtctaagaagcacacatacattaccctcaacaacctcaggtatcaagaagaggaccacactgctaacatgggtaatcctataacctggcttttcttgtggaactttgtaatttctataaaataccgccagctttgcgtattccactgagccccaacttagatatcagacgctagtgagtcctgcctattcaggaagctacgtattattcagcataatactgcccttttttttgataactggctttcaaatgggataatctcaagagaggtttcattgtatcctcttagagcgtatggatttaaatagagcctttcaaaaaaatagatgaaaacctacatctctaatatatttcctacttgggccttttgagcatattctgggcacacattatggag

SEQ ID NO: 64482 - DNA, 677 bp, Homo Sapiens
  misc_feature (19)..(19): n is a, c, g, or t
  misc_feature (268)..(303): n is a, c, g, or t
cgattcgcgcgcgcgaggncgtctcgctcccagcccggcgctgacccagtgccatcgcgcacagccctatctctcagcctcgccgcgatgaggcctgagccgcttgcgcgtgcccgagcttagactcgaaacggccggccgaggccttgggtgcccgcctccctgaggcgaagggtagcgggtgcatggcgcagtaacggcccctatctctctccccgctcccacagcctcagggctgagcgtccggccgctacccactcctgctcgnnnnnnnnnnnnnnnnnnnnnnnnnnnnnnnnnnnnatggccaatgacaagcggcgtgcccggcgggccgagcccgagcgagcgagaccggcagtactgcgagctgtgcgggaagatggagaactctggtgcgctgcagccggtgccgcagctccttctactgctgcaaggagcaccagcgtcaggactggaagaagcacaagctcgtgtgccagggcagcgagggcgccctcggccacggagtgggcccacaccagcattccggccccgcgccgccggctgcagtgccgccgcccagggccggggcccgggagcccaggaaggcagcggcgcgccgggacaacgcctccggggacgcggccaagggaaaagtaaaggccaagcccccggccgacccagcggcggccgct

SEQ ID NO: 64483 - DNA, 660 bp, Homo Sapiens
  misc_feature (38)..(38): n is a, c, g, or t
  misc_feature (96)..(97): n is a, c, g, or t
  misc_feature (197)..(197): n is a, c, g, or t
  misc_feature (204)..(204): n is a, c, g, or t
caagttctaccacccgccaattggcctttttactcatnacgtagataatcttcaaaaccagctcaaactctacgagccaatttctatatcactggnnacagagaatatatggataaagatgggtatttctggttgttgcaagagcagatgatgtcatattatcctctggctatcgaattggaccatttgaggtaganaatgccntgaatgaacacccttcagttgcagagtcagctgttgtcagcagcccagaccccatcagaggagaggtagtaaaggcttttgtcgttctaaatcctgattacaagtcacatgatcaagaacaactaataaaggagattcaggagcatgttaaaaaacctacagcaccttacaaatatcccagaaaggtagaatttattcaagagctgccaaagactatcagtgggaagacaaaaagaaatgaactgaggaagaaagaatggaagacaatttaaagttgtttcattaattaccatatctataacacaaacatagtatctgtcaatctctagaaaccacaagatgatggagaggtcataaaaactgtggtagtatgcttagaaactgttgatttaaaatatcttgtggttatgatatcagaggctaaattttgaaataaaatatttggcaaattcctcc

SEQ ID NO: 64484 - DNA, 595 bp, Homo Sapiens
gggaaaagggggaacatcttgggatgaagcttgtccttatggtgatggtttaattacagattaaaaaattagaaggaaatttcagtggattaagtgtatagctttcatatctacatttcaagaaattaccattgtaacttgataagagatgatttattttatgtaaacatctttgcaaagcaaggtgtagcagctcagctagatttattactgtgcacgaaagtaaatacctatctcaattattctttttcttttccagtataaagtttgctgaatgtacaagaagagtttatcacttaggatatagaatttttttaggggttgggggaggggatctgttaggaaactgttacctataaacaaagattgactggattcgatccaaaagataaaacttgaagctattctggaactaacatggaaaaatgaaatggctattgtttaaaaaaatgatagaaatacattgttgatgggatatgagttaagtttattttctacaaactgtaattgatgaggacatggataatatcttcatgtttctgagaagtaatctgtatgtggggggaggggataataaatatttctaaccaacaaa

SEQ ID NO: 64485 - DNA, 465 bp, Homo Sapiens
cctgtaatgtttctgtggataaggaacagaagctatccaaacgtgaaaaggaaaatggttgcgtccttgagactttgtgctgcgcggggtgctcactcaatcttggctacgtgtacagatgcacgcccaagaatcttgattacaagagagacttgttttgcctcagtgttgaagccattgaaagttatgttttagggtcctctgaaaagcaaattgtgtcagaagataaagagctttttaatcttgaaagcagagttgaaatagaaaagtctctaacacagatggaagatgtcttgaaagcattacaaatgaagctgtgggaggccgaatccaaattgtcctttgccacttgtaaaagctgaactctagtctgtgtcctccattctgcccccgcccttcctccccttatttgttaaatgaagcaacatagtgagacgtcgtctcaccctcgtgccgaattcttgg

SEQ ID NO: 64486 - DNA, 598 bp, Homo Sapiens
aaatcggctacgtggagctctccttccgggcaggaagctggacgacaaggacctcttcagcaagtccgaccccttcctggagctctacagggtcaacgacgaccagggcttgcagctggtgtacaggacggaggtggtgaagaacaacctgaacccggtgtgggaggccttcaaagtctctctgagttccctctgcagctgcgaggagacaaggcctctaaagtgcctggtcttgggattacgactctcgatggaaagcacgacttcatcggacgaattctctaccaccttcgaggagatgctgaaggcctttgaggaaggggcagtgcccaagtgggcctgtgtgaaccccaaatacaagcatgaagagacgcagttataacgaactcagagagtggtcgtccttgtgctgacctcaagttccacatgggtgtactccttccttggactatatcatgggcggctgccagatccacttcaccacaaaacgtgaacgaggagaaactggagtgagcgtttgaaccagccacagtctctacgtgtcatccaaggagcccggcacagaccccgtgtcacccccatgtcacccagcagatcc

SEQ ID NO: 64487 - DNA, 588 bp, Homo Sapiens
gtaatttaaaagttgaactaagattctatcttgaacaaccagctatcaccaggctcggtaggtttgtcgcctccttccccctggccccactgtttgcgctgctgaacaacatcatcgagatccgcctggacgcctcaaagtttgtcactgagctccgaaggccggtagctgtcagagccaaagacatcggaatctggtacaatatcctcagaggcattgggaagcttgctgtcatcatcaatgccttcgtgatctccttcacgtctgacttcatcccgcgcctggtgtacctctacatgtacagtaagaacgggaccatgcacggcttcgtcaaccacaccctctcctccttgtacgtcagtgacttccagaacggcacggcccccaatgaccccctggacctgggctacgaggtgcagatctgcaggtataaagactaccgagagccgccgtggtcggaaaacaagtacgacatctccaaggacttctgggccgtcctggcagcccggctggcgtttgtcatcgtcttccagaacctggtcatgttcatgagcgactttgtggactgggtcatcccggacatcccca

SEQ ID NO: 64488 - DNA, 409 bp, Homo Sapiens
agggcggatttgtgtgctgctggtctgaactgaatgaagatcaacaggatgagctcatcagaagcggtcgagttggccctcacctcacaagacatcgctgaagtcacacagaccctcttaaacttggctgaattcatggaacacagtgacaagggccccctgccactgagagatgacaatggcattgttctgctgggtgagagagctgccaagtgccgagcatatgccaaagcactacactacaaagaactggagttccagaaaggccccacccctgccattctagaatctctcatcagcattaataataagctacagcagccggaggcagcggccggagtgttagaatatgccatgaaacactttggagagctggagatccaggctacctggtatgaacaacagtgca

SEQ ID NO: 64489 - DNA, 292 bp, Homo Sapiens
agccaccccctgcttacacaccctaatgccagccctgggctctcttcctcggcagcccctccctcaactctgcagctcctctcgcacccagcaggagctcctttccccagcaggcctcacgtggtaggatccatgaccatcttctccaaaccttccccaggagagactctgcctttagggtcatccaagtatccctgctctcagaaccggaggtccactggttttctataatgtactctttccctcctgccacatcctgccccccgatacagcgaccaggtatgaacaacag

SEQ ID NO: 64490 - DNA, 556 bp, Homo Sapiens
cagtgtgcggagctgataacattcccaatattgagcagttcccaaggacagtcagcatttctagacttccacaaaattatgctgcatttggctggagcccggtgttcagtggtttccctgcccgaggtcgctgcagccccatctaccacatcttcatgtggacattgagattcacatgctggctcctgaagggtgctcagtctccttggtgattaaggtcctgcttgaactgctgccaactccatgtcagggaagtcgcttttggtgcctggctggtttgcccagagccaagctggggcaaggggcagccagccctggcttccaaggctcccgtactgtctgtgtccttgtataaggagctttgctcttggaattactgaaagtctgtggcccaagagagagacacaagtggccttaagtctttttgaagtgttatttcatccagggaaatgcctcgagccatagagcctgaaatcatctttgttggctcagaaaataccttagcttcactcagctggactgcattgaaggcgaggctgccccttggatcaagcag

SEQ ID NO: 64491 - DNA, 363 bp, Homo Sapiens
ataattgtgttctgttgggactttagacaaaactcacctgcaaaaaactgacaggcattaactactggaacttcccaataatgtgtttgctgatcgttttactcttcgcataaatattttaggaagtttatgagaattttgccttcaggaacttttctaacagccaaagacagaacttaacctctgcaagcaagattcgtggaagatagtctccactttttaatgcactaagcaatcggttgctaggagcccatcctgggtcagaggccgatccgcagaaccagaacgttttcccctcctggactgttagtaactagtctccctcctcccctaaccacccccgccccccatcgcgtccggttc

SEQ ID NO: 64492 - DNA, 471 bp, Homo Sapiens
ctggatgcacgagaaaagtctaccttcagagaggaaagcccacttaggatcaaaatgatagcgagtgattctcaccgtcctgaagtcaacctcaaaatggcccctgttcctcttgatgattctaacagacttgcttccttgactaaagacaggctgcttgctagtacacttgtccattctgtcaagaaggagcaagaattccgatccatctttgaccacattaagttgccacaggccagcaaaagcacttcagggtcatttattcaacacattgtgtccttggttcatcatgttaaagagcaatacttcaagtcagctgcaatgaccctaaacgagcggttcacttcgtatcagaaagccactgaagaacatagtactcggcaaaagagccctgaaatacacaggagaattgacatctcaccaagtaccctgaggaagcatacccgtttagcaggggaagagagagttttt

SEQ ID NO: 64493 - DNA, 1021 bp, Homo Sapiens
  misc_feature (969)..(969): n is a, c, g, or t
ttttcggatccgggcgacagcggtggcggttcctcggggtgctcggctccctcccacctaggccggccccggcccgactcgccctcagaaactcactgtttggggctgcggactttctcgtcgtgccccacaaaagtaaagcttggggacctggggggagccggaagtatcgcttcgagatccccaaatactatcggggaaacggaagtggccgtcggtggcaggtttgggggagaccggaagtgacgagacctgtcggccatggagcctaatgatagtaccagtaccgctgtggaggagcctgacagcttggaggtgttggtgaagaccttggactctcaaactcgtacctttattgtgggggcccagatgaatgtaaaagagtttaaggagcacattgctgcctctgtcagcatcccatctgaaaaacaacggctcatttaccagggacgagttctgcaagatgataagaagcttcaggaatacaatgttgggggaaaggttatccacctggtggaacgggctcctcctcagactcacctcccttctggggcatcttctgggacggggtctgcctcagccactcatggtgggggatccccccctggtactcgggggcctggggcctctgttcatgaccggaatgccaacagctatgtcatggttggaaccttcaatcttcctagtgacggctctgctgtggatgttcacatcaacagtggaacaggccccgattcagagtgagccccgggtacggctggtgatggctcagcacatgatcagggatatacagaccttactatcccggatggagtgtcgaggaggggcccaaccgcagcacagtcagccggcccccgcaaccaccgggctgggacctccggagcccagtagccttggagcttctcaaacatcaggagctaggttggaaagtggaagcacctctctcgggggagccccatggaggggcanaaacaaattgggagggaccgcgtgcccccaactctcagaaaccctcggaagc

SEQ ID NO: 64494 - DNA, 288 bp, Homo Sapiens
ttaatagggagagatggtcaggtcagccgacaactacttcagcaagctgtggctcctttaccgctacagctgcattgatgactctgcctttgagaggttgctgccccgggtctggatgtcttctccgacggtaccagatgatgttcggcgtgggcctctacgaggggactggcctgcagggatcgctgcctgtgcatgtctttgaggccctccaccgactctttggcgtcagcttcgagtgcttggcgtcacccctcaactgctacttccgccagtactgttctgcct

SEQ ID NO: 64495 - DNA, 1024 bp, Homo Sapiens
cctgactcgccctggtgcggtccgctttttggattgtcgtttgtgtctcttccttcttcttgtctttgtactttgcctgtctttgtattgctggtctctgtccgtatctttcgtgttcttttgttcctattgtatcgcgcgtctgcgtgtctgtgttttactttatcggcttcccagtatctgccgggtcagtgtgagatttttgttgcgccgtgagtctgcccgcatctccatttgtcgtgccctagtatctctgtcttgctatcagactcagctctgcttttgttacccctccttacgtgcattgcctgtcttttcctccaagtctaagcctagagtactgtaacttcggtgctccttgctggcactaatgtgagcacttaatggcaggttagtgcctgttagatggtcgccgttattctcccgaattcctctctttacccagctcacagccccgttgtcacgctgtcccagacaattcccatctcaatgctctcggaggcatttagacattattgacacaatattcttatgttatgtagccagttgtgcactttctatctcgtgttcccgaaccccaggaaaagtttttccttatccattagtgtgttttcccagtccgcattcctcagcttcttcacaggcactcctggagatatgaaggattactctccatatcccttcctctcaggctcttgactacttggaactaggctcttatgtgtgcctttgtttcccatcagactgtcaagaagaggaaagggaggaaacctagcagaggaaagtgtaattttggtttatgactcttaaccccctagaaagacagaagcttaaaatctgtgaagaaagaggttaggagtagatattgattactatcataattcagcacttaactatgagccaggcatcatactaaacttcacctacattatctcacttagtcctttatcatccttaaaacaattctgtgacatacatattatctcattttacacaaagggaagtcgggcatggtggctcatga

SEQ ID NO: 64496 - DNA, 400 bp, Homo Sapiens
  misc_feature (290)..(298): n is a, c, g, or t
gactgtcatcctgtttcttccatattctctgatttcatgaattgaaaagaaacaaatgtattgaagaagtgagctacagttttccttccttaaccatgggtgctagtaactttttaaaactcaagacaagattagttttttatgtgtgaagtcattaaattattacacgaccagaactaaaatgcaatatacagttaagtccacggatactcccattaatgagaaataacactaggaagccactattacaggaagaaaagatttggttttcatggcagtctgtttttttnnnnnnnnntttttgagccactatctattgttgaatattttaagatgggatgagggaggaactaataagggcttacacaataaaaaataactatatcataactcaaaaaaa

SEQ ID NO: 64497 - DNA, 1044 bp, Homo Sapiens
cagaggatcctctctggatgcaagtgcaaaaagacagaatgaaatgcccagaaaacaatgggcaggaaaatcctggtgatacacacagggtacagaaatggcatcgagcttttccaaggaagaaaagaaagaaacctgcaacttgtaaacaatgagcttccaacaacttcatggatcttcatgcggaaaggccccacaggggcagaaaccgttttaaggtgtcagagaatgatgggaacaagcttcagatgttagctctgactcttattaaaccaccacagtaattcacagctggagagaaaccctataaatgtcaacaatgtgacaggaggtttagatggagttcagatcttaataagcacttcatgacccatcaaggaataaaaccatatagatgctcatggtgtgggaaaagctttagtcataacacaaatctacacacacaccaaagaattcacacaggagagaagccctttaaatgtgatgaatgtggaaaaagattcattcagaactcccaccttatttaaacaccagagaactcacacaggtgagcagcccttatacatgtagcttatgccagagaaactttagtaggcgatcgagccttcttagacaccagaaactccacagaagaagggaagcatgtctagtgtctccaaactgaggaacgttaccatgtagagcttgactttagaagtggtgaaagaatacaaatttatgaggcacccaatgataggaatctgtgattaataaaacatttgggaagggtacatgttacacttcacaaaaaggaatctaagctgtctgttttattcagcattgcatcttctgtgcctagcacaagagttgatacataaggagtactttataaataaaaaaatgaaagtgtagtgatgagattcctttagctatctatctatatgtatatatctggttattcaaagcttccccacccccagtcatctaaatttttcaggtatcaagtgctcaacagacatatgatagtcaaggctcttagtctcattttttactctttgtcaagag

SEQ ID NO: 64498 - DNA, 296 bp, Homo Sapiens
ctttctgtagtctacctcttttactcaaactgtataaggaaatagtgactgattgttcaggtttggcattttcattgctacctgcctgcagaattaatgccctcttccttgtctaagatattactgtgttaagtgtcctgttaattataaatagttcaaaatggacagactgtcaacttgaaatttacttatgtaaaaagcttaggtgattcttagggtttccatgttcataactttacaaagctttataaaaataaaattgcaacttaatagagctaattaacttgtatttgtat

SEQ ID NO: 64499 - DNA, 425 bp, Homo Sapiens
catggggcccggagctgctgtggcctccactggcatccgtgtttccaaaagtcgctttggcccaggctccacggcgacagttgggcccaaatcagaaaggagagagggggccaatgagggcagggcctcctgtgggctggaaaaccactgggtgcgtctcttgctggggtttgccctggaggtgaggtgagtgctcgagggaggggagtgctttctgccccatgcctccaactactgtatgcaggcctggctctctggtctaggccctttgggcaagaatgtccgtctacccggcttccaccaccctctggccctgggcttctgtaagcagacaggcagagggcctgcccctcccaccagccaagggtgccaggcctaactggggcactcagggcagtgtgttggaaattccactgagggggaaa

SEQ ID NO: 64500 - DNA, 530 bp, Homo Sapiens
  misc_feature (360)..(414): n is a, c, g, or t
aagaatttttctgtctttggagagtattttagaaactccaatgaaagacactgtttctcctgttggctcacagggctgaaaggggcttttgtcctcctgggtcagggagaacgcggggaccccagaaaggtcagccttcctgaggatgggcaacccccaggtctgcagctccaggtacatatcacgcgcacagcctggcagcctggccctcctggtgcccactcccgccagcccctgcctcgaggactgatactgcagtgactgccgtcagctccgactgccgctgagaagggttgatcctgcatctgggtttgtttacagcaattcctggactcgggggtattttggtcacagggtggnnnnnnnnnnnnnnnnnnnnnnnnnnnnnnnnnnnnnnnnnnnnnnnnnnnnnnnaatgacaatgaagtgacactttgacatttcctaccttttgaggacttgatccttctccaggaagaaggtgctttctgcttactgacttaggcaatacaccaagggcgagattttaa

SEQ ID NO: 64501 - DNA, 552 bp, Homo Sapiens
cccccaccaggggtctctgcctagcacagcacctcgacctgagcccagctctaccgactcaggaccagcctgctgcttaactccacgctcactgcctcggaggtctgagcagagggagtccctcaagagtgccattgaccaagagacagcagacagcctgcctcctggggcgtgccggcacctgcttcagctactgcctcctgtatgcatgagtccggatgctgggcaggatccctgcttacgcccgggcccgatttgcgctttgccggactggatggagtggaggaggcccaggccacagtaccaccccacctgcccaggccagcccctcgtcacctactccccgaagttaccagctcagctcgagtcttcagggctgggctcctaggctgcccatcctacttctaccctcactggcctccagtgggattcactcctgccctgcccccaccttcccagtcccacaggccacccctggcttgggctgggttctgtgaagttacgtatttattgagcttttggttcttttataaagacttgtctaaactccaa

SEQ ID NO: 64502 - DNA, 482 bp, Homo Sapiens
ctggagcgccatgagcagcccggatgcgggatacgccagtgacgaccagagccagacccagagcgcgctgcccgcggtgatggccgggctgggcccctgcccctgggccgagtcgctgagccccatcggggacatgaaggtgaagggcgaggcgccggcgaacagcggagcaccggccggggccgcgggccgagccaagggcgagtcccgtatccggcggccgatgaacgctttcatggtgtgggctaaggacgagcgcaagcggctggcgcagcagaatccagacctgcacaacgccgagttgagcaagatgctgggcaagtcgtggaaggcgctgacgctggcggagaagcggcccttcgtggaggaggcagagcggctgcgcgtgcagcacatgcaggaccaccccaactacaagtaccggccgcggcggcgcaagcaggtgaagcggctgaagcgggtggagggcggcttcctgcacg

SEQ ID NO: 64503 - DNA, 657 bp, Homo Sapiens
  misc_feature (595)..(610): n is a, c, g, or t
attgtttgtgtgggagggacaagcccactctcacaggaaggggcaccaggactgctctccaaggaactggacctgtccagacagttacactccaaggtcattggagagaacttctgtatggcaagcctgagagggagaggaaacaaaagctgtgtcctggcagaaggtctgggtttgcagatgggtgccctgaatggaactactttaactaatccatagggacttttggtatgctttcctctctttttaaaggaacttcgtgaccctaaacattagcccaaaggacttcttagccttcaattgggagatacctttggtctgctcctgcaccaaagccatatgggtggaagtcagttggcctccctggttctgcagagggccagaagaatgagagagaggaagactgctggcagggaaatcgaggaggcgagactagaactgcaccagcttccctgatgtctgcagccatggctttgcagtgcagacagagcttctctgggatgctgggattcttgcctgtatgaatgcatcaagtattcatttattgcccgaataggcattgcattaagtcctctgtaaggtgtcaggcaagccnnnnnnnnnnnnnnnntgggtaagtcctaaccccccacaaaggtgttcccagtgactacctgg

SEQ ID NO: 64504 - DNA, 219 bp, Homo Sapiens
ctctcggtgcagcgggacagggcgaagcggcctgcgcccacggagcgcgcgacactgcccggaagggaccgccacccttgccccctcagctggcccactcgtgatttccagcggcctccgcgcgcgcacgatgccctcggccaccagccacagcgggagcggcagcaagtcgtccggaccgccaccgccgtcgggttcctccgggagtgaggcggccgc

SEQ ID NO: 64505 - DNA, 430 bp, Homo Sapiens
caagaaacctaaaatgagagagttttttattggactgtcagaccaggttgtcgagggtcagtggcaatgggtggacggcacacctttgacaaatgtctctgagcttctgggatgtagggcgagcccaacaacatagctaccctggaggactgttccaccatgagagactcttcaaacccaaggcaaaattggaatgatgtaacctgtttcctccattattttcggatttgtgaaatggtaggaattaatcctttgaacaaaggaaaatctctttaagaacagaaggcacaactcaaatgtgtaaagaaggaagagcaagaacatggccacaccccccgccccacacgagaaatttgtgcgctgaacttcaaaggacttcataagtatttgttactctgatataaataaaaataagtagttttaaatgttt

SEQ ID NO: 64506 - DNA, 456 bp, Homo Sapiens
cagttggtagaaggtacacaggagaaaatactgcaacccaaactggctcctagtttctctgatgcacagaccattgaagctggacagtactgcacttttgtcatttctacggatggctctgttagagcttgcgggaaaggcagctatgggagactgggccttggagactccaataatcagtcaactttaaaaaagttaacattcgagcctcacagatccattaaaaaggtttcatcttctaaaggatctgatggtcacactttagcctttacgacagaaggagaagtcttcagttggggagatggtgattatgggaaactggggcatggaaatagttcaacacagaaatatcccatagcttattcagggacctctacaaggaaaggtagttgtttgtgtgtcagctggatacagacatagtgctgctgtcacagagatggcacacataagaggtcg

SEQ ID NO: 64507 - DNA, 1108 bp, Homo Sapiens
  misc_feature (1062)..(1062): n is a, c, g, or t
gatttttccgatcggcacattgtttcaagttgtccaaattgacaagagcgagaggatactgcgttccatcccgacccggggccacggtactgggccctgtttccccctcctcggcccccgagagccagggtccgccttctgcagggttcccaggcccccgctccagggccgggctgacccgactcgctggcgcttcatggagaacttccaaaaggtggaaaagatcggagagggcacgtacggagttgtgtacaaagccagaaacaagttgacgggagaggtggtggcgcttaagaaaatccgcctggacactgagactgagggtgtgcccagtactgccatccgagagatctctctgcttaaggagcttaaccatcctaatattgtcaagctgctggatgtcattcacacagaaaataaactctacctggtttttgaatttctgcaccaagatctcaagaaattcatggatgcctctgctctcactggcattcctcttcccctcatcaagagctatctgttccagctgctccagggcctagctttctgccattctcatcgggtcctccaccgagaccttaaacctcagaatctgcttattaacacagagggggccatcaagctagcagacttctggactagccagagcttttggagttcctgttcgtacttacacccatgaggtgggtgacccctgtggtaccgagctcctgaaatcctcctgggctgcaaatattattccacagctgtggacatctgggacctgggctgcatctttgctgagatggggactcgccgggccctattccctggagaatctgagattgaccagctctttcgggatttttcggattctgggggaccccaaatgaggtggtgtgggccaggaattacttcctatgcctgattaccaggccaagttttcccaaatggggccccggcaagcattttaggaaaaagtggaccctccccctggataaaaagggaacggaccttggtattctcaaaatgctggcactaggacccttacaaacgggtattccggccaaggaaaccctgggntcccccctttcttttcagaaggtggaccaaacccagaacccccttt

SEQ ID NO: 64508 - DNA, 441 bp, Homo Sapiens
atcccccgtaggcgacggcgcggtgggcaagacgagcctggtggtgagttacaccaccaaccggctaccccaccgatgtactactccctactgccttcgacaacttctccgcggtggtgtctgtggattggcggcccgtgagaccccaactctgtgacactgccggacaggatgaatttgacaagctgaggcctctctgctacaccaacacagacatcttcctgctctgcttcagtgtcgtgagcccctcatccttccagaacgtcagtgagaaatgggtgccggagattcgatgccactgtcccaaagcccccatcatcctagttggaacgcagtcggatctcagagaagatgtctaagtcctcattgagttggactaatgcgaagaatagccagtgcctgaagaggcggctaagctgtgcgccgtcgccaagccggggc

SEQ ID NO: 64509 - DNA, 395 bp, Homo Sapiens
ggacacatctgtggcctatgtccggggctgaggagaacctggcaggctggtaggccccgcgagatgacagtctcattctggaccaccagtgggagctgtgagaagctgatgcctcctgcaggaggtggatgaagactagtgcactacctgctcctgcgggagaagctggagaccgcccagcggcctgtcccggaggcactgtccccggccttcagcgaggactctgagttccatggctcctccagcgcctcctccccgctctcggctgagggccgcccatcacccctggaggctcccaacgagaggcagcgggagctggccgtcaagtgcttgcgcctgctcacgcacacattcaacagagagtacacacacagccacgtctgcgtcagtccgtg

SEQ ID NO: 64510 - DNA, 756 bp, Homo Sapiens
agatgtgggagcgagcgcttctgcgactccagttgtgagatggccgcaagggcatgggaattgacgccactcaccgacccccagtctcaatctcaacgctgtgaggaaacctcgactttgccaggtccccaaggtgcagcggggctcggcgagcgatggcacccttctccgtccccatcccaatccaagcgctcctggcactgacgacgccaagagactcgagtgggagttaaagcttccagtgagggcagcaggtgtccaggccgggcctgcgggttcctgttgacgtcttgccctaggcaaaggtcccagttccttctcggagccggctgtcccgcgccactggaaaccgcacctccccgcagcatgggcaccagcctcagcccgaacgacccttggccgctaaacccgctgtccatccagcagaccacgctcctgctactcctgtcggtgctggccactgtgcatgtgggccagcggctgctgaggcaacggaggcggcagctccggtccgcgcccccgggcccgtttgcgtggccactgatcggaaacgcggcggcggtgggccaggcggctcacctctcgttcgctcgcctggcgcggcgctacggcgacgttttccagatccgcctgggcagctgccccatagtggtgctgaatggcgagcgcgccatccaccaggccctggtgcagcagggctcggccttcgccgaccggccggccttcgcctccttccgtgtggtgtccggcggccgc

SEQ ID NO: 64511 - DNA, 977 bp, Homo Sapiens
gttttgtcttctaatctgggtaaacatcaggtcaatcccaggatatttcttataacgggctatgcagaatggatgctactcttagggggcactaccaggtaaaagcttaattgatgtagactatctcttcccttcttagttccggtgccaagaactggttttgttaagctttagttgtttctttggtgctctaggccatgtcaaccctgggcactaatcaggacactgtttactattcttcctcttctgtgtcccatattcactttgtaattattctattttagctggttatatggtagttaacttggtagcctgttttcctttgttttctttacttgtgtcaagctccatgtcgttgttttgtgatgagcagtgatttagaactggccagaccttagaagagtcttcagcaagctgccctagggtaggggcgtattctctgtattgttcttgtactggtaccccaggaggatgccttgtaactgctctttggtcatgatagtggtaatgaatccattcatgtaaaatgcaatatgtctgttagtttggggcacccgaggctcagtagaggtttagtatgatgccttccctttcttcttgttgagttatgaagaaactaatttctggcacagtgtgactgcttcaaacctatgttctgctgctatctcctatagaggagggcagacttttttttcttagtgcatttgctggtaggtacaaggagggatggactatggaattagtgttcagagtcacagatcctacgtatgtgctcttcagtagaggattttctgtgatcctacaatgaagggaaagcgtatataatttattggtacttcctaaagatagagactaaagtcatggtagtattggccaaattaattttaaaagctgaacaagtcatgaattttgatataaatcaaagacttgtttccttataaagcttccatttttgaaaagttggatcagttacagac

SEQ ID NO: 64512 - DNA, 720 bp, Homo Sapiens
aagaaaccggggcctttgccaacagccaagaaataagaatcagaaagaaggacacaccatttcatagcacagaacacaagtagatggctcccatgaagaatctagcatcatggtatggcagaagcagaatggactcaggaatcatggtgcctacactggaatttcagatcggccactgacaaaatggacacattattcaacatttccaaatcttggcattcttatccacaaagtgaagataataattgtcaattcacaggtgattatgatttaaagagattacttttgaagagttcctaacacattcagtcaacatttaatgatgcttcaggcactgtgttcattgctagtgagcgtatgacacacacagccatacggtcacagagctttcaatgaaaagtagcataattgctcatttcaccaggcccccggcttggggcgccttccttccccatggcgggacacctggcttcggatttcgccttctcgccccctccaggcggtgggggtgatgggccatgggggcggagccgggctgggttgatcctctgacctggctaagcttccaaggccctcctggagggccaggaatcgggccgggggttgggccaggctctgaggtgtggggattcccccttgccccccgccgtatgagttatgtggggggatggcgtactgtgggcctcaggttggagatggctagtgccccaaggcggtcgc

SEQ ID NO: 64513 - DNA, 699 bp, Homo Sapiens
atctcgaatggtgactcgtgatggcaggtgtaatgctcagcgcttatatcaaggcaaatttttcctttcttgctaattgctttgtgtgttcaatgctaggtctgatagcgatagcttttagtagacagcggtaggtgcctgcagaacttgtgtttttctcatctttaagatacaactacttatgctcttaaatcaaggctgtctgcttatttatactagcgtaggcaacacttggatttcccttcttagtatgcttcataactgttttacagagagcttttgcttgttctttctcatgtatctcgtgtttatgtgcacagtgccaaaagaagactgactgggtggaggctctgccttgcctcaagaaccatcccctgcagagcatccagggaggtttctcgccccaatagcctcacggcacagtactcttgggcagtaactggacaccttttatttgaagaaacaaactgaagaaaaaatgcttccttaagtgctgacagcctttttaaccaatacatttaaaattgtacagaacaaaaaaataaaatcaaagactgatcttgtacagatattagtgttaccagcattcatgtggaaatcaagagcaaagacaaaataatgttaaacaattctgtaccataacattttctgtaatgatactgaaacttaatgaataaaaaaattccttgatcattattt

SEQ ID NO: 64514 - DNA, 462 bp, Homo Sapiens
tttgtaaattcatcaaagtttaatgatgaagagacacaataaatgttatgaagtttagtggtggatactttggaagtgaatgccaaagattacaatttagagaagaccacaaccaagaaacagttaacaaagttttagttgaatgaaaaattttaaaaaagtacatccaatttcttcaaaaaatttgtttcttctgcgattccaggtttaattttggttatcccatgacaagtggttcacaacactgtactggcgcgggctgcggaagcctgcgtgacgccgaggcgttgaggcgcggcgcccacgccactgtcccgagatgacgcaggtggagcgggcgcggcttcgcggaacccggcgccggccgccgcagtggtcccagcctacaccgggttccggggacccggccgccagtgcccggtgagtagccgccgccgtcggctgggcaccatgaacagcagc

SEQ ID NO: 64515 - DNA, 251 bp, Homo Sapiens
gccacgaggggaacggccgcgagctggtctgaggcgagccgagccgagcgagcgcggcggtggggccgagaggacgcgcaggtggcggcgttgccatgtcgcacggtcacagccacggcgggggtggctgccgctgcgccgccgaacgggaggagccgcccgagcagcgcggcctggcctacggcctgtacctgcgcatcgacctggagcggctgcaatgccttaacgagagccgcgagggcagcggccgc

SEQ ID NO: 64516 - DNA, 709 bp, Homo Sapiens
cgctgattgaaggtcagaagagatggtggtctattaaatatgaattgaatggagggtcctaatgccttatttcaaaacaattcctcagggggaccagctttggcttcatctttctcttgtgtggcttcacatttaaaccagtatctttattgaattagaaaacaagtgggacatattttcctgagagcagcacaggaatcttcttcttggcagctgcagtctgtcaggatgagatatcagattaggttggataggtggggaaatctgaagtgggtacattttttaattttgctgtgtgggtcacacaaggtctacattacaaaagaccgaattcagggatggaaaggagaatgaacaaatgtgggagttcatagttttccttgaatccgacttttaattaccagagtaagttgccaaaatgtgattgttgaagtacaaaaggaactatgaaaaccagaacaaattttaacaaaaggacaaccacagagggatatagtgaatatcgtatcattgtaatcaaagaagtaaggaggtaagattgccacgtgcctgctggtactgtgatgcatttcaagtggcagttttatcacgtttgaatctaccattcatagccagatgtgtatcagatgtttcactgacagtttttaacaataaattcttttcactgtcttttatatcccttataataaatcggtgtatttttttaaaa

SEQ ID NO: 64517 - DNA, 570 bp, Homo Sapiens
  misc_feature (524)..(524): n is a, c, g, or t
ggctgtttggcggcggctgcctccgcccgtgtgtccgtcaagggtgccgcgggatgtgtgtcagtttacgcctctgagatcacacagctgcctgggggccgtgtgatgcccaaggcaagtcttggttttaattattattattatcattattgttacgcttggctttcgggaaatactcgtgatatttgtaggataaaggaaatgacactttgaggaactggagagaacatatatgcgttttgtttttaagaggaaaaccgtgttctcttcccggcttgttcccttctttgctgatttcaggagctactctcctcctggtgaggtggaaattccagcaagaatagaggtgaagacaagccaccaggactcaggagggaaacgctgaccattagaaacctctgcataagacgttgtaaggaggaaaataaaagagagaaaaacacaaagatttaaacaagaaacctacgaacccagctctggaaagagccaccttctccaaaatggatatgtttcctctcacctgngttttcttagccctctacttttcaagaccgatcactccatcacctt

SEQ ID NO: 64518 - DNA, 544 bp, Homo Sapiens
gagaatacaagaaccttttattttccatccagttgggcagcagggaaaggctaggtgggcccagccgccctttccttcctccagctggctggagattattagccaggagacagcagccctggaacccagactctgtctcccccttgaggtcacagatgttgaagttggaatctcgctccttcccctgactaccatcctaggctgggccccaagactagtgaggcctgtccccaccatccctggccttgttgtggggctcagagaactcagagtcccagtgttgagtctgggagcactaggtcttcatagttccaggcccagagctacagctgggctgggagcgtgtgtgtgcactgtaagaaggagctgatgatactggccacgtgctggggttcgctcatgtggacacagtgattgcctgggacttccacaaactggaacctgctggagaggggagggggtgggtagtgagatgtggccagaggagcctagggagctccatgggccccggggtcagggccctcccacagcattccagctccct

SEQ ID NO: 64519 - DNA, 668 bp, Homo Sapiens
attcttaatatagttatgattttttcccagaaaatttctcatgcattcataataccaaaaacttaaatcatggttgtttcagtgcctttttttcaaagatcaccaggatcacaccttgttggatgtgggtgctaatctcagaaagattgagtggcaatccctggagtcagaggtggtcctatccaatgtaggttgctggtgtcctgaacttttctccataatcacacagatggtccataatacaggtgatcagtcagagccaaccaacctgaaactcgcaactttatatgaattccaccaagcttctttcagtcgtccttgggtgtcctctgacaatgtgtcctccgcttccgcacactctagtgttccttcaccggagtgttcgtagccccatgttgggtgccagaaatgttggggtgatcagacccaacaccaggccgtgggggctacaaactccagcgtagtcaaaggaatgagaaaagacaagttaagagtgcatatgcataaggtgggtccagggggccaacgctggtatggatgctgcgaaggccctgagctctgggagcccacattatttattggtgatcaaacaaagaagcaggccgtgaggacgtgggggtaaacaggtgagggtgtgaggttagaaaggtagtagtgcatcaagcata

SEQ ID NO: 64520 - DNA, 568 bp, Homo Sapiens
gcaataaaataaggtagattcagcacaatacctaataactaaaaaatctgtttttaattgggtggggcagacagcaagtgtgtcatcctggaagatactatttgggattttatgtaggtacataagagaaaaaagtgaacaaaagcaaggggctaccaggacgccgcagtatgcttaacatgtattttctaagtttgtattatgcctttatcttggtacttttttcttctgttctcacttgatctttttgaaatgtattttaaatcctaataaaaatatataaagtctggaattaataaaggattaaatgaaacttttgtatatctcactgaaattctcagaaaaaaggggggtgtggggagggggaattgcctggggtagtggagtgaaaattgtgaccaggttcttactaaggaatatggctactgcataatcaaatgtcagtggttaccaaacttatgaatcacctggtgttgtgtcatagattgtctatccttgcctctcgcccccagtgatttagatcagtggaactatgtggggtttctagttcagatcgcgagcggccgct

SEQ ID NO: 64521 - DNA, 454 bp, Homo Sapiens
gggcaagggcgagatcctggagagcctgcaggacggcgcggcagagtccccgtacgcctacagtaacgggatcgactacaagaccaccaccatcctgctgtacggccggcgcgtgaagctggagctctgggacacgtcgggccagggccggttctgcaccatcttcaggtcctactccaggggcgctcaggggatcctcttggtgtatgacatcaccaaccgctggtcctttgacggcatcgaccgctggatcaaggagatcgatgagcatgcacccggagtcccccggatcttggttggaaaccggctgcacctggccttcaagcggcaggtcccgacggagcaggcccgcgcgtacgcagagaagaactgcatgaccttctttgaggtcagccccctgtgcaacttcaacgtcgctttggacctaggtttaccctctagagacagctatgac

SEQ ID NO: 64522 - DNA, 492 bp, Homo Sapiens
ctagcggatcataaggcaggacgagaggcggggcctcgggcggcgcgtgtcgcgacgcgtacctgacacccccgcggaattcctccgcacctccaggcggtgtaggtggtaagagacgtcggggactgaggcctcttcccttaccagggacctaaaaccttttctccggttgggctagttcgctctcggggaagaactacacctcctacatccaccctctacctctcattttaagtcccttgtgcctgagcatttctctccgcgtgactcttaaggtgagaagcctcttgcccatccctttactccgtaattaacgggtgttgtgaccagatgaccagtctgccccactaccaggaaaattgggagtttgggatactgtaggcataagaggatactgacagagacgttctggatgtcttcctgacgctgagaactcctaaacttgcatcctggcgtctgctaaggtgtatctctgcctctccctcccacgtg

SEQ ID NO: 64523 - DNA, 531 bp, Homo Sapiens
  misc_feature (349)..(349): n is a, c, g, or t
  misc_feature (436)..(436): n is a, c, g, or t
aatactttataataaaacacttttattgctgcagaatgttggactgcattataggcaccagatggtcacgactagggaaatatgagaaggcaaatgatgtgaggattagtatcttgagattcacctggtctggaattatgtcataggctactatgcatcagaatcacatggagggctttctaaaacagactgctcagcccacccccagggtttctgagttcataggttataagaggtaagttgaacaattccccagatgatgctgatgctcctggtccacaatgtgagaaccactaagttggagtactgactcatagagataaaattctttgaaagaaatgtactgttntaagatactgtaaaatgtggaggcaggtcaaacgtctataagggctgttatgtatgaaatgtgcctctgacccaaatccacggactntgcgaaaatcaccaaggagactttgcattaagttcagagtacaatacaaactgggcctagctctgtatttagtcagtatgtgcacgtgggatact

SEQ ID NO: 64524 - DNA, 545 bp, Homo Sapiens
  misc_feature (44)..(44): n is a, c, g, or t
gggaaaataaactgactttggactgctcaagtctctgccatctnccatgactgcatttgttcctgcctgcctcggcggtatccacagaagacaggcaagaggattggagcagttttctcacaggtctgcaattctgtttttctccaagtacattatgaccccctcatccttctcttgaactggagaggggaagaaatgaaaggcatgcccacgtccgtcacctccccatcccctagtccccaccttgaacatcatgagctgttgttattagtcttggaagcagagtctgggttggtgtggatagcaaaggaggaagtctgagcccctcattggtcttcctcccacctgtcccttttccgggaagttgtggaattgttggaagaagagtttgcagaaggttaggaatgggtagatagctaagtcctaatctatgggtacattgttgtgtcccaaaccaagattttccttatccacaatgtcccttctgtctcttccactttacagtggactcggccactgtgcatagggttctctgcgtcatctgg

SEQ ID NO: 64525 - DNA, 412 bp, Homo Sapiens
ctgctgatatttgttgccctccctaaagcaaccaagtagcctttatttcccacagtgaaagaaaacgctggcctatcagttacattacaaaaggcagatttcaagaggattgagtaagtagtgggatggctttcataaaaacaagaattcaagaagaggattcatgctttaagaaacatttgttatacattcctcacaaattatacctgggataaaaactatgtagcaggcagtgtgttttccttccatgtctctctgcactacctgcagtgtgtcctctgaggctgcaagtctgtcctatctgaattcccagcagaagcactaagaagctccaacctatcacctagcagataaaactatggggaaaacttaaatctgtgcatacatttctggatgcatttacttatcttta

SEQ ID NO: 64526 - DNA, 745 bp, Homo Sapiens
  misc_feature (32)..(32): n is a, c, g, or t
  misc_feature (67)..(67): n is a, c, g, or t
  misc_feature (172)..(172): n is a, c, g, or t
agcgcccaatgccccgacccctgcccgaaganttgaagaaggaaaagaggccagtcacgtttttcgnatgatgtcacagtctacttgtttgaccaggagacgcacccaaagagctgggggccctgtggaggagaggcgtgcggccgggacctgagcggcccagccccagccntcaggctctccctacctgagcaggtgcatcaactccgaaagctccaccgacgaagaaggtggtggctttgagtgggatgatgacttctccccagatccttttatgtcaaagacaacaagtaacctgctcagctccaagccttctctccaaacatccaagtacttttctccgccgccaccggcccggagcacggagcagagctggccgcactcggcgccttactcccggttctccatctctcccgccaacattgccagcttttccctcacacacctgaccgactcggacatcgagcagggcggaagcagcgaagacggagaaaaggactaggtggctgccaacgcgcacgctcgggtccgaggctgctcccctggagcggcgcccctgcgccctcagcccgagcagcgacatccactcgccatttgctgacatgagattgggaggaagaatccagaggtgaagagggagacggctcttagctgcgttcaaggcggggccctcgggagcccaggtgcagagcgaggccgtgtccaggagccggcgtccctcagtgccccgtgcacccgcggccgc

SEQ ID NO: 64527 - DNA, 537 bp, Homo Sapiens
gatagtcaattaacgtattgcaccatatcataggagaaggaaatacatagacctacacctttgagcaaatagcagtgatgttttaggaactgaaatgtcacacttaaagtcttcagcccagctacttccctatttttgtggggagaagagggcctgattagaactgttctggttgtgtttggcgggaggggaataatttttgttcagtccttcttagtgaccaaactttaatttttaagaataatatattgacttactgaactgaagcattctgagttgaaaggagctccagaggagtggagttctgtgttgctcacatgttaaaatcttgctcaccttcagagcagagggaatacctatcttcagatatccgtccattttcatctcttaattgtagtcaaaagtatgacttgagagtgttgctctggtattctgggttctgaagcctggtattctggtattctgggttcaaaagtatgacttgagagtgttgctctggtattctgagagttgctctgtattctgggttctccgcgt

SEQ ID NO: 64528 - DNA, 564 bp, Homo Sapiens
ccgagaaggaggtccagcagtggtacaaaggcttcatcaaggactgccccagtgggcagctggatgcggcaggcttccagaagatctacaagcaattcttcccgttcggagaccccaccaagtttgccacatttgttttcaacgtctttgatgaaaacaaggacgggcgaattgagttctccgagttcatccaggcgctgtcggtgacctcacggggaaccctggatgagaagctacggtgggccttcaagctctacgacttggacaatgatggctacatcaccaggaatgagatgctggacattgtggatgccatttaccagatggtggggaataccgtggagctcccagaggaggagaacactcctgagaagagggtggaccggatctttgccatgatggataagaatgccgacgggaagctgaccctgcaggagttccaggagggttccaaggcagacccgtccattgtgcaggcgctgtccctctacgacgggctggtatagtcccaggctggagctggaggcatgggaaccgggtaccacactagatggaggatcaagc

SEQ ID NO: 64529 - DNA, 409 bp, Homo Sapiens
ttttcagaagtcagtgatacagaagtactattttgcaatgttaatctgtttgagtctttggagaaagtggtttcattgtaggtacatagtgcactgttaatattttaaacaagtagttcactcttccatttaagggatagcagttccttgtataaaatgactggatgtgtataaaggaattatgttgtcatgtgcctttaaccagctttagtaattactataatctcatatttatgatagttttgttaggtgacaggaccaaatgaaaatattttatgttttctcatcactttagattttatcattatgtacattactgggtttttagcatttcctaatgtgaagttttaatcacttttaagtatacatttttttctgtatcatttaaataaaatatttttataacttt

SEQ ID NO: 64530 - DNA, 426 bp, Homo Sapiens
ggtgatggctcccaggtggtctcgggaatccaggctgggttctagggaggactggttgtcacgtgtggtcactgttgactagacagagtcggctcgggggtcctctgtgtgggtttgccctgctgtggcctgtctgccacccaccacctctttcactgttggtgggggccttgaggggagggcccagccggtgggagctggctcagaactttggccaaaggtgaacggaattttttaggtgcagcagcctcctgccccaaggccgaccggcactggcagcactttcctgttgaagaaatcttcctggcgtgtggtttcaaagtgtaagcacctcagtgatgcaccctgtcctaagcattgagaggcacgtttacttgtgaatatgagaccatgagattctcaatgataggaaagtgctgtcccccc

SEQ ID NO: 64531 - DNA, 445 bp, Homo Sapiens
  misc_feature (101)..(101): n is a, c, g, or t
  misc_feature (129)..(129): n is a, c, g, or t
acggcgccccgggatctgggggcgcaccctcagggtcgcagggggtgctgatcggggacaggctgtactccggggtgctcatcaccttggagaactgcctnctgcctgacgacaagctccgtttcacgncgtccatgtcgagcggcctcgacaccgacacagagaccgacctgcgcgtggtgggctgcgagctcatccaggcggccggtatcctgctccgactgccgcagtggccatggctaccgggcaggtgttgttccagcggttcttttataccaagtccttcgtgaagcactccatggagcatgtgtcaatggcctgtgtccatctggcttccaagatagaagaggccccaagacgcatacgggacgtcatcaatgtgtttcaccgccttcgacagctgagagacaaaaagaagcccgtgcctctactactggattcgcga

SEQ ID NO: 64532 - DNA, 424 bp, Homo Sapiens
caccctcgtgtgggagaggggagttcttcagatgaggagtctggaggcacactgccccctccagactttccacctccaccactgccggactcagccatcttcctgccccgcagcctggatcctttaccagggccagtggtccggggccgtggtggggctgaggcccgtggcccaccacctcccaaggcccatccaaggcctccactgcccccaggcccctcaccagccagcactttcctgggggaagtggccagtggggatgaccggtcctgctcggtgctgcagatggccaagacgctgagcgaggtggactatgctcctgctgggcctgcacgctcagcgctcctcccaggccttctggagctgcagcccccctcggggactgtccctctggattatgccggccctcagcttccctcactcc

SEQ ID NO: 64533 - DNA, 345 bp, Homo Sapiens
cgcactacatcgaaacgcgtacgcgcgctggagctggagaacgagcggctcctgctcaagatctcagagaagtgaggaggtgaccacgcgcgaggtgagtggcatcaaggcgctgtacgagtcggagctggcctgatgcccggagagtcctggatgagacggctcgagagcgtgcccggctgcagatagagattgggaagctgagggcagagttggacgaggtcaacaagagcgccaagaagagggagggcgagcttacggtggcccagggccgtgtgaaggacctggagtccctgttccaccggagcgaggtggagctggcagctgccctcagcgacaagcgcg

SEQ ID NO: 64534 - DNA, 320 bp, Homo Sapiens
ccagaactctttacggacccacttttttccaaaagctgaggaggtggaaattttgttctctcaacaagtctggttggctatttacgagtccagggagtggtagttcccatggtacacaatggttatggatttttctaccatatcagagatgacaggtttgttgtggcctgttcagcctggaaatcctgtcccgagactgatgcggaaaagctagttcagctgactttttgtgcttaacatgatccgatacagctgatgaactctactcatctttaaagatgaatcatctattaagcacttaccaaaacaggggctcctcg

SEQ ID NO: 64535 - DNA, 511 bp, Homo Sapiens
gggcagaataggcagaggcctctccgttccaggcccatttttgacagatggcgggacggaaatgcaatagaccagcctgcaagaaagacatgtgttttgatgacaggcagtgtggccgggtggaacaagcacaggccttgggaatccaatggactgaatcagaaccgtaggcctgccatctgtcagccgggtgacttgggtcaattttagcctctacaaggcctcagtctcgttatggtgcaagatgaggcttgtgatacctgttttgaagggttcgctgagaatacttcaagataatgggtatccaaaatagtttacggccataccaccctgtacgtgcctaatctcgtaagctaagcagggtcaggcctggttagtacctggatggggagagtatggaaaacatacctgcccgcagttggagttggactctgtcttaacagtagcgtggcacacagaaggcactcagtaaatacttgttgaatgaatgaagtagcgatttggtgtgaaa

SEQ ID NO: 64536 - DNA, 793 bp, Homo Sapiens
gtgtcggcggagctgctcagagctgccttgaaggacggccactcaggcgtgcccctgtgctgtgccaccctgcagtggctccttgctgagaatgctgctgtggacgtcgtgagggcccgagcactatcttccatccagggagtggcccctgatggcgccaacgttcacctcatcgtccgagaggtggccatgactgacctgtgcccagcagggcccatccaggccgtggagattcaagtggaaagctcctctctggccgacatttgcagggcgcaccatgccgttgtcgggcgcatgcagacgatggtgacagagcaggccgcccagggctccagcgctcctgatctccgtgtgcagtacctccgccagatccacgccaaccacgagacactgctgcgggaggtgcagaccctgcgcgaccggctctgcacggaggatgaggccagctcctgtgccaccgcccagaggctgctacaggtgtaccggcagctgcgccaccccagcctcatcctgctgtgaccaggcgggcctgcccctgggctctggccacgcttccagcctctgtcacagcccccccaggcctcatgggttagagggaaaccgagctggcctggccagagccgtcagggaaggtaggacctggccacgtaggagcagaacgctcatgaaagtgcttggaggccgtggagcacaaagcagattctgattgggagcaaccgaggcgggctctgaacctggccggtccagcttcgcgtcctctgctggtgtctctccttctctgaccgcggccgct

SEQ ID NO: 64537 - DNA, 283 bp, Homo Sapiens
actttaaatgcctgccaaggagcagcctcaagcccagagaagactgaggctacggggaacttcccttgctgcaggctgttgtaacactttaagggccccaggtctccactgccaagcaggacttggcacatgagcacccaccccacagcaccatcaggcagcacccatgggctccaccagcccagctctgtccctcccctaggtaaagatcacactgaagtcttcaagtccccagcaaccaagttgggggtggtttccttcctcttcaggcagccaggcccat

SEQ ID NO: 64538 - DNA, 473 bp, Homo Sapiens
cgccacttccattgactcctcgcccttccgctggggctggaaagcccgccattgtcctggcggtggacgagaacgggctgtgggtcatctacgccactgagggcaacaacgggcggctggtggtgagccagctgaacccctacacactgcgctttgagggcacgtgggagacgggttacgacaagcgctcggcatccaacgccttcatggtgtgtggggtcctgtacgtcctgcgttccgtgtacgtggatgatgacagcgaggcggctggcaaccgcgtggactatgccttcaacaccaatgccaaccgcgaggagcctgtcagcctcaccttccccaacccctaccagttcatctcctccgttgactacaaccctcgcgacaaccagctgtacgtctggaacaactatttcgtggtgcgctacagcctggagttcgggccgcccgaccccagtgctggcccagccacttcc

SEQ ID NO: 64539 - DNA, 395 bp, Homo Sapiens
tgcgtgaagaaatccatgactcgcacccagaaccgggagaaatggatctactactgcaatggccatggtatcgatatcctgaagcttgtagcagcccaagtgggaagccagtggaaagatatctatcagtttctttgcaatgccagtgagagggaggttgctgctttctccaatgggtacacagccgaccacgagcgggcctacgcagctctgcagcactggaccatccggggccccgaggccagcctcgcccagctaattagcgccctgcgccagcaccggagaaacgatgttgtggagaagattcgtgggctgatggaagacaccacccagctggaaactgacaaactagctctcccgatgagccccagcccgcttagcccgagccccatccc

SEQ ID NO: 64540 - DNA, 526 bp, Homo Sapiens
  misc_feature (18)..(18): n is a, c, g, or t
tacagacgcggctcaggncggggctgcgtgtgagcacttctgaaggggttgtgctcctgagttactcagggcagaagacctgaaggcccaacagcggatcagcgccaagatcagccagatccccccggccagtgcaatggacattgaatttcagccagtcagtgtccaagtctcaggtcaaaccttgattctgtcacagcatcgcagcctccataccaaaggccctcaagctacctgcaggctatgcgaacgtggccacccattccacgttggtactgaccgcccagacatataatgcctctcctgtgatttcgtctgtgaaggccgataggccatccttggagaagcccgagcccattcacctctcggtgtccacgcctgtcaccctgggaggcacagtgaaggttctcacccaggggatcaacacaccccctgtgctggttcacaaccagctggtcctcaccccaagcattgtcaccactaacaagaagcttgccaacccccgaccccgattaggatcggagct

SEQ ID NO: 64541 - DNA, 350 bp, Homo Sapiens
cattgagatgtgctccttcaatccgtcctatgacaagatcttcagtcaccttcaacatgtaaagtacaaaggccaggaagcattcgtcccgggattcaacattgaagagctgcttccggagaggaccgctgaatattaccgctaccgggggtccctgaccacgcccccttgcaacgccactgtgctctggacagttttccgagaccccgtgcaaatttcccaggagcagctgctggctttggagacagccctgtactgcacacacatggacgacccttcccccagagaaatgatcaacaacttccggcaggtgcagaagttcgatgagaggctggtatacacctccttct

SEQ ID NO: 64542 - DNA, 351 bp, Homo Sapiens
ctctaccacgcgtcttgtgagctacagacacggccacgtccacctgagtgccaagatcaccattgctgcctacctgcccctcaaggctgtggatccctcctctgttgccttggtaaccctgggctcctcaaaggagatgctgtttgaaggaggtcccagaccttggatcctcgagccgtcctaattcttccagaacgtcgccgctgaggacactgacagcatcggcctggctctctttgccccccattcctcccggaattatcagcaacactggatccttgtgacctgtcaggccttgggtgagcaggtcatcgccctgtcggtggggaacaagcccagcctcaccaaccc

SEQ ID NO: 64543 - DNA, 553 bp, Homo Sapiens
gtataggatctctggctgtgaccgcacagtaaaagagctgaaagagaaattcctcagagtgaaaactgtacccctcctcagcaaaggggatgatatccatgctatctgtagccttctaaaagacttttttcgaaacctcaaagaacctcttctgacctttcgccttaacagagcctttatggaagcagcagaaatcacagatgaagacaacagcatagctgccatgtaccaagctgttggtgaactgccccaggccaacagggacacattagctttcctcatgattcacttgcagagagtggctcagagtccacatactaaaatggatgttgccaatctggctaaagtctttggccctacaatagtggcccatgctgtgcccaatccagacccagtgacaatgttacaggacatcaagcgtcaacccaaggtggttgagcgcctgctttccttgcctctggagtattggagtcagttcatgatggtggagcaagagaacattgaccccctacgtgtcattgaaaactcgaatgccttttcaacaccacagaca

SEQ ID NO: 64544 - DNA, 1289 bp, Homo Sapiens
  misc_feature (748)..(786): n is a, c, g, or t
ccacgcgtccggtctgttggcataatagtttacaaatggttttttcagtcctatccaaatttattgaaccaacaaaaataattacttctgccctgagataagcagattaagtttgttcattctctgctttattctctccatgtggcaacattctgtcagcctctttcatagtgtgcaaacattttatcattctaaatggtgactctctgcccttggacccatttattattcacagatggggagaacctatctgcatggacctctgtggaccacagcgtacctgcccctttctgccctcctgctccagccccacttctgaaagtatcagctactgatccagccactggatattttatatcctcccttttccttaagcacaatgtcagaccaaattgcttgtttctttttcttggactactttaatttggatcctttgggtttggagaaagggaatgtgaaagctgtcattacagacaacaggtttcagtgatgaggaggacaacactgcctttcaaactttttactgatctcttagattttaagaactcttgaattgtgtggtatctaataaaagggaaggtaagatggataatcactttctcatttgggttctgaattggagactcagtttttatgagacacatcttttatgccatgtatagatcctcccctgctatttttggtttatttttattgttataaatgctttctttctttgactcctcttctgcctgcctttggggatagnnnnnnnnnnnnnnnnnnnnnnnnnnnnnnnnnnnnnnnaagcatcattttcttatgtgaggtggggaagggaaaggtatgagggaaagagagtctgagaattaaaatattttagtataagcaattggctgtgatgctcaaatccattgcatcctcttattgaatttgccaatttgtaatttttgcataataaagaaccaaaggtgtaatgttttgttgagaggtggtttagggattttggccctaaccaatacattgaatgtatgatgactatttgggaggacacatttatgtacccagaggcccccactaataagtggtactatggttacttccttgtgtacatttctcttaaaagtgatattatatctgtttgtatgagaaacccagtaaccaataaaatgaccgcatattcctgactaaacgtagtaaggaaaatgcacactttgtttttacttttccgtttcattctaaaggtagttaagatgaaatttatatgaaagcatttttatcacaaaataaaaaggttgcccaagctcaaa

SEQ ID NO: 64545 - DNA, 280 bp, Homo Sapiens
gacagggattaagtcataataagcaataaagtacattttcaactgtttagatgatatggcccaggtgaacatgtcgacagatttggaagggagcgacatgttggtagaaaaggctgtccggcgggagttcattgacctgttgaagaagatgctgtccattgatgctgacaagagaatcactccaatcgaaaccctgaaccatccctttgtcgccatgacacacttactcgattttccccacatcacacacgtcaaatcatgtttccagaacatggagatc

SEQ ID NO: 64546 - DNA, 478 bp, Homo Sapiens
gggcagcgaggcagacacaggctcttgcagaccaatttgaagataaaactacatctgtattggaacgcctgaagattttctattgctgtcaagtaccacctcactgggccattcagcgccaacttgcaagtttgctctttgagttgggatgtaccagttcagcccttcagatatttgaaaagctagaaatgtgggaagatgttgtcatttgttatgaaagagccgggcagcacggaaaggcagaagaaatccttagacaagagctggagaaaaaagaaacgcctagtttatactgcttgcttggagatgtcctcggagaccattcttgctatgacaaggcctgggagttgtcccggtaccgcagtgctcgtgctcagcgctccaaagccctccttcatcttcggaacaaggagtttcaagagtgtgtagagtgcttcgaacgctcggttaagattaatcccatgcagctcggggtctg

SEQ ID NO: 64547 - DNA, 431 bp, Homo Sapiens
  misc_feature (31)..(31): n is a, c, g, or t
agctcggtaccggctcgcccgagcagatacncaggcagaaacatcgactctgagaggccccgaggctaccatcatccccaaggattcttggaggacgatgactcgcccgtttgctatgattcacggagatctccaaggagacgcctactacctcccaccccagcatcccaccggagatcctccttcaactttgagtgcctgcgccggcagagcagccaggaagaggtcccgtcgtctcccatcttcccccatcgcacggccctgcctctgcatctaatgcagcaacagatcatggcagttgccggcctagattcaagtaaagcccagaagtactcaccgagtcactcgacccggtcgtgggccacccctccagcaacccctccctaccgggactggacaccgtgctacaccccccagatgacgccgatgta

SEQ ID NO: 64548 - DNA, 398 bp, Homo Sapiens
gtgcaagaggacagcatttcagtttccaggccaaaccagtttagacaaggtgtgcccatcaggactccttctcaggccctggctgtttaccatgtcactgcctactgtgacttcatgcccttttgggataagaaaccacaaaacgcatggaacaactatccatggctcttagccagaaatgtcttgcctctggtctctgaaaggctggggtgagtggttacctcaaagacaattgcctccagtttgggggctcctctcagggttcaccctgtcaccggggcgtgggaccgacctgggaaatttccactagagttttgtcctcagctcctccctgccagcatcccagtcaccaccaggtggcgcttttgacacggtccacgtgcctggctttgaaggcc

SEQ ID NO: 64549 - DNA, 1197 bp, Homo Sapiens
accgattctgctgttcttttgtttgttggggcttcctttttttgcggttgtggctcgtcggtatccagtgcatgttttttgttcccttccttctttatgtctgatcgtcgatgggtgttcacgtccgtgcagctttttcttcgtcatttgttgaaggccctgctaaaggtgtgttgtggtcgtagtttattattctccgcttgtttgtgcgtattccgtggtgtgtgggccttgtccaggttgttgtgcccgtgtgacacttatcgaggtcggcaactgttcctttcgaagatgtcatccgaggtctctaggtggatcccgctccgtgagttctcgcgagtgctgcatgtgcgaaccgcaagcatggccagtgcagtttcagagccggagcgggccccatggacagtctgcagtagcaacacaggctggtcgtgcggtgaaggctttgggtgcatagagtggatgcccagctattcggtctgtgctctccctgggcccctgggccttggggcatgagggtgcatcctgcccggtcccggtgcttgcgcctcctctcctccatcgtgaccactgcgacattcctcccctcacgcctggcccggtcccgttccagggcaatctcccagggatgtggtgacatgcagggttcaagtgttcttggttccaggcacctcccggctcacggggagctcagaggtccatgccgaggagaccaggcaggacctcccgaggctgcgccccggccggcccatgcgttttgtgatcccaagtgactctgtgggaagggtggggacgaggcgtcgggagggtatacagggagcccctcccgtgcatggctgcccccccgttcattttctccaccacagccgcttgcacgtatagatactgtggtcccctttcttttaatatataaattatgtatggtgaagtggagtgtattgtgtaggtcccgtatttaatgcctctgactgcctttgaagcgcagccctctgtggcccgcagccccctgagcctggctgttgtgtggtatttatgctctctttgtctgcctgtttctaaggaaatgcatgtgtgccctgagccgtgatgatcctcccatccgtgttgtgagcacaggcatttgtgtctggtctgtcctccctgttgattggtctggcatttccggtattaaaatgataaaataaatggcattttctg

SEQ ID NO: 64550 - DNA, 1331 bp, Homo Sapiens
caagtgggaagccaaccgccctagccgttaaggccccccgtccgaggccttgcggagtccgcacccacaaccattcgacgaacgtgcctggaaatgtcaggggaagccgggaactcgtccaatcagaaccaggacaggatccaggttccaacgcagatcctcggggggaaaaagaccagcagtgctggatcctgtctgggggaagacatgtggccaagtcaattggccgaactgccaggaggagcttctggaaaacgggggcactcaagtagtgatgggaaagacccaggaagacagcccaagctcataatcgactgttgctagctctcggtgcacaacacagacaacaacaagaagctggactgaggcccggagtgcagcctgcattttggcacacagcatctgctcccatccccgcaagtctgacgcagccaccactctcagggatcctgcacccaaatgcggtcggagcgccagtgaccctgaggaagcccgtccgcttatccctggtatccacggttccccagagctttggggaccacgcgaaaacctccaagatattttttcacaaaatagaaactcatatggaacaaaataagaaaccccagccatgaaatctaccatgaagtcttcaagttcatgtcactgacaagcttgtgcaaagcagccaccttggaccataattaaatcaaggacattttctttgagacattccttatagttggagactcaagatatttttgttgcatcaggtgtattcccttgcatgggcagtggcttttataggagcattagtcctcattcgctgaaccctgttgtttaggtctaatttaagttttacatagagacccatgtatgactgcagcccattggctgcaagaccagggaggaaagtggcaagctgtagaaaatgtttacacgcatggaggggcattgctccagccctcagagcgtccggagccagcagggtacatgggtgggaggttcattcagcacccaccagtcaggtatgttctgagtgaacccacagcagtcgcagaatgagcacctggcagggtgggtttcctaggaataatttattatttttaaaaataggcctaataaagcaataatgttctagacatctgtctaagtaatcagactcaggttccacacacaagcaacaactcgtgggcctcttttctatttcaatgtgctactaagaacccttggatgtaacatactagttagttaatgaattctgtgaattctgtgaagagtaatgtgattgaaaataagtctaaacagctgtaaaagtgaccacaatgacatgaaataaatttaataagtct

SEQ ID NO: 64551 - DNA, 1039 bp, Homo Sapiens
caggagacgctgggcccgcactatgtgctgctgtcctcggcggccacggcgtgctctacatgtcgctcttcatccgcagggacctcatctggttctgctcagaggtggagtgctccacggtgaccacacgcatcgtgtctcagatcaagaccaagggggccttgggcatcagcttcaccttttttggcacctccttcctcttcatcacgtcccacttcacctcaggcgacgggaaggtggcggagcggctgctggactacaccaggactgtacaagccctggtcctgcccagaaatgtgcccgacaccaacccctatcgctccagcgcagcggacgtcaccacccgcttcgatgaggtgttctggtttggagacttcaacttccgcctgagtggcgggcgcacagtcgtggacgccctcctgtgccagggccctggtggtgggaccgtgccggcgctgcttgcagcattgaccagctcatccgggagatgcggaaagggtccatcttcaagggcttccaggagccggacatccacttcctcccatcatacaagtttgacatcgggaaggacacgtacgacagcacctccaagcagaggacgccctcatacacggaccgcgtcttgtacagaagccgccacaagggtgacatctgtcctgtgagctactcttcctgccccgggatcaagacgtccgaccaccgccctgtgtatggcctcttccgggtgaaagtgaggccggggcgagacaacattccgttggcagctggcaaatttgatagagaactgtacttactaggaattaaaagacggatttcgaaggagattcagaggcagcaagcactacagagtcagaactccagcaccatctgctccgtttcttgaagtttgctgaacgaggactcacagctgcaacgtggggtgattgtattgatcaaaacccactgggaaggacaaagagtttgccgcctttcggggatccaagggactgtggcgaccgtgcctctgtgccagcgtcccaggaaggaagccaacccggaa

SEQ ID NO: 64552 - DNA, 437 bp, Homo Sapiens
tgtcaacttctcaggggacctgctggaagaacaatgttaccagctttgaggagaaccaccattgccaacttgaaaatcagggaacaacctgctatggctgcacacctccgttcgccttgctgtatctgcttgctcaccgttgtacagcatgctgtaagacacacctccaagaatgcgctacaagggaaggatgatctggtgaagcggaccctcttcatcaatggaatctccaaatatgcagagtcagaaaagatcaagaagcatttttgacggaagcctaccccaactgcgcagttcttgaagcccgcccgtgttacaacgtggctcgcctaatgttcctcgatgcagagaggaagaaggccgagcggggaaagctgtacttcacaaacctccagagcaaggagaacgtgcctaccatgatcacccccggacacgtt

SEQ ID NO: 64553 - DNA, 494 bp, Homo Sapiens
  misc_feature (50)..(58): n is a, c, g, or t
gcacgagtgaaagatgagtggttggagaagtttaatggttttcaaatgcnnnnnnnnncagtcttcaaataagtgtttacgtagaagcaccatatctgaaacaggtgacagtggaccagtctgaatgaaatgagggttggcaggcctgagctccaaaaccttctgattgcccaagccctccttgtcttgcttggattatctccacacaaatggagaaactggacaaggtggtcatgtaggtccctgaaagctcaaagactttctcattccaggattccccatgttcatatgccagcatggcatgggggtgctctgtagtcaagcagggtcctttggggggcttagggatggagccaggaaatggctctgggactcagcgggtgtccagagtctcatcagcagggtttctttactttctctgagtggctggtgcctgcacactgagttttgcaggcttactctcacagagtgagcttcctgcaggccccccactg

SEQ ID NO: 64554 - DNA, 536 bp, Homo Sapiens
  misc_feature (377)..(410): n is a, c, g, or t
atcaaagtgatcttgtttacagcagtgcttttgtgaaacaattatttatttgctgaaagagctcttctgaactgtgtccttttaatttttgcttagaatagaatggaaccagtttaaatttcaaggaaatatgaaggcacttcctttttttctaagaaggaagttgctagatgattccttcatcacacttacttaaagtactgagaagagtatctgtaaataaaagggttccaaccttttaaaaaagaaggaaaaaactttttggtgctccagtgtagggctatctttttaaaaaatgtcaacaaagggaaaataaactatcagcttggatggtcacttgaatagaagatggttatacacagtgttattgttaaaannnnnnnnnnnnnnnnnnnnnnnnnnnnnnnnnnccatattgttaattttataccaaaatgttaaatatttgtattacttgaattttgctcttgtatggcaaaataattagtgagtttaaaaaaaatctatagtttccaataaacaactgaaaaattaaa

SEQ ID NO: 64555 - DNA, 421 bp, Homo Sapiens
  misc_feature (385)..(385): n is a, c, g, or t
ttttggttacaattagttctcatctccctgtcgtcgtcattggttatcgtggttgctgatgggggtggaaagttgaactccatgtctgaggacaagaggtcccgggggtggtgggagggtggcgccggggtcccttggactggcctccttgttcatgaccaagaccaaacctgggccctggatggccttggcctgtcccgaggagaaatgagaaaatcccagatctctgagcgccccccaactccattcccctgtgttcttctgtcttctgtagtatttattttattagtatttaatttgtattgtttcattggtttctgataagtctgtatcactgtgacgatttgagacaacttgttgtattgagggactttctgtacctctntttctttttctttgttgatgagctctgacaaagcta

SEQ ID NO: 64556 - DNA, 460 bp, Homo Sapiens
aagagtctacaaggaaaggatgactatggcttttcaggttctcagaaattggaaggagagttcaaacacccaattcctgcgtcttccatgccacagcaaataggcattcctaccagttctttaactcaagttgttcattctgcgggaaggcggtttatagtgagtcctgtgccagaaagccgattacgagaatcaaaagttttccccagtgaaataacagatacagttgctgcctctacagctcagagccctggaatgaacttgtctcactctgcatcatcccttagtctacaacaggccttttctgaacttagacgtgcccaaatgacagaaggatccaacacagcacctccaaactttagtcatacaggaccaacatttccagtagtacctccaaacttaagtagcattgctggagtcccaaccacagcagcaaccccgaaccggataggatccgagc

SEQ ID NO: 64557 - DNA, 590 bp, Homo Sapiens
tgtttccaagtactatcatagttctaggtagtatggtagatagataactggatactactatgcttaaactagtattctagaaactagtgtcttttcagacctatggtccaaaatgcttattatagtggggacaaatcaaacctcaaagttaacctttttttatccacaaaatagtatgatgagtgttcagaatagtggtacccaactacaaggtatatggtttattcttgcaagggatatgagatgatgtcacttcaatctggaaattttttgcagcagtcttctctattcacaggcccaactttttctatcctcaaaatcctattgccgatgctcagaacctttcccaggaaactcaaggttctctctttcatagtccaaatcctattgtccacagtcagacttctacaacctcctctgaacaaatgcagcctccaatgtttcactctcaaagtaccattgctgtgttacagggctcttcagttcctcaagaccagcagtcaaccaacatatttctttcccagagtcccatgaataataatcagactaacacagtagcccaagaagcattttttgcacccggaaccgtt

SEQ ID NO: 64558 - DNA, 612 bp, Homo Sapiens
atccctgccataagtacgtaagctgcgttcgagccagtgcggggctggaggctatctgtgcaagttcaccacgagtccagcggcaggagaacacttcgtggaagggctgctctactccctggatgaggctgtcattatgacaggggtcatgacagatgaggcagagcccagcaagctgaatagcattggcaattactacaagccgtggttctttaagcatgtggagaactatctgaagacaaaccgagagggcctggagtacattcccttgagacactactaccaccgccacacgcgcagcatcttctgggagctccaggacatcatcccctttgggaacaaccccatcttccgctacctctttggctggatggtgcctcccaagatctccctcctgaagctgaacccagggtgagaccctgcgcaagctgtacgagcagcaccacgtggtgcaggacatgctggcgcccatgaagtgcctgcagcaggccctgcacacccttcaaaacgacatccacgtgtaccccatctggctgtgaccgctcatactgcccagccagccaggcctagtgcaccccacaggaaatgaggcagagctctacatcgacattg

SEQ ID NO: 64559 - DNA, 519 bp, Homo Sapiens
actaccgttgcgtgcatgaacgagaccaggatcaaggagctcaggccaaacctctaatggagttgattgagaggctcgggggctggaacatcacaggtccctgggccaaggacaacttccaggacaccctgcaggtggtcaccgcccactaccgcacctcacccttcttctctgtctatgtcagtgccgattccaagaactccaacagcaacgtgatccaggtggaccagtctggcctgggcttaccctcgagagactattacctgaacaaaactgaaaacgagaaggtgctgaccggatatctgaactacatggtccagctggggaagctgctgggcggcggggacgaggaggccatccggccccagatgcagcagatcttggactttgagacggcactggccaacatcaccatcccacaggagaagcgccgtgatgaggagctcatctaccacaaagtgacggcagccgagctgcagaccttggcacccgccatcaactggttgccttttctcaaca

SEQ ID NO: 64560 - DNA, 358 bp, Homo Sapiens
gggcttttctgatgtggatcacacctatgctcaaagaactcagctctttgacaccttagtaaatttctttcctgacagcatgactcctcctaaaggcaacctggtagacctcatcacactgtaactgaagagtcactggacacagaaatggaaaacaggagtcgattttccgtcttttggattgcagctccactgactgacagtaaagctgcagtgattgaggactgcaccagagttctgaagggatcttaaccatcacaagtttttaccctcttccttcatgcctgacctcaaccccgctctcctcatcctattcctaaattaggctaataaagtgaaattggtatactttccagtt

SEQ ID NO: 64561 - DNA, 346 bp, Homo Sapiens
gctggcaatgatataaaaatcagtgtgaccaatgagcattccgagtcaactctgaacgtcatgtcgggtaagaagagccagccctccatgtacgggcagctccgagacatcgctattgacaacatctgcaggtgcctgaaggctggattgacggtggacccagtgattgtggaggcgttcttggccagcctgtccaaccggctctacatctctcaggagagcgacaaggacgctcacttgattcccgaccacacaatccgagccttgggacacattgcggtggccttgagggacaccccgaaggtcatggagcccattctgcagatcctacagcagaaattctgcc

SEQ ID NO: 64562 - DNA, 505 bp, Homo Sapiens
ccgagacgcgctggacaagcagtattactttactgttctttttggccatgaaggtcagaagccactggagctgcgctgtgaggaggagcaggatggtaaagagtggatggaggccattcaccaagccagttatgcagacattttgattgagagggaagtattaatgcagaagtacattcatctagttcagatcgtagagacagaaaaaattgcagctaaccaactccgacatcaacttgaagatcaagacacagaaatcgaaaggcttaaatcagagattattgctcttaataaaaccaaagaacgaatgcgaccttaccgaagcaaccaagatgacgaagatccagacatcaagaagattaaaaaggttcagagcttcatgcgaggatggttgtgcagaaggaaatggaagaccatcgtgcaggattacatttgttctcctcatgctgaaagtatgaggaagagaaaccagattgtgttcaccatggtggaggcagagtcagat

SEQ ID NO: 64563 - DNA, 499 bp, Homo Sapiens
tgggcaaggatttgggtgttatttccatttcagagggaggtcactgcgggggagctctgagcaggagtgaggtggcctggtttgcacattaggaagctcagtctggctgctgagtgctggcttagggacagtcaacacctagagcaatcagcagggtgcccgccacatggaagggtccagtcagcgctggctcccgttgttctgttatttccagatgtgatctgtctatggcagccagccctcggagtcattccaggtggcaggcagccccctccccagtgacgagggcctggtagaaagacaggtctgctgagctccttccccaggagctctgagtgggcgcttctcccttccccactctgctgtcaccaagagagcaaatggttcctcacccacctgggccggggatggatccgcacagaggacagaggggtgttttgtgtagagtagtcagagaaggcctttcccataagtgtagaaatgattttctaagcagcca

SEQ ID NO: 64564 - DNA, 906 bp, Homo Sapiens
  misc_feature (14)..(14): n is a, c, g, or t
  misc_feature (239)..(276): n is a, c, g, or t
cgactgtggtatanaacagtaaaatgatttaaaagtaagtcattccgtttttattaatttactgttaagtcatgttctcatgctcagatcagtagtgtcagccagagctttctctgcagacatgtaggaagtgggtagctatttttcccactccatgtattagagttttacaaaaaggcttacttttgagacaactgttgcattttggggtactaataaatgattgccgatgagttatnnnnnnnnnnnnnnnnnnnnnnnnnnnnnnnnnnnnnnggggcggggcgcgcctaaaaagtaccccctcaggggccccaaggttataccagtccccaggtttcttggttacaaagggggcgccccaatatagggaggccggtatatataataagcgcaagggaccacgggcgccgcgcgtttaacacaccgttcgggagcatgggggaaaacaacggcgcctacgcgtggggacacccttggggaagggacccctaactcttcgggcggtgggagcccatatttggcggaccaaccatccctcgacaggaagattataacggctccaagggagaacatatttaacactttcaccggggtgttcaaccgtgggtgtgttaacccccaccgggcggaaatattttgcgtggggcggttggaagagagttgcgggcccaaaccggagagttattgaattatctgcggacacctacattttttttctacccgcggggactttttctggatcatatatacgggctataggccagagatgcaccgacacataccagcacccagacgcacaattaacaacacgtgctagcgacacgatctgtattccgtcacaagacacacccacggcatatgccagctgcgttgctaaagcgaccacctcgagagacgcagcta

SEQ ID NO: 64565 - DNA, 633 bp, Homo Sapiens
gacgactgtaagtgagcccttcccaagtctccatcaactgaggaaggaggtgggagaggagcccgtgtccacttctcagttctctacctcccaccatggtctcccacactgtgttccggtgccagctctgcaagtacttctgctccacgaggaaggggatcgccaggcactaccgcatcaagcacaataatgtccgagcccagccagaaggcaagaacaacctcttcaagtgtgccctgtgtgcctacaccaaccccatccgcaaaggtctggcagcccactaccagaagcgccacgacattgatgcgtattacactcactgcttggcagcctccaggaccatcagcgacaagcccaacaaagtgatcatcccatccccgcccaaggacgactcccctcagctgagcgaggaactccggcgggcagtggagaagaaaaagtgctccttgtgctctttccagtcgttcagcaagaagggcatcgtgtcccattacatgaaacgccacccaggggtgttcccaaagaagcagcacgccagcaagttggggggctacttcacggccgtctatgcagatgagcatgagaagcccacactgatggaagaagaggagagaggcaactttgagaaagccg

SEQ ID NO: 64566 - DNA, 229 bp, Homo Sapiens
cagagtgcggtacaggacacgccagacattgtgtcacgcatcacgcagtacatcgcaggggccaactgtgcccaccagctccccatcgcagaggccatgctgacctacaagcagaagagccctgacgaagagtcctcccaaaagttcattccctttgtcggggttgtgaaggttggaattgtggagccatcctcggccacatcaggcgactcggacgacgcggcccccg

SEQ ID NO: 64567 - DNA, 286 bp, Homo Sapiens
gagtacatgtcggagctgctggagcccagcctgcttactggagagggtggctactacctgaccagcctctctgccagcctggccctgctgagtggcctgggtcaggcccacaccctcccactgagccccgtgcaggagctacggcgctccctcagcctctgggagcagcgccgcctgcctgccacccactgcttccagcacctcctccgagtagcctatcaggatcccagcagtggctgcacctccaagaccctggccgtgcccccagaggcctctagcggcgccc

SEQ ID NO: 64568 - DNA, 368 bp, Homo Sapiens
  misc_feature (243)..(244): n is a, c, g, or t
  misc_feature (302)..(302): n is a, c, g, or t
cttgtttctctttatggcttggcttcattccgacctggggtggggccacatccaacccactgcccactggctgtccgtctggcctgccccgcggttaccaaccacagtggtgaagcagcgcttgcagatgtacaactcgcagacaccggtcagcaatcagctgcatccggacggtgtggaggaccgaggggttgggggccttctaccggagctacaccacgcagctgcccatgaccatccccnnttccagtccatccacttcatcacctatgagttcctgcaggagcaggtcaacccccacncggacctacaacccgcagtcccacatcatctcaggcgggctggccggggccctcgccgcggccgct

SEQ ID NO: 64569 - DNA, 354 bp, Homo Sapiens
agaaagattttgttatggatgtcagggggaattgaaagaccaacatgttgatgtttgtgctgtgtgcctaaatgttttctgtgtggactgtgatgtttttgttcatgattctctacactgttgccctggctgtattcataagattccagctccttcaggtgtttgattccagcatgtagtatacattgtatgtgttaaaaagtaatttgcaactgtgtatataaggacttctttagaagaagcttcatttaatacatgaaaggataatctgacttatgtactttttgctaagtaaaggtaatattttattacattttaaatttgtgtgtcacagatataccagtatatcagggg

SEQ ID NO: 64570 - DNA, 454 bp, Homo Sapiens
tcgagctttggaccccggtcgccgctagaggcccaacacttccctcaaataaactcttctgcccagctcctgtccagctcacggcagccactgtcggcatgaaaattcctcaattcaagctctctaggcccaccttctgcctcccactggcctggacacgcccagctccaacctgacaatggtctctacaggcccagctcatcgggctctgagggacctctccaggccaagctcttacctcacggaggcttctccaggtcgtttctccctgtcttcaggcagtggtgacaggtcagctcctcctccacagtggcctcgtttgggcaggtcctgcctcttgcagcctctcaaagcccagctcctgcctctgagtggcttctgcgcacccaaatgtcctccagtcagcctgtcctggctgagctcctgcgacctggctgagctcctgcctcctgtc

SEQ ID NO: 64571 - DNA, 723 bp, Homo Sapiens
aggacccagtagcaccatggtcagcacttcagccttcccctgggaagagtttacatcctcagctgagggctcaggtgagcaactggtcacagtcagcagctctgttgttccagtgcttcccagtgctgtgcaaaagttttctggtacagcttcctccattatcgacgaaggattgggagaagtgggtactgtcattgaaattgatagaagatccaccattttaccaacagcagaagtggaaggtacgaaagctccagtagagaaggaggaagtaaaggtcagtggcacagtttcaacaaactttccccaaactatagagccagccaaattatggtctaggcaagaagtcaaccctgtaagacttgaatttgtaagtgaacctaccatcagaggaacatattcaagcagaaaagtcatttgaatcccctttagactctcctgcaacagaacaaacacttctttgattcacagacatttactgaaactgaactcaaaaccacagattattctgtactaacaacaaagaaaacttccagtgatgataatgaaatgaaggaggaagacacttctttagttaacatgtctactccagatccagatgcaaatggcttggaatcttacacaactctccctgaagctactgaaaagtcacattttttcttagctactgcattagtaactgaatctataccagctgaacatgtagtcacagattcaccaatc

SEQ ID NO: 64572 - DNA, 264 bp, Homo Sapiens
cttactgtggccatccggaggcccacggatgacagtaaccagcccccgggtcggggtgtcctctccatgcatggtctgacctatggggtcattcgtgtggactcggaagaggagctgtccgtgctcaccgtgcaggatgtcggcctcgtgatgcctggagccatcatgtgttcagtgaagccggacggggttcctcagctgtgcagaacggatgagatcggggagctgtgtgtgtgtgcagttgcgacgggcacgtcctactat

SEQ ID NO: 64573 - DNA, 570 bp, Homo Sapiens
tttattccattataatataaaaggattatgtatttttaactaaggtgagacattgatatatccttttgctacaagctatagctaatgtgctgagcttgtgccttggtgattgattgattgattgactgattgttttaactgattactgtagatcaacctgatgatttgtttgtttgaaattggcaggaaaaatgcagctttcaaatcattggggggagaaaaaggatgtctttcaggattattttaattaatttttttcataattgagacagaactgtttgttatgtaccataatgctaaataaaactgtggcacttttcaccataatttaatttagtggaaaaagaagacaatgctttccatattgtgataaggtaacatggggtttttctgggccagcctttagaacactgttagggtacatacgctaccttgatgaaagggaccttcgtgcaactgtagtcatcttaaaggcttctcatccactgtgcttcttaatgtgtaattaaagtgaggagaaattaaatactctgagggcgttttatataataaattcgtgaagaaatgtgt

SEQ ID NO: 64574 - DNA, 678 bp, Homo Sapiens
gtggttggtgtggagcgggcggccacagattgctacagtccaacaagaaatgtccacctctttcattactggagaaaaatgaaattttgttgggcaggaagtggtatttggcatgatacataatgtttgattctatgccatttggacccaattctgattacttacagaagaaggactgatacaaagaaagtgcatgaggcaatgtcagtattatctgacatctttcttttcaggtcatgtgtccctgaaaagttaaatgtaaaccagattttggtaaatcccatctttcagaagtgaagagggggctagaaggactctgagaagttggtagaagaaaactcccacttgtgaatatttttgtgagacataaattcttttattacgatttacctctaatttattacacttagtaaattcttccagatttttctattggtttgacacttccttaaagtaaggaatacacattgcttgcgagaactggttatgagacattggaatacttcttgctgctacatgtcatcttaattttggatggcatgggttttgtaaaacttattctgccccagccaaacttttttgaaaccttaaatagtctaccttaattcagcctagaagagtacattgatttactgatcttttttcatattcataatactaaatgttttagttttgttc

SEQ ID NO: 64575 - DNA, 1088 bp, Homo Sapiens
  misc_feature (281)..(281): n is a, c, g, or t
  misc_feature (397)..(397): n is a, c, g, or t
  misc_feature (439)..(440): n is a, c, g, or t
gccttgcaggcttttcaagagaactaaaacgcaattaacacatgtggggtcaagctgaaaaagaggtggttatgctgaagaatcggaccaagacaagtgtgttcccaataaaccaagaatggaattggagaagatgttgaaatgaatgaggagcaccagctttatctggcaagtgatgaaataccccagttccggaagaccctgaatcccgaggagtagaagtagatcaagctttgattaaggatactggcatcaagtttatagaagacattttttaaaancagctctaaaccatggtaacctttgtcgaagaggtttttattactacaaaaggcattttgtagattctgagttggaatgcaatgatgtggtcttgttttggcgtatacagcgcatngcttgctatcaccgcaaatactttagggcaacaacttacaannatactgagttttaggcgattagagaaaaatgttaaagaggtattggaagattttgctgaagatggtgagaagaagatttaaattgctttcttggtaaacgcgttcaaactggcgggagacctcaagaaagttagagaaattcaagaaaaacttgatgctttcattgaagctcttcatcaggagaaataaattaaaatcgtactcataatcagctctgcatacatctgaagaacaaaaacatcaacgtcttttgtccagcctctttttcttctgctgttccacctttctaaacatacaataaagtcatgggataaaaataatcgatgtatgttacgggcgctttaaccatcagctgcctctcgaatggaagaacagtggtaatggattaacatcctattttgttgtactaaagtgacaaatcggaataatataattggtatggccattaggttcagtccttgaagataagaagcttgttctctgtttgttgtcttatttgtggtggcactcgtttaatggattaactgaggttgctcaatgttcagtttcttttccagaaatacaatgctaggtgttttgaaataaaacttatatagcaattgtttaaagttatcaattgtatataaaatcacagtagcctgctaaaaa

SEQ ID NO: 64576 - DNA, 457 bp, Homo Sapiens
ccagtggggtggggggagggcaagctggatttacaggtcacggctggactgaatgggcctttttatcttcccactgtatcatggaagtagctgcttgcttgtactgtccatccttcaggcatccctaaagctcactctgaagatgttagagacaaacacaaactcttcgagttaaagttgatcctgacactgacatgaaggcaagccttgatttcgtatgaacgttgctgaagtggtaattgaggaaaacagttccccagattgttaagagttcactgaagatattgacacaattttaaaaaatcagtaaaggaatgtatataatattgctctcgtgttttacagtaagatttgttgctctcagactgtgtaaaacaaaatttattcatgttttctgcatattaaaaaatcttattgtaccaactggtaaactattaaatgcctataaaactagaaa

SEQ ID NO: 64577 - DNA, 472 bp, Homo Sapiens
gcggccgcggaagatgagcagcagctgctcagggctgagcagggtcctggtggccgtggtacagccctggtgtctgcctcctccccctgcccccaggcctggggcccccagggtccagtatgggcagccaggcaggtccgtgaagctgtgttgtcctggagtgactgccggggacccagtgtcctggtttcgggatggggagccaaagctgctccagggacctgactctgggctagggcatgaactggtcctggcccaggcagacagcactgatgagggcacctacatctgccagagttggagttctgctcaaggaacgtgtgtaatgtgtacatctgtgtccatgtgtgaccatgtgtctgtgaggcagggaacatgtattctctgcatgcatgtatgtaggtgcctggggagtgtgtgtgggtccttggctcttggcctttccccttgcaggggttgtgcaggtgtgaat

SEQ ID NO: 64578 - DNA, 566 bp, Homo Sapiens
  misc_feature (12)..(12): n is a, c, g, or t
aaactttcatcntaaataaccttttgatacttgaatatttgtaagttttatacatagtttctaatttttttccgaccagatccagatacctaataagatgctggaatgtaatccctggacaatccgtgtcctggcagcatttggtcttcctctaagcgcctggctccgctgttctcaggagtgggttctgaagtctctggagaacaggatacgtggagggttaggaaggggccaggcctagagacgggagactccctcccggagcaggtggaggcacaggaccattcgctaccccatctgccggcacctgcgggggagcccaggcattctttgtaagccctcctgaccacctggctcaaagaaaacagaagcatggaggccgccaagtattttcaagaaataaccccatgaacatggcatcacttttttagaaagaggggcttggggcaggcagaggagagaagggagcgcaaactgagagccaagtttccagacggtcctgcaggaggagaggatgcagctgcccagagggaagcaggatcacatttaaggaatgtcgtatactc

SEQ ID NO: 64579 - DNA, 566 bp, Homo Sapiens
  misc_feature (542)..(542): n is a, c, g, or t
gacgacgacttgctgttcgaggatgtgtacgagctgtgcgaggtgatcggaaagggtcccttcagtgttgtacgacgatgtatcaacagagaaactgggcaacaatttgctgtaaaaattgttgatgtagccaagttcacatcaagtccagggttaagtacagaagatctaaagcgggaagccagtatctgtcatatgctgaaacatccacacattgtagagttattggagacatatagctcagatggaatgctttacatggttttcgaatttatggatggagcagatctgtgttttgaaatcgtaaagcgagctgacgctggttttgtgtacagtgaagctgtagccagccattatatgagacagatactggaagctctacgctactgccatgataataacataattcacagggatgtgaagccccactgtgttctccttgcctcaaaagaaaactcggcacctgttaaacttggaggctttgggtagctattcattaggggagtctggacttgtagctgggagacgtgttggaacacctnattttatggcaccagaagtggtaa

SEQ ID NO: 64580 - DNA, 534 bp, Homo Sapiens
aataaaaaaattttggggcccacttttttgggagaaaacctttattcagggcggcccaaattccttttcacccgatatcaagcttgaaccttgcccttttaatcaattacccgaagagaccaaccaaaaatgtggcttgctttgttggcctttcctttgtactgggctctgtgcagggcatgtcacctgggctgtcactgtgtttagtaccagccccccccttaataggtgtggacgtcttcctgaacagcctgaagcagacggtggtgaccctggcaagcagcgcagacgtgctgagcagccgagcagtcggcctcccaggccatgctgcagagcggctggtccatgctgttgcccaccgctgagaagcaggcccgggcactctgctctcctgccctgcggagtttcaggcaatgaagtgagcataagtccaggtcatcgattggtgattgatcttctggtgggcagcttgatggctgatggagggttggagtcagccttacacgcagccattactgcagagatccaggatac

SEQ ID NO: 64581 - DNA, 448 bp, Homo Sapiens
caactgcccaaccatcatggtccaaggctgtccctggtggcaaggtcaaacatcatgcaagtacctgtttctggaacacagggtttgcagcaaatacagttggtcccacctggacagatccagatccagggtggacaggctgtgcaggtgcagggccagcagggccagacccagcagatcatcatccagcagccccagacggctgtcactgctggccagactcatgacacagccagcaagatttctgtccagggacagcaagtggcacagactgctgaagggcagaccatcgtctatcaaccagttaatgcagatggcaccattctccagcaaggtaagtgtacccataagcttccctaggactttttggggcaacttttttgtcccttagacaactgacatctttagaatttgagtggtgaacttgacactacatattttttggaca

SEQ ID NO: 64582 - DNA, 531 bp, Homo Sapiens
  misc_feature (241)..(241): n is a, c, g, or t
acaaattctgtcaagctctaaatccatttttgtgtagggagaataatgtctagtaatgtggaagaatagctatcattcctgtctctgtggcacccgatcaatggcttaaatctgtcgtttttgatattcaggtttcctcaatttagccttagtgaaggaggggttgtacacactgccatttttgtattttaaaggaaaaatgactttcattcccaactgattatgacctttcaggatgtcngtcaagtgatgctttcagttgtaacacgtgacttggtgctgtccctgctggtctaagtagaactgtagattcatatgggctggtgttcctgtgcgctgtgggtgtggtgattcagcctggcatttctaccataagtttttggtctgctgatttgctgccctgtcttctcttactttactttatcaatacctggcaaactgaccagaattaccttcctcatggcaaagggggattatggtgaattgttgttcttatagtctgtttcatgaagcacaagtacaatttcatac

SEQ ID NO: 64583 - DNA, 887 bp, Homo Sapiens
tgtggaccagcctgtggttacacaacaaataaatccacacccatgccctcaaacacaaccccagagcccgcccccacccccacagtggtgaccaccaccaaggcacaagccatgggagccaactgccatgcccatgtgccatgtacctcacaccatgcccaatccctgagatggagtgccatgtcccccactgacacagccaagccccatgccatatacccagagggcctgctgggccaggcacatcccaggcacctggagcaggtagagactgaagccacaccaggtactgattccactggtgccaacacccagtgagctcagggggcactaagatgccagccacggactcgtgccagcccagcacccaaggccagtacatggtggtcaccactgagcccctcacccaggccgtggtagacaaaactctccttctggtggtgctgttactcggggtgacccttttcatcacagtcttggttttgtttgccctgcaggcctatgagagctacaagaagaaggactacacccaggtggactacttaatcaacgggatgtatgcggactcagaaatgtgaggggggcgggggcctggcgggaggcctggccccttcctcgtcctttccttttgcctttgagaccaaaccaagtgcttccaaattcttttggtgcaattgaggagatatgccagatgcttaaacacatttaattgctgtcagattaattccatgatcactaaagagttgctgcttttttcatatttatttttgtaaatgattctgtgcccaggagcagctgggggttccacctcagggtggggcgggcaggaccccgtctccccaggtgtcggagcctgacctgaattaaagtactgactgctcgccaaa

SEQ ID NO: 64584 - DNA, 480 bp, Homo Sapiens
  misc_feature (123)..(145): n is a, c, g, or t
tattgtgccttacctgtgtgcttttgtgggcaccttgtttatgaagaataaaaaatgatttgttatctgaagagaataaattttaaattctcagtttatgtctcagatgctaacgtgtgaaannnnnnnnnnnnnnnnnnnnnnnagtaaccagtcttcctgtattttatgtgcatcatagtgatttatctgagcttagtgacccccatcttgtaacctgttgcaagagtgaatgtaaaaaatagttgtggcattttaaaaggtcgcctttgatgcagatgcatctttttcttgcttctaaaacatatttcatgtaaacattgtacatttattattgtaatatatactattatgcagcttattttacctgaaactgttaagccgaccaagatccctccctgcaagacagatgggaatgtgtataataactaggtatttgagaagttctgaagtttgatgtaatctgttacttgtcctgtt

SEQ ID NO: 64585 - DNA, 589 bp, Homo Sapiens
tccaggaggagatatgtgaagtagaaagggtgactgaacatgggacaccaaagcccctttcgaaagtttgacagtgtagcttttggagaaagtcaaagtgaggatgaacaatttgaaaatgacttagagacagatccacccaactggcagcagcttgttagtcgagaagtgttactggggactaaaaccttgtgaaatcaaaagacaggaagtgattaatgaattgttctacactgaaggagctcatgttcgaacactgaaggttcttgatcaagtgttctatcagcgagtatccagagaaggaattctgtcaccctcagagctacggaaaattttttcaaacttggaagatattcttcaacttcatattggattgaatgaacaaatgaaggctgttcgaaagagaaatgagacctctggttatcgatcagattggggaagatttgctgacatggttcagcggaccaggagaggagaacttgaaacatgctgctgctaccttttgcagtaaccaacctttcgccctgtaaatgatcaaatctcgtcacgaaaaggattctcgatctgtcctggtgaaggatcctctagg

SEQ ID NO: 64586 - DNA, 399 bp, Homo Sapiens
  misc_feature (211)..(279): n is a, c, g, or t
  misc_feature (325)..(325): n is a, c, g, or t
  misc_feature (344)..(345): n is a, c, g, or t
tgatgaccttggttaatgttttttcataggctctgtttcataggctttgttttttcataggctctccctcattgcattgttctgagaattgaatgtggctgcttgcatggtaatgaggggttcaacggaggctgttggtggtagtgataatacaagctgaaaaactacacagacaaacctatcagtttctgcctcttcaggatataactannnnnnnnnnnnnnnnnnnnnnnnnnnnnnnnnnnnnnnnnnnnnnnnnnnnnnnnnnnnnnnnnnnnngacctaatatgactttcttttagtgttcttaggatttttaattgtnaaacatgtaacaaattttnncttactacaatgtgcacctcagtggcattatttacgatgttacgcaaccactat

SEQ ID NO: 64587 - DNA, 513 bp, Homo Sapiens
tgcagattgttttttgctctcgctctcaagcttctcagccttgcttactgcttcaaagacatgagtttgtaaggacagtagcagcccaaagactggcatctgtagacacatctggatcttccgtttgatctcagtgttctagtaacggaccctcggtaatcccttcctggtcatcacagcacgatgctgcttcccctctagagagtgtgaggggggcttcggcttcactcttgacagcgcttgctttgtatttcctgggttgctcttctgtcccacattggctcattgccatctgtcccttgtccatgcttccttacaaagtggacctttttcctccgcctcttccctgttcagatgctcctcgacttaaaatggggttacatcccaataaacccatcgtaagttgaaaaatagcgtgtcaaaactgcatctcatacacctaacctagcaaacgtcatggtctcgctgaccttgaacacactcagaacacatacattagcctacggctgggca

SEQ ID NO: 64588 - DNA, 500 bp, Homo Sapiens
aggaatgctgttgagaacccgtcgggaatcgccgccgcaatctgagggagttaccgtgaaacccacctttaatcggtgggaaactgcagtcgccgtgggcggctctggcgcccacgaaaacgggaagccttctaaatctttaggttgggctgcattgccctggagccgcactcttgagtccgagcccatcttttgttggagaatccgtctgcgttggcgttttcccgaggttgggctgtacagtgtctccgtccgcggaaaaagaagcctctgaacccgggccggcccgcagcccccgtcgtttccggccgctgctcgccgtcgcccagaggctaggccacgttttcccccagtgccgaggtgtttctgtgacccctccctccactcccattcccttctgaaagggcacctgctcttggtgagaaaagaaattatagcacgaagagccagtatcagaagagtatccatcacccgcagcaaccgctcagggaacaccatca

SEQ ID NO: 64589 - DNA, 359 bp, Homo Sapiens
ggaaagtcaactttgctgaattgcctgttcctccaggatttccccccatcgctggcctggagtccactatgggtgttgaggaggacgcagtggcagcgacattggcagctgcagagaaactggcctctgcagaggatttagccccggctgataaagacgaggacgagcctcctgggcacctgcagggtgagcccccagcacaggccccagtggccaagaaacctgcacggcccacagtcccttcatcccagcgcctgcctgagcccagggcctcaagttctaaggagtcaccgagtccatctgtgcgggagcagctggcactgctggaggaacaggcaattcagcatagttgactttcc

SEQ ID NO: 64590 - DNA, 379 bp, Homo Sapiens
ctcacagagcgcccgagggtgcctggatgaggagagcagcagggccctgtcggcaccaagggccgacgccaagggctacagtgacccctagcacaggggagccggccagctacggcgagctccagcagcggtgccggcccgaccagctgaccgggctgagcctgctgccgctctcagaaaaggctgctcgggcccggcaggaggagctctactcagagctgcaggcccgtgagacctttgaaaagaccccggttgaggtccccgtgggtggcttcaagggcaggacggtgacggtgtgggagctcatcagctctgagtacttcactgcggagcagcggcaggagctgttgcgtcagttccgcacgggcgcatctgtgag

SEQ ID NO: 64591 - DNA, 339 bp, Homo Sapiens
cctcacagactgtgcccgccggggcctctctctactccatcttgccacagttgtctgagaagccagaaaaagtttccagaactggcagcccttaagaaaaaatgaagaggaagagaagaaatgggagcaggcagccctcgtcagcagaccgggagccgcgtgggcgcggagccatttgcattccggtctgcgggggctcggggatgctggtgacaggccccgtttcccggtggctcgccccacacctgcgggacgtcgggaaggatcccttccatctctcagccgcagaggagtccctggcagcgccccggctgtaaccatgcaaccccgaggagtccc

SEQ ID NO: 64592 - DNA, 1442 bp, Homo Sapiens
tggaccggtccggaattcccgggatcgcgcacctgcagcgcccgctgctcggccctgcatcctgcctgggcatcctgcgcccggccatgacggcgcactcattcgccctcccggtcatcatcttcaccacgttctggggcctcgtcggcatcgccgggccctggttcgtgccgaagggacccaaccgcggagtgatcatcaccatgctggtcgccaccgccgtctgctgttacctcttctggctcatcgccatcctggcgcagctgaaccccctgttcgggccccagctgaagaatgagaccatctggtacgtgcgcttcctgtgggagtgacccgccgcccccgacccaggtgcccagctctcggaatgactgtggctccactgtccctgacaaccccttcgtccggaccctcccccacacaactatgtctggtcaccagctccctcctgctggcacccagagacccggacccgcagggcctgcctggttcctggaagtcttcccagtcttcccagccagcccgggccctggggagccctgggcacagcagcggccgaggggatgtcctgctccaatacccgcactgctctggagtttgccctctttcccaaggagatgctgctggggagctggtatgggtggggtctttccctttacagacggggcagatgccaggactcagcccatcctgaggaggacacgtgtcctcatggagagggtgctccggcccaggcgggggagtcggtgcccagtcagcagctctgccaccatcctgctgggaactgggggggccctctatttggttataggccaaggccttttctctggcatggaattggttaattttctgacacgtcctagatgtgaaaatttctgaaaatgttgaagcagagaaacattcacacacaaaaagcaacatagtcatgtgggtccagatggcctcagtcctagatgttggcaccctttgctgtgtctcctcagagtatcctgttccgcctcctgccacctggacctccctcagtggatgtcttccctcccccgaccccagcctgtcagtccgagcacagtgcaggtttggctctgacttgggcttttggctgcagtgggggtggatttcagagcctctcatggcagcatctaagtgaccagagctgggatgagcagaggggaaggggcaatgtgagtggcgctatgggacggggccagccctgctcctgagccagcccgccctctgccccctggccctgggctctgtgctagggatgggcgaagaatgggggccgtgccagagtgggcagggacgtgggaaagcaaacacgcaaggggtcccggagcctcaccagccttgcccttcacgctaccgcgagctcccaggtggttagcacaagagctcaacccacttgcttggctccccaacggggcctggcctcactggtggtc

SEQ ID NO: 64593 - DNA, 529 bp, Homo Sapiens
aacgacccctttgggatttggcccggggcccagaattcggcacgggcggcacgaggcagctgaggctttacaggaaaaattatgtcagatgtcatgggtggcaaacatttttacaagcccttgactacttcctcaaaatgttctttggctctgcagcgctcggcactctcactggcttaatttctgcattagtgctgaagcatattgacttgaggaaaacgccttccttggagtttggcatgatgatcatttttgcttatctgccttatgggcttgcagaaggaatctcactctcaggcatcatggccatctacagttgtgccattccccagccactgccttcatgctgcccccgccggactggcagagccaggggtcagccacctgcctttgagtcatcaagatgcctctgcagccacaattctgacctaagtggcagggcccagaaatcctgaaaacctcccgctgccttttgtgatacttcctgtgctccctcagagagaaacggagtgaccttttgtcctttaaa

SEQ ID NO: 64594 - DNA, 336 bp, Homo Sapiens
gccctgctggccacgcaggggccagactccagcctgtttccccagccctgcaggtcttccttctgtgggaagcttcctagcaagatggcttggagtcctggtccccctcctccctggccctctcgttcgtttctgtttctgtttacacgttggagtggggtcctccgtgggcggcggcgcgccctgccccgggtgtcgtccggcctcttgtgctcgagcccctttccgagttggactcgaccatccctcaccccaccaaggaccacactgtgaagtgataactgccttgaacccccctttgctgttttatttattaaacttgatttgaagcccaaa

SEQ ID NO: 64595 - DNA, 414 bp, Homo Sapiens
tgtaaggtgggctcggtggtggccgtggtctggatccgctcccgcaaggctgtggactggcgcctctttcggaacatctttgtggcctggttcgtgaccgtccctgtggctgggctgttcagcgctgctgtcatggctcttctcatgtatgggatcctttccatatgtgtgatttgtcttcttccagctgcaaacagctaaagggatggtctggtgttggcgtgtggaagacatgtgtgctcgtgccgcacatacacatcctggccgtgcacggctctctcatgaccagctctctgcctcccttccaggaggctccatcccacactgttcacccaggctgcggagactcaccttcccgagctaacttaactactgtacataataatatgtattaaactggtatcgtggtgatat

SEQ ID NO: 64596 - DNA, 683 bp, Homo Sapiens
tgtggagtggagcctcatcgaggggcgctgggttaggggagcacctgtttcagactgggcatgaagaagggagcacagcagctactagaccccattagcacctcagcccacaagccagccaggggcccagtaagatggaggcaccccccagcaccctccagattgagagcaaggtagaggaaggagtcccagcctctgggcagaccagaggcccagagggagagagtagcagaaggcttttgatttttctcttgcctgaggcttgaatctgacaaacccttggtgggcactgctcccttaggttcttccccacctcaatctacctgcctagagtagcagctcccagacccagttctgggactgaaggttaacccttcacctgctgtcccttcttaacacccaggcccccagagccagctgggcctgtccagcagccacctgtgggtatttatgagtttcatatgaagtactgtgccccttcccttcctcatcccgaccctgcccgagcttcctgaaggtcctcactgtttgcatatcgctcaggccacctccaaaccccacctaggttttataatgtatattatatatttttttgtgtatttttaaaatccagctgtgatgggttatatcataaatgcagcttggggttggagcagggccctcaaaggcccagctcctgctca

SEQ ID NO: 64597 - DNA, 482 bp, Homo Sapiens
tatccgtcttcgggcttacgcttcgggactccccggcaagaatgaccgcggcctggatcttcacgggcttctggcgttcatccagctgcagcaatgcgctcaggatcgctgcaacgccaagctcaacctcacctcgcgggcgctcgacccggcaggtaatgagagtgcatacccgcccaacggcgtggagtgctacagctgtgtgggcctgagccgggaggcgtgccagggtacatcgccgccggtcgtgagctgctacaacgccagcgatcatgtctacaagggctgcttcgacggcaacgtcaccttgacggcagctaatgtgactgtgtccttgcctgtccggggctgtgtccaggatgaattctgcactcgggatggagtaacaggcccagggttcacgctcagtggctcctgttgccaggggtcccgctgtaactctgacctccgcaacaagacctacttctcccctcgatccaacc

SEQ ID NO: 64598 - DNA, 693 bp, Homo Sapiens
agaagacgacagaatggggtcctgctcacagcatcacttttaaacttctgggaatccgcccacaactgccacaagtcacgattgaagcccagccacccaaagtttctgaggggaaggatgttcttctacttgtccacaatttgccccagaatcttgctggctacatttggtacaaagggcaaatgacatacctctaccattacattacatcatatgtagtagaccggtcaaagaattatatatgggcctgcatacagtggaagagaaagagtatattccaatgcatccctgctgatccagaatgtcacgcaggaggatgcaggatcctacaccttacacatcataaagcgacgcgatgggactggaggagtaactggacatttcaccttcaccttacacctggagactcccaagccctccatctccagcagcaacttaaatcccagggaggccatggaggctgtgatcttaacctgtgatcctgcgactccagccgcaagctaccagtggtggatgaatggtcagagcctccctatgactcacaggttgcagttgtccaaaaccaacaggaccctctttctatttggtgtcacaaagtatattgcagggccctatgaatgtgacatacggaacccagtgagtgccagccgcagtgacccagtcacctgatctcctcccgaagctgcccaagcc

SEQ ID NO: 64599 - DNA, 269 bp, Homo Sapiens
gtttgtgtgtgtgtttgttttgggacaattttagatacctgagtgcactttttcagttagtcctaacttttaaaagaaggaaaaccaagagacatatctggtgtacgtgttgcagtatgaactctggttgcaatccctccccctcccacactgccccccatttgagtacgccgcacaagtcaaacgctaggaagtttgaataaaaccaatttttctaacttgttgctcatttgttgtaactcaataaagcaaagactcaacatttttat

SEQ ID NO: 64600 - DNA, 435 bp, Homo Sapiens
ggcgcggaaaactagtctctttcattatcatccacttccaatttgaaggagttgggcagctaactattggttacaacggcagtcttgagggttagaagtattacttccttttgcggtttccatacctagcttgtgactgaaagttttagaaaaaggaagtacatctatagccgaattgataaggttattactgtgttgttgcacaaagtatattagcaaaagtatttgctggaattattggtagatggcagtcccactcctacacctgctttgtcagatacagctgggttccctggctgactctgtaccttacttacactacttacttaatagaaacacaaacttggaaattgtgccagtggtccagctggagcacaacgtttggtgaatatgctgtttcctcatgttcagagaggtagctactaggttttcgcc

SEQ ID NO: 64601 - DNA, 391 bp, Homo Sapiens
gggccgaaaacctagtggctctgatggcactgctctgtgggtgacccacaggaaaaggtggctgaggaggctgcagagggcattcactccctgctgcatatcaccctgaggctgaagtatatcactcatgacaagaaagatcagcaaaacttgaaaagagcattgacaaaatgtcgagaattcctggagctccacagctctgccgctaaatgcttctacaactgtcccttcagaattgcccaggtctttgaaggttttcttgattcaaatgagctctgccagtttataatgactacatttgataccctgaaaaacctgaaacatccctgcatccagcgatcagcaggagaattactgctaactttggcgaagaatacagagtcccaatttg

SEQ ID NO: 64602 - DNA, 946 bp, Homo Sapiens
accagaatggaaatctgcagaggcctccgcagtcacctaatcactctcctcctcttcctgttccattcagagacgatctgccgaccctctgggagaaaatccagcaagatgcaagccttcagaatctgggatgttaaccagaagaccttctatctgaggaacaaccaactagttgctggatacttgcaaggaccaaatgtcaatttagaagaaaagatagatgtggtacccattgagcctcatgctctgttcttgggaatccatggagggaagatgtgcctgtcctgtgtcaagtctggtgatgagaccagactccagctggaggcagttaacatcactgacctgagcgagaacagaaagcaggacaagcgcttcgccttcatccgctcagacagcggcccaccaccagttttgagtctgccgcctgccccggttggttcctctgcacagcgatggaagctgaccagcccgtcagcctcaccaatatgcctgacgaaggcgtcatggtcaccaaattctacttccaggaggacgagtagtactgcccaggcctgcctgttcccattcttgcatggcaaggactgcagggactgccagtccccctgccgcagggctcccggctatgggggcactgaggaccagccattgagggtggaccctcagaaggcgtcacaagaacctggtcacaggactctgcctcctcttcaactgaccagcctccatgctgcctccagaatggtctttgtaatgtgtgaatcagagcacagcagcccctgcacaaagcccttccatgtcgcctctgcattcaggatcaaaccccgaccacctgcccaacctgctctcctcttgccactgggtcttccttcttcattccaccttcccatgccctggatgcatcaggccacttgatgacccccaaccaagtggctccgacaccctgttttac

SEQ ID NO: 64603 - DNA, 485 bp, Homo Sapiens
  misc_feature (36)..(36): n is a, c, g, or t
gggtgtggtccggaatagagacaccctcatcaaccncaagggctcgttccctgcgaggtaccggtggcgcggtgacccggaggacggggtccagtttcccctggactacaactactcggccttcttcctggtggacgacggcacacacggctgcctggggggcgagaaccgcttccgcttgcgcctggagtcctacatctcacagcggaagacgggcgtgggagggactggaattgacatccctgtcctgctcctcctgattgatggtgatgagaagatgttgacgcgaatagagaacgccacccaggctcagctcccatgtctcctcgtggctggctcagggggagctgcggactgcctggcggagaccctggaggacactctggccccagcggagtgggtgagccaggcaaggcgttgcccgagatcgaatcaggcgtttctttcccaacaggggaccttgatgctcctgcaaccaagagccc

SEQ ID NO: 64604 - DNA, 723 bp, Homo Sapiens
ggatttcgggatccctatggaggccgccaggaccgctgtactccgggtgaagcggaagcgcagtgcggagccggcggaggctcttgtgctcgcttgtaaacgcctccggagcgacgcggtcgagtcagcggcacagaagacgtcggagggtttggagagagcggcggagaataatgtcttccacttggtggccactgtgtgctcccaggaggaaccagtccagcctctcctgcgggaagttctgcgcccgtcacgggacagccagcagcgtgtccgccgtaatctccgcgcctcggctcgggaggtccggcaggagggccgctaccgggtgctttccagccgccgatccttggggaccacctcgagcggccaggagtccgagtacacgccggggaacccagaagccgccgggaactcgggctttcagttgttagaccttgtccacgaggagggagaacctgaagccgcctctgcaggctcctgcaaaacatctgacccagatgtgatcctctgcaattctgtagagttgatccgtgagcgattgactgtgtctgaggatggaccaggagtcaggcgccaggaagaacaacgacacgatgatctactagtgtatgacatttaactaactgtaggagaacggccacctccaggctaggacttgagaacatccttctccgtgcatgcctgcaatccaatgagccgggatcctctaagagtaacttt

SEQ ID NO: 64605 - DNA, 409 bp, Homo Sapiens
ggccccaaaacagagagcaagacagttgtccagagaatttagatatgagttaagagctgccagatttattttaaggcatgtagagaatctcataatctatgtgaaagtcacttgccaaaaaggttttggttatgaaagtgaatgttatatatttaatattaagtgaacctcccgtgccttttaaaaaataccaacattatgaaatttaaaagcttaaatatatttgcctagttgataaagaggctgtggaacaactgaaggagaactttcagaccctaaaacagttatattacttagatgttaaaattttctagtgggctgtgcaattgctgggttgtcccccgaaacatattttaatatgttatttaaaatgattttacccaagcctaagtattaaagtatatgtgca

SEQ ID NO: 64606 - DNA, 408 bp, Homo Sapiens
  misc_feature (251)..(261): n is a, c, g, or t
caaggaggagccctcgtccgccgggagcggggcggcgtcgcctttcgcggccgcgaaaggtgagccggcagccgccgctgcccccgaggccggggccagcccggtagagaaggaggcccccgcggaaggcgaggctgccgagcccggctcgcccacggccgcggagggagaggccgcgtcggccgcctcctcgacttcttcgcccaaggccgaggacggggccacgccctcgcccagcaacgagaccccgnnnnnnnnnnngaagcgcttttccttcaagaagtctttcaagctgagcggcttctccttcaagaagaacaagaaggaggctggagaaggcggtgaggctgaggcgcccgctggcgaaggcggcaaggacgaggcggccgggggcgcagctgcggccgc

SEQ ID NO: 64607 - DNA, 626 bp, Homo Sapiens
  misc_feature (32)..(32): n is a, c, g, or t
  misc_feature (53)..(53): n is a, c, g, or t
  misc_feature (104)..(104): n is a, c, g, or t
  misc_feature (189)..(189): n is a, c, g, or t
  misc_feature (350)..(350): n is a, c, g, or t
  misc_feature (470)..(470): n is a, c, g, or t
agcttaaaggagcttggctccatgggcatggnaaaccttgctcaagtgccatnttcaattcagcgagaagctcaattcctggcgcttaacgaggagaagctggncctcttcacggcggtggtgcttgtctctgcagaaccgttcgggcatggaagaattccgcttcggtggagcagctccaggaagaanctgctgcgggctcttcgggctctggtgctgaagaaccggcccttggagacttcccgcttcaccaagctgctgctcaagctgccggactgcggaccctgaacaacatgcattccgagaagctgctgctccttccgggtggacgcccagtgacccgcccggcngccttctgccgctgcccccttgtacagaatcgaactctgcacttctctctcctttacgagacgaaaaggaaaagcaaaccagaatcttatttatattgttataaaatattccaagatganctctggccccctgagccttcttgtaaatacctgcctccctcccccatcaccgaacttcccctcctcccctatttaaaccactctgtctcccccacaaccctcccctggccctctgatttgttctgttcctgtctcaaatccaatagttcacagcta

SEQ ID NO: 64608 - DNA, 922 bp, Homo Sapiens
actcctagagtatcccgatcttggcacctgcgtcgcactcttgtctggatgacctggtgaatgacgtgctgagctaactgcacacatccagcaccgagattgtagcggtaaatttgagcggatccggaatgatcgggaggtgctcagggtcatcttcccaacctgtcagtacagcaaggtcgtgactcctgtaacctgccgcggatgatctggaatgctcagaaaatcttccacatcaacccacgccttccctccgacctgcaccccatcaaagtggtggagggagtcaaggaattgagcaagaagctggtgattgtgaatggggatgacccactaagtcgacaggcccaggaaaatgccacgctgctcttcaacatccacctgcggtccacgttgtgttcccgccgcatggcagaggagtttcggctcagtggggaaggccttcgactggctgcttggggagattgagtccaagttcaaccaagccattgcgcatcccggggaaatggtgggggctctggctgcgcagtcccttggagaactctgccacccaagatgaccttgaataccttccactatgcatggtgtgtctgccaagaatgtgacgctgggtgtgccccgacttaaggaggtcatcgacatttccaagaagccaaaagactccttcgcttactgtcttcctgttgggccagtccgctcgagatgctgagagagccaaggatattctgtgccgtctggagcatacaacgttgaggaaggtgactgccagtacacagccatctactatgaccccatcccccagagcacggtggtgtcagaggatcaggaatgggtgaatgtctactatgtaatgcctgactttgatgtggcccgaatctccacctgctgttaagggtggaggtgatcagatcacaatccataa

SEQ ID NO: 64609 - DNA, 391 bp, Homo Sapiens
aaggctctggataaggggaggggggtggcctttcatttggggtgccctttcactcgcaggccaagccctggagcaatcttcttcaggcagctgtctccacctccaggatgtcccagcaggctgcaaggagaaggatgccagccacccatcctcccccagttcccagcctttcgccctgttggtcacagccgcttctgtctttttccggtctactgtccccagtgtagagggctttgctgtccctgagactgaggcaggttccttttccaggtcagaggtggaggtagatctttctctcaaccacatctgcctccacacacagctcctccgcagggaaggagaagctgctctgtaactcattctggctatcgtcccctccttccagagcgtt

SEQ ID NO: 64610 - DNA, 683 bp, Homo Sapiens
aaatgtttgaattgcattgaattagagcatacctcagtctaagtaacacatctcaaggcatgtagggtatctatctatgttcagtgcgggcctcacgttaattgaccagccttatgaacaatggcggctgtggcatgcgtaaggttacctgccttgatatgggatcgtgacaggcccctccctatgtgcaggagacaagcagcccaagaaacaggagaaaaacccagtgttggtgtccccagagtttgtggatgaagctctgtgtgcgtgcgaggagtaccttagcaacttggcccacatggacatcgacaaggacctggaggccccgctgtacctcacccccgagggctggtccctcttcctccagcgctactaccaagtggtccagtgagtcccctgcagctgggactttgggctgtgggcaggtgcttagggatagaccctttctgtctcgtgcagcccctaccccttccccaagcctcccgctcgtttaccccgctgttctgctcaggaaccctcgaggactcccactgcctccgtgatagggtctgggccacttttcttggttcttggcatagcatagtcactaagagcatggactgtgccaccaaatggacagcacattacccaaagtgtgtgttgtgtggatgttaattctacaggaagtaaatagattttatgaa

SEQ ID NO: 64611 - DNA, 509 bp, Homo Sapiens
  misc_feature (442)..(442): n is a, c, g, or t
tgaaaaatcaagttatcaaaagtgtaacagccattccactactagttctttctccattgaaatggaaaaggttggagatcaagagcttcctgatcaagatgagatggacctatcagattggctagtgactccccaggaatcccataagctgcggaagcctgagaatggcagtcgtgaaaccagtgagaagtttaagctcttattccagtcctataatgtgaatgattggcttgtcaagactgactcctgtaccaactgtcagggaaaccagcccaaaggtgtggagattgaaaacctgggcaatctgaagtgcctgaaatgaccacttggaggccaagaaaccattgtccacccccagcatggttacagaggattggcttgtccagaaccatcaggacccatgtaaggtagaggaggtgttcagagcccatgagccctgcancaagcttttgcagagtgtgtgttgtgatgagaattgtgagaaggaggctctgtataaatggcttctg

SEQ ID NO: 64612 - DNA, 571 bp, Homo Sapiens
atctgtggatgaaatgaatcatgattttcaagctcttgcattagaatctcggggaatgggagagcttttgcctaccaaaaagttttgggaacctgatgattcaacaaaagatggacaaaaaggcatatttcttggggatgatgaatggagagagactgcatggggagcttctcaccattcaatgtcccagcctattatggtacagagaagatctggacagggttttcatggaaacagtgaagtaaatgcaatactgtctccgcgatcagaaagtggaggccttggtgtgagcatggtagaatatgtattaagttcttctcctgctgataaattggattctcgatttaggaagggaaattttggcactagagatgctgaaacagatggacctgagaaaggagatcaaaaaggcaaggcttctccatttgaggaggaccaaaaacagagatcttaaacaaggagatgatgatgattctaaaataaattggcagaggtttgccaaatggaatggatgccgattggcaaagattttaatcgtactcctggaagtcgtcaagcctctccaactgaa

SEQ ID NO: 64613 - DNA, 442 bp, Homo Sapiens
tgagccaccgcgcccagccaaaccttactatttttttaaagaattttttccagagtttaatttctgacatagcttaagttttccagtaactctaaactccatctcctttatcgtcattaagtcattcacaaaaagccaggagaagcatttggaaagggcatgataatcagtataataatttgccttgtgtggtcagcacttaactgtttacaaagccctttcacatgcacagcaggtgggacctgcgcggtgtgggctgggcctgtgctggaagcatatcccgtgaaaagtgttagtgccttaggtgaaagcaacatgtatccctttagactactaacggtatatgttgttcttatgtatttgtatttatttctattttttctatgtttatgtcatatttaaacgatatcctactgcttgttggtattaccctaaactgttt

SEQ ID NO: 64614 - DNA, 395 bp, Homo Sapiens
ttaaggaggtgtgcactgtgatggcccggcgggcagcccagctctgtggcgcaggcatggccgctgtggtggacaggatacgagaaaaccgtgggctggacgctctgaaagtgacagtagggtttggatgggaccctcgtacaagctacatcctcactttgccataagttatgcactgagacagtgaaggacgctggctccggaaatgggtgatgtgtctttcctgcagtcagaggatggcagcgggaagggggcggcgctcatacactgctgtggcctgccgcatccgtgaggctggacagcgatagaacgcctgaaatcggaagggacttcctctttctctccttcttccctgattttgaattataaagataccatcccacttttcagagctt

SEQ ID NO: 64615 - DNA, 918 bp, Homo Sapiens
  misc_feature (22)..(22): n is a, c, g, or t
  misc_feature (745)..(758): n is a, c, g, or t
attctgctacgaaggatggagnatgctgtctggcgtcataacttgtagaaggatcgattagaatatataattgtgtagcttcaagatcagctgactgtgctattgtataatgatttaagatcgagcgaagagttaactgcccatctcaccagccagtggccttctgcaggagctctgtatgtcaatgctgttgccttggatacgttgctttaccgaagacgcaatagacagtggtatgagaagagttttcacagtcttgaccagttatcagcagtagtttgcctttctcagacttcactagatccaggccagtcacaagaagtagatggaacacaagacacattgaatgtaatgagtgaaggtaaggaagatactccgtcattacttggcctctgtggatctctaacgtcagtggcaagttacaagtctctaacgagcttagaatctaatgactcccttgccagtcctccaacaagagatggcaagtccaggcctagctccatcctgaaaatttttgtgtaaaagccacaactttttatgttgtaaatgtttaatttacatgtttgactgctgggaagacctttgaaattttatattgttctggtacatgtctgaaattctattgcttggagagaatcccctccagataggagattttgagtgaaaaccataatgttccggccatttttcatttttacaattcttacatttgtcattgagaaagttcccaatggaataggctttnnnnnnnnnnnnnnctttcaaagatccgccaaatcattcatagcaaattgtacatattgttcagctgatttttatatatttaaatacaccttagtggccagagactgacttcaaggttttattccagagactccagagacttaagctaagtattttttcattcatacagatttt

SEQ ID NO: 64616 - DNA, 1011 bp, Homo Sapiens
gtctgccccagatgctgctgtcacaggccccaggaatcccaaaggagaactagcaggtgttctgatgaggacacgtccttcaaccagccgagcctgtgttgtgaatggcccggatggtacgagatccgccttttcctttaggactctgccacaaggggggtcttcaggcccagcacatgatgagaggactaatgggagtggctctggggctacaggtgaggacaggagggggagctcccagcctgagagttgtgacgtgcagtctaatgaagactaccctcggaggcccctaaccagggccaggagcagactgtcccatgtactgctggtatctgagtcagaagtagccaaaacaaagccacgtcacgccatgaaacggaagcggacagcagataaatccactagtacaagtgatcctgtgatcgaggatgaccatgtgcaggttcttgtattaaaatccaagaatcttgttggagtcactatgaccaattgtggaatcacagatctagtgctaaaagactgtccaaagatgatgttcatccatgctaccaggtgcagggtactaaaacatttaaaggtagaaaatgcaccaattgtaaaccgatttgactatgcacagtgcaagaaactgaacatggatcaggtactagaccagatactaagaatgccacccgagagaaaccgcatcatatacctacgcccaatgcagcaggtggacactctaactttggagcagaagctatttagtggtccctacccctatcacatctgtattatccatgaattcagtaagcctcccaatgtccggaataaggtgcgcattcgcaggctggatggacactatagcaaacatcaatcaagagctcattaaatatgaattcttccctgaagccactcgaagtgaagaagacttaaagaaataccccaagtacccctggggaagagaaatctatactttagaaggtgttgtggatggagctccatatatcatgatttctgacttcccttggc

SEQ ID NO: 64617 - DNA, 267 bp, Homo Sapiens
ggctgcactgggactcacagagccacaccctggagggcctcccccttgacactgataagggtgtgcattacatttcagtgagcgctacacggctgggggccaacgggagccacatcccccagacctccagtgtgttctccatcgaggtctaccactgaagaccacagtgagctgcagtcggtgaggacagcctccccagaccctggtgaggtggtatcatctgcctgtgctgcggatgaacctgtgactgttttgacaggtgatttt

SEQ ID NO: 64618 - DNA, 1326 bp, Homo Sapiens
gatcggggattcaggaaggagcccaggagcagaggaagtagagagagagacaacatgttacatctgcaccattcttggactccgaatattgaccgccttgcagaggacggcgtgaagctgacccaacacatctctgccgcatctttgtgcaccccaagcagagccgccttcctcacgggcagataccctgtgcgatcagggttggtttccagcatttggtttaccgtgttcttcagtggaccggagcatctgggaggtcttccaacaaatgagacaactttttgcgaaaatactggaagagaaaggctatgccactggactcattggaaaatgggatctgggtctcaactgtgagtcagccagtgatcattggcaccaccctcttcatcatgggctttgaccatttctacggaatgcctttctccttgatgggtgattgcgcccgctgggaactctcagagaagcgtgtcaacctggaacaaaaactcaacttcctctttccaagtcctggccttggttgccctcacactggtagcagggaagctcacacacctgatacccgtctcgtggatgccggtcatctggtcagccctttcggccgtcctcctcctcgcaagctcctattttgtgggtgctctgattgtccatgccgattgctttctgatgagaaaccacaccatcacggagcagcccatgtgcttccaaagaacgacaccccttattctgcaggaggttgcgtcctttctcaaaaggaataagcatgggcctttcctcctctttgtttcctttctacacgttcacatccctcttatcactatggagaacttcctcgggaagagtctccacgggctgtatggggacaacgtagaggagatggactggatggtaggacggatccttgacactttggacgtggagggtttgagcaacagcaccctcatttattttacgtcggatcacggcggttccctagagaatcaacttggaaacacccagtatggtggctggaatggaatttataaaggtgggaagggcatgggaggatgggaacggtgggataccgcgtgcacgggatctaaccgctggcccggggtgctcccggacggccgagtgattggcgagcccacgagtctgatggacgtgtacccaacgtggacggatggggggcggtgcaggtgccccaaggacagaagggcaagacgggcaagaccttctggcctgctactggggacagcccacaactcaaaccacagagtcctgcatgcattcatgtgaaaaggatacatgacacgcagccaagggggcatccacagggacacaaggcaa

SEQ ID NO: 64619 - DNA, 412 bp, Homo Sapiens
cagatacatctcttttctttggcaagttgcagacttaggtagcagcctaaatatgccaccccttagagatggagcaagagtacttatgaaacttatgccgccagatagcacaacgatagaaaaattaagagctatttgtttagaccatgccaaacttggagaaagcagccttagtccatctcttgactcacttttctttggtccttcagcctcacaagtgctatatctaacagaggtagtctatgccttgttaatgcctgctggtgcacctctggctgatgattcctctgattttcaagtttcacttcttgaaaagtggtggcctaccccttgtactgagtatgctaaccagaaataacttcctaccggatgcacaacccgaagggatcctctagatcacccgcaaccagct

SEQ ID NO: 64620 - DNA, 449 bp, Homo Sapiens
cccttccggttttgtgcatcctggaccagggggaagacttgcggaagttcattctggccgcgctcagtgccagccacagaaacgtggtaaactgtgccctgtgccaccgggcgctcccggtgttcgaacagttcccactggtggatggaactttgttcctaagcccgtcgagacatgatgagatcgaatatgatgttccttgtcaccttcaagggagactcatgcatctgtatgccgtgtgcgtggactgcctggaaggggttcacaagatcatctgcatcaagtgtaagtcacggtgggatggcagctggcaccagctgggcactatgtacacctacgacatcctggctgcctctccatgttgtcaggcccgccttaactgtaagcactgtgggaagccggtgatcgacgtgaggatcgggatgcacaacccggaaacgatcctctaa

SEQ ID NO: 64621 - DNA, 512 bp, Homo Sapiens
tctagaggatcctggtatttgcggtgcctttccacagatccctggatgctggggtggattacagcggatactcgccatgcactggcctcctacactggacatgaagattgtctggagttgttacttgaacacagcccgttttcgtacctggaaggaaaccccttcactcctttgcactgtgcagtgattaataaccaagacagcaccacagagatgctactgggagctctgggtgccatagaattgtgaacagccgagatgccaaaggacggaccccccttcacgccgctgccttcgcggacaatgtctctgggctccggatgctgctgcagcatcaagctgaggtgaacgccactgaccacactggccgcactgcgctcatgacggcggctgagaacgggcagaccgctgctgtggaatttctgctgtatcgagggaaggcagaccttactgtgctctggatgagtcaagaacacggccctccagcttggcctggtaccacgggccactga

SEQ ID NO: 64622 - DNA, 1019 bp, Homo Sapiens
  misc_feature (856)..(856): n is a, c, g, or t
gcgccgactcgcacaagaaggaaccccgggcctctggatccgctcgcccggctatgctgctgtggccgctgcggggctgggccgcccgggcgctgcgctgctttgggccgggaagtcgcgggagcccggcctcaggccccgggccgcggagggtgcagcgccgggcctggcctcccgataaagaacaggaaaaagagaaaaaatcagtgatctgtgtcgagggcaatattgcaagtgggaagacgacatgcctggaattcttctccaacgcgacagacgtcgaggtgttaacggagcctgtgtccaagtggagaaatgtccgtggccacaatcctctgggcctgatgtaccacgatgcctctcgctggggtcttacgctacagacttatgtgcagctcaccatgctggacaggcatactcgtcctcaggtgtcatctgtacggttgatggagaggtcgattcacagcgcaagatacatttttgtagaaaacctgtatagaagtgggaagatgccagaagtggactatgtagttctgtcggaatggtttgactggatcttggaggaacatggacgtgtctgttgatttgatagtttaccttcggaccaatcctgagacttgttaccagaggttaaagaagagatgcagggaagaggagaaggtcattccgctggaatacctggaagcaattcaccatctccatgaggagtggctcatcaaaggtagccttttccccatggcagcccctgttctggtgattgaggctgaccaccacatggagaggatgttagaactctttgaacaaaatcgggatcgaatattaactccagagaatcggaagcattgcccataggagncaaaaggtctatggctcatgtctgaaatatgcctgctgctgccaagttagctattgggactatctggaaaaactgctcccaggaggctttgttctgccagctgatttcctaatgtctcatctccttgctatgtctttcagcgtctctgcctcgtggtaatgaa

SEQ ID NO: 64623 - DNA, 180 bp, Homo Sapiens
tgggatgtgcaccacggtcaaggaacacagttcaccttcgaccaggaccccagtgtcctctatttctccatccaccgctacgagcagggtagtttctgcctcacctgaagcctctaactggtccaccacaggtttcggcaagccaagatataccatcatgtccttgaacagctgggatcg

SEQ ID NO: 64624 - DNA, 419 bp, Homo Sapiens
catcatccctgaagtcaaagaggttgtggattctctgaaaattgaaagtggtaccagtgctacaacccatgaagccagacctcggcctctcagcttatctgagtaccggcgacgaaggcagcaacgccaagcagaaacagaagagagaagtccacagcccccaactgggaagtggcctagccttccagagactcccacagggctggcagacatcccttgtcttgtcatcccaccagccccagccaagaagacagctctgcagtgaagccctgaaacaccccttgagatttgccttgtgcctataggtcccagccctgcttctcctagtcctgagccacctgtaagcaaacctgtgcctcatctcccactgagcaggtgccatcccagaagatgccactgttggcgagaccttgccctac

SEQ ID NO: 64625 - DNA, 640 bp, Homo Sapiens
agtctgttagaggcaaggtaacccagagtctcccagtgaaagaaggtgacagaggtctctctccttcgagtggggtggtctgtgatttgtcccgtccacagctgggtgaaggtgaattctcttacggtttcgatggacgaggactcaaggcagaaaatggacaatttgaggaatttggccagacttttggggagaatgatgttattggctgctttgctaattttgagactgaagaagtagaactttccttctccaagaatggagaagacctaggtgtggcattctggatcagcaaggattccctggcagaccgggcccttctaccccatgtcctctgcaaaaattgtgttgtagaattaaacttcggtcagaaggaggagcccttcttcccaccaccagaagagtttgtgttcattcatgctgtgcctgttgaggagcgtgtacgcactgcagtccctcccaagaccatagaggaatgtgaggtgattctgatggtgggactacccggatctggaaagacccagtgggcactgaaatatgcaaaagaaaaccctgagaaaagatacaatgtcctgggagctgagactgtgctcaatcaaatgaggatgaagggtctcgaggagccagaggatggacccca

SEQ ID NO: 64626 - DNA, 885 bp, Homo Sapiens
ctactactactaaattcgcggccggtcgacgctggtgcacaggaaggatgaggaagaccaggctctgggggctgctgtggatgctctttgtctcagaactccgagctgcaactaaattaactgaggaaaagtatgaactgaaagaggggcagaccctggatgtgaaatgtgactacacgctagagaagtttgccagcagccagaaagcttggcagataataagggacggagagatgcccaagaccctggcatgcacagagaggccttcaaagaattcccatccagtccaagtggggaggatcatactagaagactaccatgatcatggtttactggcgcgtccgaatggtcaaccttcaagtggaagattctggactgtatcagtgtgtgatctaccagcctcccaaggagcctcacatgctgttcgatcgcatccgcttggtggtgaccaagggtttttcagggacccctggctccaatgagaattctacccagaatgtgtataagattcctcctaccaccactaaggccttgtgcccactctataccagccccagaactgtgacccaagctccacccaagtcaactgccgatgtctccactcctgactctgaaatcaaccttacaaatgtgacagatatcatcagggttccggtgttcaacattgtcattctcctggctggtggattcctgagtaagagcctggtcttctctgtcctgtttgctgtcacgctgaggtcatttgtaccctaggcccacgaacccacgagaatgtcctctgacttccagccacatccatctggcagttgtgccaagggaggagggaggaggtaaaaggcagggagttaataacatgaattaaatctgtaatcaccagctatttct

SEQ ID NO: 64627 - DNA, 275 bp, Homo Sapiens
atgggagaacaggcaggacggcatggttctccccttccccccttcccaggtcaggggagttggacaagtagcaggtgtttgtttttaaagcacaggcctttgggaaagcaacacattattgagactcaccgtgattcccccgggagtcagactggctttgtcctcttcctctctggagggccatgggccatcaagcaggagctccacatcgagccccaggccagaaccccctccctttcacagagagggaactttattgcacaattggttccata

SEQ ID NO: 64628 - DNA, 580 bp, Homo Sapiens
agagaactgagggacagcaagaatactccagggcagcctccctcctaccaattacacgccgcctgctggcacagggcacctcgggaacaggacgcccttccggccctgaattggggcagcgcaggagggagggtgcagagccatagcgacctgtgtgtaccatagacatgcacatgcgctcaccttcacgtgtaacccttctgagtcccagacagggtaactggcgaggccgtaagtaccctcgtgggggcggaaatattgccgcgtccctgagtcctctgggcagatgcagagccgcgtaagcctcatagaagcaaagccaggggaacagtgggagctctggcctcgcggtgcggacgctagtaatggattcctggggaacagcgacctctggaggagcctctcatccacacagagtcaggaactaaaggactggttctgagacaaagcaccctttcctcaccctactcccattccacccgcttggaaaagttatccagagactttaacctccgactccactcttcgctatgttgcttttacttccaacctgtacccacgcttcgatcaaaccggggtc

SEQ ID NO: 64629 - DNA, 767 bp, Homo Sapiens
  misc_feature (621)..(621): n is a, c, g, or t
  misc_feature (639)..(639): n is a, c, g, or t
  misc_feature (658)..(658): n is a, c, g, or t
  misc_feature (684)..(685): n is a, c, g, or t
gcggccgctttgccatcgaccccgagctgcgtggggctgagtttgagcggatcacacagaacctggacgtgcacttctggaaagccttctggaacatcaccgagatggaagtgctatcgtctctggccaacatggcatcggccaccgtgagggtaagccgcctgctcagcctgccacccgaagcctttgagatgccactgactgccgaccccacgctcacggtcaccatctcacccccactggcccacacaggccctgggcccgtcctcgtcaggctcatctcctatgacctgcgtgaaggacaggacagtgaggagctcagcagcctgataaagtccaacggccaacggagcctggagctgtggccgcgcccccagcaggcaccccgctcggggtccctgatagtgcacttccacggcggtggctttgtggcccagacctccagatcccacgagccctacctcaagagctgggcccaggagctgggcgcccccatcatctccatcgactactccctggcccctgaggcccccttccccgtgcgctggaggagtgcttcttcgcctactgctgggccatcaagcactgcgccctccttggctcaacggggaacgaatctgncttgcggggacagtgcangcgggaacctctgcttaancgtggctcttcgggcagcagcctcgnngtgcgcggtgccagatggcattatggcagggctacccggcacaatgctgcagcctgccgcctcttcctccccgctgctgagc

SEQ ID NO: 64630 - DNA, 440 bp, Homo Sapiens
cgtcaccgcccgcattgccgctcccagtcccgcgctcggcacgacatgaaatcccccgacgaggtgctacgcgagggcgagttggagaagcgcagcgacagcctcttccagctatggaagaagaagcgcggggtgctcacctccgaccgcctgagcctgttccccgccagcccccgcgcgcgccccaaggagctgcgcttccactccatcctcaaggtggactgcgtggagcgcacgggcaagtacgtgtacttcaccatcgtcaccaccgaccacaaggagatcgacttccgctgcgcgggcgagagctgctggaacgcggccatcgcgctggcgctcatcgatttccagaaccgccgcgccctgcaggactttcgcagccgccaggaacgcaccgcacccgccgcacccgccgaggacgccgtggctgccgcggccgc

SEQ ID NO: 64631 - DNA, 658 bp, Homo Sapiens
cgctggagcgttctcccgcacgcgggcgccaaggtaaaggcagcacagctgagccgcagtgctttaggagcccactcgggaccgcctctatggaagatactgcaagagggtctgaaaaaaccgctgaaataggggtttatatgagttctgtctaagagatcacataagctctgaggcttcatcaatctgtacctacatgtaactgtatctggggtacatgggcagacggtaccaagtcctgctcttcgatggggtggctgagagataaaggttcctgaactctccttgctgtgtatgcaccacatctgtacttcagagaggtgggaaatcatctacaacactgcgtttgttgtggttgtgctgttactggtataaagtcaagtgccttctatgctataggctcagaaatttttcttaaactgatttcatgtcctatgcaagtgttttctacaacctgcataaccagtactttgtaaaacttgtttacgcttcaattgtacatagtgatttttaaagaaatatatagtatttttatttaggtacctccaaacttgaattcgtctgtgtgaagcattgtaaaacgatacatttctcttttgagtaccattacagttgtacagaggttttcactgcttctatttttctactgttactgata

SEQ ID NO: 64632 - DNA, 630 bp, Homo Sapiens
cacatgaactttatgtgctacgatttaactgcagccttgaacacacacaaaaatattcttaagggctcagatttagcaaacacggaagaattttaaaatgagctctcctttcaacccttgttaacaagtgcctaaaaatggaagtacctgttcagattaatcaaagcaataggatttgatttgattaggtatctttttacaccagtatgttatttttaaccaaaatgtaaagttcttattaaactcattacctgccattgtgattgtcccatcatggcccacctggtttcctgatgttgtaaataacatcaatgcatctgctgtgggtcctttgctgagatgtcttcgaaggaattttgttttagccatatccatcaactttgtattttacttgcaatttggaagaaggaaagtcacatgatgaaactccttttgtctataaccaggccctggcaaagtgcaaacaggatgcaactgcagtggcacaaaggtcactcaatcctttgtttccagtttcacattctactacttctgcgctagagaacgatgctctgtgagaggcattcactagtatgaatgtggggatatagtgtataagacttatttgcagtactgtgttcttcagctaga

SEQ ID NO: 64633 - DNA, 413 bp, Homo Sapiens
  misc_feature (54)..(54): n is a, c, g, or t
ttcctggaggcgctggttgacagtgtggcccagggcatcccctttccaacagcnaccagtttgacaaaaaatgtcttcccactggagcaggccttcgttctcagcaagcagaggtacccccgccagccgcgaggagacactgtggacctggccaagaagatctttctcaaatattaccccggctgggtggccggctcttggtgatagattcgccaccactgggccttgttttccgctaattccagggcagattccagggcccagagctggacagacatcacaggataacccaggcctgggaggaggccccacggcctgctggtggggtctgacctggggggattggagggaaatgacctgccctccaccaccacccaaagtgtgggattaaagtactgttttctttccactta

SEQ ID NO: 64634 - DNA, 219 bp, Homo Sapiens
ccagcagcgtgagtcacaggttgcactagaagttgcctttgaaattagacctaaactatgtggaactggaacccttgtacacaaagctctctatcatccaaatcctgctgaactctcttaggaaagaacagttttacagattcattctttccacacacaagatttccccactgcacagttactctcacctttttattttcttgactgttatgatttact

SEQ ID NO: 64635 - DNA, 236 bp, Homo Sapiens
ccggaaccccagaaagtattgaacaagccaaacggctcctgggacagattgtggaccgctgtctaaatggagctgtgctttcataatgacatagacagcaacagcacaatccaggagattctcattcccgcatctaaagtgggtctggtcatcggcagaggaggggaaacaatcaagcagttgcaggagcggacaggggtgaagatggtcatgatccaggatggcccattgcccac

SEQ ID NO: 64636 - DNA, 472 bp, Homo Sapiens
ctgggagccaagctggtctggcaagggcgctcaggcctgggagagaagggagcaatggccagtcaccttcaccttctaactaactagcctccggatgaggtggctgccaccaggcccgaatgatccccaggagcccagcttccaaaccccaacatcgaatcaaacatctccatccccaagtgcagtaacacacaaaaaccaaacactctgccctgggaaaggcctggtgcgattctcagtaggactcacacccaccctacctagaagtactgggctggcctgggtactgcatccgtgtgttttgataagggggtgatgtggccacgcccttatctagatttcactttgtatccactgggcacagatattctagagaacttatctttcactcttgtaaaagccacatatccacatctctttcattttctcagtgtgttatgcagcaatttattaaagtatttattgtctaata

SEQ ID NO: 64637 - DNA, 995 bp, Homo Sapiens
cttgacgggattgtggcggtcctctctcccaattcggaagctacagctacctccggacgctctcaagatggcgacctctctgggttccaacacctacaacaggcagaactgggaggatgcggacttccccattctgtgccagacatgtcttggagaaaacccatatatccgaatgaccaaagaaaagtatgggaaggaatgcaaaatctgtgccaggccattcacagtgtttcgctggtgccctggagtccgcatgcgtttcaagaagactgaagtgtgccaaacctgcagtaaattgaagaatgtctgtcagacctgcctcttagacctagagtatggcctgcccatccaggttcgtgacgcaggattgtcttttaaagatgacatgccaaagtcagatgtcaacaaagagtactatacacagaatatggagagagagatttctaactctgatggaacacggccagttggcatgctggggaaagccacatctaccagtgacatgctgctcaaactggcccggaccacaccctactacaaaaggaatcgaccccacatttgctccttctgggtgaaaggagagtgtaagagaggagaggaatgtccatacagacatgagaagcctacagatccagatgacccccttgctgatcagaatattaaagaccgttattacggaatcaatgatcctgtagctgacaagcttctaaagcgggcttcaacaatgcctcggctggacccaccagaggataaaactatcaccacactatatgttggtggtctaggtgataccattactgagacagatttaagaaatcatttctaccagttcggagagatccggacgatcactgttgtgcagagacagcagtgtgctttcatccagtttgccacacggcaggctgcagaagtggctgctgagaagtcctttaataagttgattgtaaatggccgcagactgaatgtgaaatggggaagatcccaggcagccagag

SEQ ID NO: 64638 - DNA, 615 bp, Homo Sapiens
cggcacctttgttggtggatatttagctgccctctacagtggttataacattgaacagatcatgtacctaggctcgggtttgtgctgtgtcggtgccttggctggcctctccacccagggaacagcacgtcttggcaatgcactgggcatgattggggttgctggaggactggcagccaccctcggagtcctaaaaccgggcccagaattactagctcagatgtctggagcgatggctttgggtggtaccattggtaagcacttgtgggcttctgccttcatgtgaactccagtttctcaatatatatttctaaggtccatattgatgaaataattaaattttgttcatggaagttgcttcagttaatattattttggtgaaaattcattccagttggtgtaattctcattcaaatacattttagaacactgaataaatgcatcaactgagtcaaaatatcctatactcaattcttatcttcctttactgactgtgtcccgttagctgataatggaatgggggattggaatccttatgtatgtactatacataagctaacttttgttctgctgggtataaataacagccaaagattctgcttcatagacctgtta

SEQ ID NO: 64639 - DNA, 545 bp, Homo Sapiens
  misc_feature (272)..(292): n is a, c, g, or t
atggggccgccgagagaccccagcgcctttgaaaagcaaggtttgtgctgcgcttccagttccgaaaagcagatgtttaagcccttggactgagggtgggatcgcagctccgaagacggagaggagggaaatggggccctttcccctctattgcatccccctgcccgactccttcccggcacccacgtgccctagattcatggcagaaaatgaccaaatcctgtgtatttgttttatatatttaataactgttttaaatgaaagttttagtnnnnnnnnnnnnnnnnnnnnngattaaattgctattgctgtagtaagagaagctctttgtatctgaacatagttgtatttgaaatttgtggttttttaatttatttaaaattggggggagggcatgggaaggatttaacaccgatatattgttaccgctgaaaatgaactttatgaaccttttccaagttgatctatccagtgacgtggcctggtgggcgtttcttcttgtacttatgtggttttttggcttttaatacagacattttcctcca

SEQ ID NO: 64640 - DNA, 1662 bp, Homo Sapiens
  misc_feature (1035)..(1057): n is a, c, g, or t
ccccgctgcttggcgcgtctgggggcgtcccggccccgcacacagtgacgctcagtcctactctcgccgcaaccataagacgctatcccgccacgagcgcgcttgtgaaaggaatacgggcggccgggccgcgcgctcatgtgggcgcctcatccaggccccgtccccggcgccggggccccagcaaaatatcggtagggcttctagcagcaactcgtccagttcggtgcgctggccccacacacccccggaggctactccaccgcgtctccacgaagtgggcgggcgccagacaccccctaattttatttctgtgcgccggcacgcgccgggggcgatcgactccacaggcgcggctcgggtcgcggggtgacaccctacagccggccgcggggggtgggcaaataaagttacgtcgacgcgcgtcgggcccccacacccccattagtgcggggcgggggtgttctctcgcgcgggccggacgcgcccctctagacctcgccacagcctccccccctgtcgccccagagggagataaggggggcgcgcgcgcccaccacaagggcccggtcttcccacctcccgccgaaagcgcatcgcctcccccacccaggcgggcttccgcccccgtcggtcgcgcggccagccccgctttacattcgcggcacctactgcgggcggcggccgctggtggtggggataccccggcgggggggtgacagctgctccggtggcgcatttcgcgtctgagagggcctccccctttgaggaggtcctccgatgcggcacccgcccctggggttcggtcccggggaccactctccatgttcgccgtcccagcgcccacccttatgcgcccgaacccccgggcgcgctgggggaaaagccgacccccccctggcaggcggcccacgggggggtcccaggccgcccggcggccccggaccccctctgagggggggagaagcctgccacaggccggtcgccggccgcccacgttttttcccctgtctccccccccgcctcctttcgtcnnnnnnnnnnnnnnnnnnnnnnncggcggcgaaagtatgcagcatttattacaaagccaagagatacagatgtcccagggcaaaggagggtacagtcacaggacctcagacacaggacaaggtgcaaacacagacaagcccatcagggggctcccaaccccacacacctacgctatgatggaatctcgagtctcgactcccgactcctctcagatctatgcacacttgaggaaatctcggtgggcagcgacctgccagggtctgtccctaaggaggtggtccgctgacctctcaaggggtgggggtggggtcagagcttacaggtttctgtcttcttgtgcttttagatgcagttgctctgtcctgaccaggtgaccgggcctcagctgggggtggaggggcaattggaaggctgtttgcctctggcaaagtctgggatctgtgcttgtgtgaggttaacccacccccacttccactctaggccccaggtgagactccaccaccagtcctgctagtgagggttccccggtgagggtaaggttggtgggggtgcagcgcttcacaatgctaaagccttagccctcctccaagagctgagacctctcagggcctgaatcttcttttcccc

SEQ ID NO: 64641 - DNA, 1116 bp, Homo Sapiens
  misc_feature (158)..(446): n is a, c, g, or t
atttagtgataagtttgatttaagggccactataccatttaggctaacctttggtttttgagactttagaccccacgttttggttaggcatcacagtttggccacccttgtccaaaggagaaaatagaggaggtgtttctttcatttttgtcctatgnnnnnnnnnnnnnnnnnnnnnnnnnnnnnnnnnnnnnnnnnnnnnnnnnnnnnnnnnnnnnnnnnnnnnnnnnnnnnnnnnnnnnnnnnnnnnnnnnnnnnnnnnnnnnnnnnnnnnnnnnnnnnnnnnnnnnnnnnnnnnnnnnnnnnnnnnnnnnnnnnnnnnnnnnnnnnnnnnnnnnnnnnnnnnnnnnnnnnnnnnnnnnnnnnnnnnnnnnnnnnnnnnnnnnnnnnnnnnnnnnnnnnnnnnnnnnnnnnnnnnnnnnnnnnnnnnnnnnnnnnnnnnnnnncttaaagtgagcttaatttctgaactcttagtgattcatatatgtacataaatctgtgatcccatttcttattgcaccattcaggaacactttatataaatgagtggctttttatttcatattattagtagtatcatggttccattacaggcctattaacatcatacattgtacattagtctttgaagaaaaaatatgtaaatatatatgtgtaacatgagaatttctctctaaagcagggcttaaaattttttggaaaagtttgacaaagcataccacatgaattcagatttacctcaatgctaagaattatgtttagttaggaaaaaggaaagtcattttgacctcaggtagaaaaatagattgctttgagttttatgtagctttagacttttaaaagttaggatttattctgtaacttaaaattatttgaaaaaattatgcctctggtttaattattggtgattacacactctttctcttacccttgtgtattgaactatgtccataatcaagttgatgtggatcctgaaaagtgttatgaacatctgattggtatttgtcacatttattttaaaattagcatctgaacacttcaaagctgtcagtgtgtattggtttcaccaataaccactgcttgatccttacaattaaattttttaactaacta

SEQ ID NO: 64642 - DNA, 1301 bp, Homo Sapiens
  misc_feature (462)..(484): n is a, c, g, or t
  misc_feature (488)..(772): n is a, c, g, or t
gtttctaactgatgagatctgtgacaaatccctgtggtcagcagcaggcattggatatgtaactttattctgtcccattgatcttgtagtcaaccctggtctgttctgtattgttttaattacataatctttgtaataatctttaatacctggtggagtgctctgtttacttatttctgcataattaacccacccttaagcttaacttactcatggttctgcaggatgactgctctccatggttctaggggtttctgcatggggcctctcacatgtgctacagtcaaacattagccggggccacagtcatctgaaactcacttacacggctgacaattgatgttggctgttgcctggagaagacatatgtggcgtggtggaatggaatggtgactagattcaagaaagagcttcccaggaggaaggctaccaagagcccgaagtagtggcttcagtttcttnnnnnnnnnnnnnnnnnnnnnnntcgnnnnnnnnnnnnnnnnnnnnnnnnnnnnnnnnnnnnnnnnnnnnnnnnnnnnnnnnnnnnnnnnnnnnnnnnnnnnnnnnnnnnnnnnnnnnnnnnnnnnnnnnnnnnnnnnnnnnnnnnnnnnnnnnnnnnnnnnnnnnnnnnnnnnnnnnnnnnnnnnnnnnnnnnnnnnnnnnnnnnnnnnnnnnnnnnnnnnnnnnnnnnnnnnnnnnnnnnnnnnnnnnnnnnnnnnnnnnnnnnnnnnnnnnnnnnnnnnnnnnnnnnnnnnnnnnnnnnnnnnnnnnncccccctcccttcctaacatataccctcaccttggcgggccgcctcggccctcaaaaacgcttttcaaaaccattccgtttgggagacccgggcccccaataagggaaagtggacactggtttcataccttggtttcccaaaggaaaaccctgggactatgaaccctaggggccttgaattcctccacccaattaaaaaaaccgcccggggcgcggaaacccgaagcgtgttcctggaaccaaaatcccaaaatgggagtttcctgaaggcgcctttttactgggcattctttcctccctcggggaaccgccccaatccgactgcctctataatctgaaatttacccgtccccgccctttgcgccacttcaatatccaaagaacttggtctgtaacatttacaccaaagcctttccccgccccaacaccgtgggaaatgccctctccccacacacgcattcttggagagaaccctcttaaaatcccgcaggagcgggatattatgagaaccactgtgccgcagcacttg

SEQ ID NO: 64643 - DNA, 557 bp, Homo Sapiens
gagctccgtaccccgttatgtggactcaatcggagtgaagcactcgggaaggaagcagcttgtgagagcagcacgccgtcgtgggcgagcgatcacaattacaatgcagtaaagccagaaaagactgctgctccctcgccgtcactgttgtataaatgtatgtatcacctaggggttggcctcctggacccctcccgttctttctggatagccatcccctgggcctgtccaggactgggagttgcagctttgtgttaagctgatcacagacaccggctgcatcatcagcgggaagcagagcccatgtccaggatgcctcctgctgccctgtgtccatccctagtctgtcaggacttcctgtcactgttttccaaagctgtaaacctcactggtgaacgttcaccttaatgattgattctttaatctctgttttcactctcaggctctggtaagtattcgtattctcttcatcccagtctgattgcatagccacactgcccggcacgccacatccacccctgtttgcacatgagtttgtctgacaacagggctgtata

SEQ ID NO: 64644 - DNA, 428 bp, Homo Sapiens
agctcggtacccgtcgcgtgtctcaagctgtaaactgacaggggctcctgtcctgtaaaatggcatttgaatctcgttctttgtgtccttactttctgccctataccatcaataggggaagagtggtccttcccttctttaaagttctccttccgtcttttctcccattttacagtattactcaaataagggcacacagtgatcatattagcatttagcaaaaagcaaccctgcagcaaagtgaatttctgtccggctgcaatttaaaaatgaaaacttaggtagattgactcttctgcatgtttctcatagagcagaaaagtgctaatcatttagccacttagtgatgtaagcaagaagcataggagataaaacccccactgagatgcctctcatgcctcagctgggacccagcttgagacccgcga

SEQ ID NO: 64645 - DNA, 1518 bp, Homo Sapiens
cgtggcgtgtatcatgctggagggtaccttttaagctgttcaaggtcaagatgaatacaaactcaaaggaggttttatccctgggtgttcaagttcccgaggcatgggaagaacttctgacaatgaaagtggaagcaaaaagtcaccttcaatggcaggaatccagactgaaacgcagtaatccactggcaagggaaatcttccgaaggcactttcgacagctgtgctaccaagagacccctggaccaagggaggctcttactcgactccaggaactttgctaccagtggttgaggccacatgtgagcacaaaggagcagattttggatctgctggtgctggagcagtttctatccattctgcccaaggagctccagggctgggtgagggaacactgtccagagagtggagaagaggctgtgattttgctggaggatctggagagagagctcgatgaaccacaacatgagatggtggcccacagacacagacaagaagtcctctgtaaagagatggtgcctctagcagagcagacaccactgacccttcagtcccagcctaaggagccacagctcacatgtgactctgctcagaagtgccattctattggagagacagatgaagtaaccaagactgaggacagagagttggtgctaaggaaagactgtcctaagatagtggaaccacatgggaaaatgtttaatgagcagacctgggaggtatcacagcaggatccctcacatggagaagttggtgaacataaggataggatagagaggcagtggggaaacctcttaggagaggggcaacaccaatgtgatgaatgtgggaagagctttactcagagctcaggtctcattcgacatcaaagaattcatactggagaaagaccttatgaatgtaatgaatgtgggaaagccttcagtcgaagttctggtctttttaatcaccgaggaatccacaatatacagaaacggtaccactgcaaggagtgtgggaaggtcttcagtcagagtgcgggtcttatccagcatcagagaatccacaaaggagaaaagccgtatcagtgcagccagtgcagtaagagctacagtcggcgttcatttctcattgaacatcagagaagccacacaggggagcgacctcaccagtgcattgaatgtgggaaaagctttaatcgacactgcaacctcattcgccatcagaagatccacacagtggctgagctggtctagggcttggctatgagcaagttttccagatcaccacccaagttgtgtggggcaggttgagactagaaaatgccatctttcttcgctttctccatgaaatgtgtttgaaacaaatcgtgacttaaggcccagggacttccttaaaggaaagcttgggtgtttgaagctactgttttctcgtttgttcacttttacctctttcttactcttactagctgtgtccctcttatttataatttatttatttttgagatggctgctaaacccttctaataatcataataaa

SEQ ID NO: 64646 - DNA, 408 bp, Homo Sapiens
tcttttcctccttggacactgacggggatatgtacatcagccctgaggagttcaaacccattgctgagaagctaacagggtcaactcccgcggccagctgcgaggaggaggagttgccccctgaccctagcgaggagacgctcaccatagaagcccgattccagcctctgctcccggagaccatgaccaagagcaaagatggcttcctaggggtctcccgcctcgccctgtccggcctccgaaactggacagccgccgcctcaccaagtgcagtgtttgccacccgccacttccagcccttccttcccccgccaggccaggagctgggtgagccctggtggatcatccccagtgagctgagcatgttcactggctacctgtcctacaaccgcttctatccaccgccgc

SEQ ID NO: 64647 - DNA, 1520 bp, Homo Sapiens
ggtccggaattatccggatcccgcccgctaatgttttggttgcttcaagatggcggtgcaggagtcggcggctcagttgtccatgaccctgaaggtccaggagtacccgaccctcaaggtgccctacgagacgctgaacaaacgctttcgcgccgctcagaagaacattgaccgggagaccagccacgtcaccatggtggtggccgagctggagaagacgttgagcggctgccccgccgtggactccgtggtcagcctgctggacggcgtggtggagaagctcagcgtcctcaagaggaaggcggtggaatccatccaggccgaggacgagagcgccaagctgtgcaagcgccggatcgagcacctcaaagagcatagcagcgaccagcccgcggcggccagcgtgtggaagaggaagcgcatggatcgcatgatggtggagcacctgctgcgttgcggctactacaacacggctgtcaagctggcgcgccagagcggcatcgaggacctagtgaatattgagatgttcctgacggccaaagaggtggaggagtccctggagaggcgtgagacggccacctgcctggcctggtgccatgacaacaagtcccggctccggaagatgaagagctgcctggagttcagcctcagaatccaggagttcattgaactcatccggcagaataagagactggacgctgtgagacatgcaagaaagcacttcagccaagcagaagggagccagctggacgaggtgcgccaggccatgggcatgctggccttcccgcccgacacgcacatctccccgtacaaggaccttctggaccctgcacggtggcggatgctgatccagcagttccggtacgacaactaccgactacaccagctgggaaacaattctgtgttcaccctcaccctgcaggccggcctctcagccatcaagacaccacagtgctacaaggaggacggcagctccaagagccctgactgccctgtgtgcagccgctccctgaacaagctggcgcagcccctgcccatggcccactgtgccaactcccgcctggtctgcaagatttctggcgacgtgatgaacgagaacaatccgcccatgatgctgcccaacggctacgtctacggctacaattctctgctttctatccgtcaagatgataaagtcgtgtgcccgagaaccaaagaagtcttccacttctcacaagccgagaaggtgtacatcatgtaggccccacgtcgtgaagcgcacgcctcggggacgggctgcagtgggcggggaggccacgccttcctcctgtcccacgctccagcctgccgcggcgtttctgtttcttgcgaccaaagatccgtgagcaacgataaatactcttaggaagagagaaaataaggtttcataagtttgtacttgaaaacatttggattggtaggattttgtaacacgtcaaccatttgatgcttctgaaaagtactttcaacttgcgaaggaaactcttctttaaagactgacc

SEQ ID NO: 64648 - DNA, 975 bp, Homo Sapiens
  misc_feature (91)..(91): n is a, c, g, or t
gatacgaatcgaggctgtacctagcttgggtgaaggactgaggattgatggttcagatttaaacactgacggagacatgagggtgacaccntgagccgggagcaggtccaaccacaaggattgctgagggcaacagaggccacggcatggccatggcagaggcgaagggctggtgggcgatgggcccgtggacatgcgcacctcacacagtgacatgaagtccgagaggagacccccctcacctgacgtgattgtgctctccgacaacgagcagccctcgagcccgagagtgaatgggctgaccacggtggccttgaaggagactagcaccgaggccctcatgaaaagcagtcctgaagaacgagaaaggatgatcaagcagctgaaggaagaattgaggttagaagaagcaaaactcgtgttgttgaaaaagttgcggcagagtcaaatacaaaaggaagccaccgcccagaagcccacaggttctgttgggagcaccgtgaccacccctcccccgcttgttcggggcactcagaacattcctgctggcaagccatgactccagaccttttcagctcggatgcccggcagtgtcatacccccgcccctggtccgaggtgggcagcaggcgtcctcgaagctggtgccacaggcgagctcacaggtcgtcatgcccccactcgtcaggggggctcagcaaatccacagcattaggcaacattccagcacagggccaccgcccctcctcctggccccccgggcgtcggtgcccagtgtgcagattcagggacagaggatcatccagcagggcctcatccgcgtcgccaatgttcccaacaccagcctgctcgtcaacatcccacagcccaccccagcatcactgaaggggacaacagccacctccgctcaggccaactccacccccactagtgtggcctctgtggtcacctctgccgagtctccagcaagccgaca

SEQ ID NO: 64649 - DNA, 941 bp, Homo Sapiens
ccacgcgtccgggcaacatgtttatgtgcccattctacctgcttctctgctacattttcttgatgctcctgtcccttatctgatgggccttcagtcaaaagaaggaactgaccgttctaaactagaacttcctcaagaggctaatttgtgttttgtggacattgacaaccattttattgagttgcctgaagaatttccacagttccccaataaagtggattttatccaagaactctctgaggttcttgttcaatttgggatccctcctgagggcagcctacattgcagtgagagtaccagcaaactgaagaatatggttctgaaagacttggtcaatgacaaaaagaacggcaatgtctgtactaataacatcagcatgtatgagttactgaagggcaatgaaaccatagcccgcttgcaggctctggccaagcgtactggtgtggctgtggaaaaaatggacctctctgcttctctgggtgaaaaagacaaggatttaaaactgcattgtgaagaggcagaactaagggactaccagctcaatgtacagctccgagaggtctttgctaaccgttttacacagatgtttgcagattacgaagcatttgtcattcagactgcgcaggacatggaatcctggctgaccaaccgggaacagatgcagaactttgacaaagtaaaaagaaccatagttttccttttgtggttattagtggctttattattgattttaacatttttaaattttttattcttctgtgcctatgcttacccatatattattgattttgttaaccttttttaaatgcagactttttgtcttccagccccattaagaacttttctttaccaagtatttttacattagataaaataattttacaagcaaataaaccagctcattgaactggtcattaaattgtgcgttaaattgcctgtaa

SEQ ID NO: 64650 - DNA, 1033 bp, Homo Sapiens
  misc_feature (254)..(254): n is a, c, g, or t
  misc_feature (290)..(290): n is a, c, g, or t
gctacggctggaggagccgggccgaggccgtggcggaggccgcggctggtactgggagggtggcaggtagggacggggaaggaatatggcgacgtcgggggcgaacgggcctggttcggccacggcctcgtgcttccaatcctgcgcaaatttagtgagaagattgctgcttgagaagcagcgtcaggccgaggagacggcggccttcgaggaggtgatgatggacatcgtgctccaccctggttacaggcccnaaaaactgcgacgtgggcatacacaagtgagctctncattatgggtgggtctcttgcccaattgttaacccagatttggctcttggccttggcctgagttccaagagcccccctccactcaacctttgggattcatcttcgtgagcactcgtgcaccaatgggcttggtggaacgggtgcagcgagatcctcgaagaatggtgtccccacttcgccgatacacccgccacattgacagctctccctatagtcctgcctacttatctcctcccccagagtctagctggcgaaggacgatggcctggggcaatttccctgcagagaaggggcagttgtttcgactaccatctgcacttaacaggacaagctctgactctgcccttcatacaagtgtgatgaaccccagtccccaggatacctacccaggccccacacctcccagcatcctgcccagccgacgtgggggtattctggatggtgaaatggaccccaaagtacctgctattgaggagaacttgctagatgacaagcatttgctgaagccatgggatgctaagaagctatcctcatcctcttcccgacctcggtcctgtgaagtccctggaattaacatctttccatctcctgaccagcctgccaatgtgcctgtcctcccacctgccatgaacacggggggctccctacctgacctcaccaacctgcactttcccccaccactgcccacccccctggaccctgaagagacagcctaccctagcctgagtgggggcaacagtacc

SEQ ID NO: 64651 - DNA, 572 bp, Homo Sapiens
gagagtcgcgcagctgtgttcgcggactcaggtggaaggaatttcttctcttcgttgacgttgctggtgttcactgtttggaattagtcaagtttcgggaatcaccgtcgctgccatcaacatgtcggtcccaagcgctctcatgaagcaaccgcccattcagtctacggctggggccgtcccagttcgcaatgagaaaggtgagatttcaatggaaaaagtgaaggtaaagcgttatgtgtccggaaaaaggccagactatgcccctatggagtcctcagatgaggaggatgaagaatttcagttcattaagaaagccaaagaacaagaagcagagcctgaggaacaggaggaggattcatccagtgacccccggctacggcgtttacagaaccgtattagtgaagatgtggaagagagattggctcgacatcgaaaaatagtggaacctgaagtggtaggagagagtgactcagaagtagaaggagatgcttggcgcatggaacgagaagacagcagtgaagaagaggaggaggaaattgatggaagcgtcgcgcatgggtaccgagctc

SEQ ID NO: 64652 - DNA, 2236 bp, Homo Sapiens
gggaaggttgcttgacaagtcaggattgtgcctccagtcagaaggaccatgaagagagagaagagggcagagccgtgcatggggctgctccccaggacctgagcaggaacctggagttttcagagctgcctgatcattgctacagaatgaactctagcccagctgggaccccaagtccacagccctccagggccaatgggaacatcaacctggggccttcagccaacccaaatgcccagcccacggacttcgacttcctcaaagtcatcggcaaagggaactacgggaaggtcctactggccaagcgcaagtctgatggggcgttctatgcagtgaaggtactacagaaaaagtccatcttaaagaagaaagagcagagccacatcatggcagagcgcagtgtgcttctgaagaacgtgcggcaccccttcctcgtgggcctgcgctactccttccagacacctgagaagctctacttcgtgctcgactatgtcaacgggggagagctcttcttccacctgcagcgggagcgccggttcctggagccccgggccaggttctacgctgctgaggtggccagcgccattggctacctgcactccctcaacatcatttacagggatctgaaaccagagaacattctcttggactgccagggacacgtggtgctgacggattttggcctctgcaaggaaggtgtagagcctgaagacaccacatccacattctgtggtacccctgagtacttggcacctgaagtgcttcggaaagagccttatgatcgagcagtggactggtggtgcttgggggcagtcctctacgagatgctccatggcctgccgcccttctacagccaagatgtatcccagatgtatgagaacattctgcaccagccgctacagatccccggaggccggacagtggccgcctgtgacctcctgcaaagccttctccacaaggaccagaggcagcggctgggctccaaagcagactttcttgagattaagaaccatgtattcttcagccccataaactgggatgacctgtaccacaagaggctaactccacccttcaacccaaatgtgacaggacctgctgacttgaagcattttgacccagagttcacccaggaagctgtgtccaagtccatttgctgtacccctgacactgtggccagcagctctggggcctcaagtgcattcctgggattttcttatgcgccagaggatgatgacatcttggattgctagaagagaaggacctgtgaaactactgaggccagctggtattagtaaggaattaccttcagctgctaggaagagcgactcaaactaacaatggcttcaacgagaagcaggtttattttttccagcacataaaagaaaaataatgtttcggagtccaggactggcaggacaggtcatcagatactcagaggctgtatctctgccctgccaaccttgacaaatggcttccaatgttaggtttgctacaagatggttactggagctctagctgcctattttgtgtttagggaagggaaaatggaggaaaggggagaagagcaaagggcgcttttaaagagctttcccaaaagctccacccaatgacttctgcttccatctcactaaccacccacccctacctggaatggaggctgggagatgtggcttatttgctgggtacgtgactatccctaataacaaaggggttctgacactaagacattaggggagaatgttgggtaggcagccagcactcttttaccagagggcctcctggtgtttggattttgatctcaatgtgtaaaatgacagagatgtaacaagctcatagggtatcaatatctcttattgttctatgttgatgatatttgtctttgttgtgggtaatactggacatttgttattgggtctgggtgcctggtatctggaccccttcttgtctccagagaaccccctattttatgagacttcatgggggggcaataactacctccacttaagagtacctgaaaatgctagacactgactttcccagcctccccttagctagggccaggcatggggaccagggataaacctgtgccacattttgactcagggaagggatcgggagagctcttttgtgtggtaactgtgataacagtacccgcaaaattgagttcctggtgtagaagtgacaaggatgcaaactgtagcagttggtgctcagtggcagcacgccatcagaccag

SEQ ID NO: 64653 - DNA, 905 bp, Homo Sapiens
tcctatacgtataattaagagtgtgctgcctaattttcttccatacaatgtcatgctctacagtgatgctccagtgagtgaactgtccctcgagctgcttctgcttcaggttgtcttgccagcattactcgaacagggacacacgaggcagtggctgaaggggctggtgcgagcgtggactgtgaccgccggatacttgctggatcttcattcttatttattgggagaccaggaagaaaatgaaaacagtgcaaatcaacaagttaacaataatcagcatgctcgaaataacaacgctattcctgtggtgggagaaggccttcatgcagcccaccaagccatactccagcagggagggcctgttggctttcagccttaccgccgacctttaaattttccactcaggatatttctgttgattgtcttcatgtgtataacattactgattgccagcctcatctgccttactttaccagtatttgctggccgttggttaatgtcgttttggacggggactgccaaaatccatgagctctacacagctgcttgtggtctctatgtttgctggctaaccataagggctgtgacggtgatggtggcatggatgcctcagggacgcagagtgatcttccagaaggttacagagtggtctctcatgatcatgcagactttgatagttgcggtgctgttggctggagttgtccctctccttctgtggctcctgtttgagctggtcattgtggctcccctgagggttcccttggatcagactcctcttttttatccatggcaggtaaatgaggcttagcagccgcagaaaggaagttaaggcggagcagtcagaacacatgccagtttgacagcactgcttgcagagccatgagcttccagagagaagaggaaat

SEQ ID NO: 64654 - DNA, 917 bp, Homo Sapiens
cgggcggctccacacgcgctgctgcccgcctgcggccccacgcgcggcccatgtcctccgggccgcgctcgcccaccccgcggccccgcaggatgaagaaggacgagtcgttcctgggcaagctgggcggcaccctggccaggaagcggagggcgcgcgaggtgagtgacctgcaggaagaaggcaagaatgccatcaactcaccgatgtcccccgccctggcggatgttcaccctgaagacacccagctcgaggagaacgaggagcgcacgatgattgaccccacttccaaggaagaccccaagttcaaggaactggtcaaggtcctcctcgactggattaatgacgtgctggtggaggagaggatcattgtgaagcagctggaggaagacctgtatgacggccaggtgctgcagaagctcttggaaaaactggcagggtgcaagctgaatgtggctgaggtgacacagtccgaaatagggcagaaacagaagctgcagacggtgctggaagcagtacatgacctgctgcggccccgaggctgggcgctccggtggagcgtggactcaattcacgggaagaacctggtggccatcctccacctgctggtctctctggccatgcacttcagggcccccatccgccttcctgagcatgtaccggtgcaggtggtggtcgtgcggaaacgggaagggcctgcttgcattccagcccacatctcgcgaggaagctgaccaaaacttaccaggaggattgatgcgatgggcccggttcggagcgggaattccttcggacaaccgctgtccgaaccaaggcccgggaattagcctcacgggtgggtgagaaggtctctcattcacttttgtgaaacaactcgcctgaacacctgaatttcgcaggaacgcactgggggacca

SEQ ID NO: 64655 - DNA, 1175 bp, Homo Sapiens
  misc_feature (794)..(794): n is a, c, g, or t
gccccctcattagtatgcggacgaaggcggcgggctgcgcggagcggcgtcccctgcagccgcggaccgaggcagcggcggcacctgccggccgagcaatgccaagtgagtacacctatgtgaaactgagaagtgattgctcgaggccttccctgcaatggtacacccgagctcaaagcaagatgagaaggcccagcttgttattaaaagacatcctcaaatgtacattgcttgtgtttggagtgtggatcctttatatcctcaagttaaattatactactgaagaatgtgacatgaaaaaaatgcattatgtggaccctgaccatgtaaagagagctcagaaatatgctcagcaagtcttgcagaaggaatgtcgtcccaagtttgccaagacatcaatggcgctgttatttgagcacaggtatagcgtggactactcccttttgtgcagaaggcccccaaagacagtgaagctgagtccaagtacgatcctccttttgggttccggaagttctccagtaaagtccagaccctcttggaactcttgccagagcacgacctccctgaacacttgaaagccaagacctgtcggcgctgtgtggttattggaagcggaggaatactgcacggattagaactgggccacaccctgaaccagttcgatgttgtgataaggttaaacagtgcaccagttgagggatattcagaacatgttggaaataaaactactataaggatgacttatccagaagggcgcaccactggtctgaccttgaatattattccattgactntatttgttgctggttttatttaagagtgttgatttcaactggcttcaagcaatggtaaaaaaggaaaccctgccattctgggtacgactcttcttttggaagcaggtggcagaaaaaatcccactgcagccaaaacatttcaggattttgaatccagttatcatcaaagagactgcctttgacatccttcagtactcagagcctcagtcaaggttctggggccgagataagaacgtccccacaatcggtgtcattgccgttgtcttagccacacatctgtgcgatgaagtcagtttggcgggttttggatatgacctcaatcaacccagaacacctttgcactacttcgacagtcaatgcatggctgctatgaactttcag

SEQ ID NO: 64656 - DNA, 999 bp, Homo Sapiens
  misc_feature (949)..(949): n is a, c, g, or t
ccacgcgtccgagcagcttagtctcctgacacctcttgtggggtgcatgttcctgctccaggtatgctgttcatgtggattcattccattcagtggccccttggggtttgcatgccagtgaagcgttaccatagaagagccagccgtttgtgttcgcttggtaggtgtaagtaatagcagcccttagccacggagtctttatgtggtttattcctgcaaggttgttttaaactgaaatagaactgctagtgtgattggttgatcagcaaaacagctgctctcattttgttttggaggaaccctggtggtttgacagccaggagaaaggccatatgtgaaaccagtctcttgtggagattggaaatcctccctgatatttgggcagagcctaaacgtgcatgcttgtcactcaaacaccagaagtttgaatcagaggtctgagtgacctcttttgtggctgttcttgatggtttccaggcctcgttatgcatggtttgcttgatgccccttttttgtggccttgtgcttttggttggtaacgaccactcaccatgtaaacacagtacctcagttttctgtccacagctgcagtcgctctgtccctcgtgcttcactgtgggcagccagggacaagcttctgaaagcagtgtgatacccaagtcataggtgcttctcgtatgtgaacaggtgtcattctacagatctgttatgtgttttcctgttgactcttaagagtccctgcatgtaaatctcaaagctgagcctggctcccagagtccagactgacattacagcgcaagagtttgcaagtgtgtccagcatgcaccaactgtgcagaacttggctcggtaactttgcgtggaaaaataaagtacattttgaagtgtcttgagggttgggtcaattgagacatttctagcattacttaatgacttgcattgtgtttttnctgcaagcaacttaatgacttttttttataccacatgcatgcacaaggga

SEQ ID NO: 64657 - DNA, 985 bp, Homo Sapiens
  misc_feature (171)..(179): n is a, c, g, or t
tagaggatccccaggcaaagccctacccaggtttgtttggttacatgaaagaaagttaattggaaaattgggagaaatctaatcatgcctattaaggatgtaagacattacagccttagaagaaagattgtgaaaagctggggagaaaatgcttaaggacatgctaggggnnnnnnnnngtaaaattgaagtgctattgcagacatggctgcagtactgtaccttatcattctgatgaaactgatttggagcacccttttctttgtcgctacatttatttaggggacaaactccatccaggttgactctctctggaatgtggtaataagagctggcaagtaaggctcagagagaagcaaccaactggagttaattgcccatttgggctctttgtataattatggcaaagtagacatttatgttctaattaatatgattacagagaaggctttttctcaggtcaggcttttcatgaaagtattttgagaacaatgaattgcaataaccagcttcacacaagcataactgataaacgcgagtgctattgtagtcttggcaagtgagccaagaacctaggagcagggccattcctactgaaggacgggccccctacggagatgaaatttgtttcctggtgagcacagaatcagaacaaagaacaatatcccaaagaggccctgtgtctaccaggagcttctttttccaaatgtaatggattatgtggaattgtagtgccatcggtttttacttagagcccttgacgtgcttggaccaatatttccttccttcttatgaaccaggtttttccttctgattttcccttttcaacattccttaccagtcaccaaagtttcctgttataatttcttttagcagacaagttataagtcagatttaattagcatcagagttgattttatattagtcagattttggatcatcacagagatctccacaactccttggcttaaacagctccaccggt

SEQ ID NO: 64658 - DNA, 612 bp, Homo Sapiens
tgaggatcccgagcggccgcctttttttggtgcaacttaatagcttcatccacgtcctcatgtactcttactatggtttgtcgtcagtcccttccatgcgtccatacctctggtggaagaagtacatcactcaggggcagctgcttcagtttgtgctgacaatcatccagaccagctgcggggtcatctggccgtgcacattccctcttggttggttgtatttccagattggatacatgatttccctgattgctctcttcacaaacttctacattcagacctacaacaagaaaggggcctcccgaaggaaagaccacctgaaggaccaccagaatgggtccatggctgctgtgaatggacacaccaacagcttttcacccctggaaaacaatgtgaagccaaggaagctgcggaaggatggaagtcaaagaattgaaaccctccaaaccacgtcatctgattgtaagcacaatatgagttgtgccccaatgctcgttaacagctgctgtaactagtctggcctacaatagtgtgattcatgtaggacttctttcatcaattcaaaaaccctagaaaacgtatacagattatataagtagggataagattcta

SEQ ID NO: 64659 - DNA, 1014 bp, Homo Sapiens
  misc_feature (910)..(926): n is a, c, g, or t
gccagacatgattattttacagatccagatgtaccagctctcgaggttgcttcatgattaccacagagacctctacaatcacctggaggagcacgagatcggccccagcctctacgctgccccctggttcctcaccatgtttgcctcacagttcccgctgggattcgtagccagagtctttgatatgatttttcttcagggaacagaggtcatatttaaagtggctttaagtctgttgggaagccataagcccttgattctgcagcatgaaaacctagaaaccatagttgactttataaaaaggcacgctacccaaccttggcttgggtacagatggaaaagaccatccaatcaggtatttgaaatggacatcgctaaacagttacaagcttatgaagttgagtaccacgtccttcaagaagaacttatcgattcctctcctctcagtgacaaccaaagaatggataaattagagaaaaccaacagcagcttacgcaaacagaaccttgacctccttgaacagttgcaggtggcaaatggtaggatccaaagccttgaggccaccattgagaagctcctgagcagtgagagcaagctgaagcaggccatgcttaccttagaactggagcggtcggccctgctgcagacggtggaggagctgcggcggcggagcgcagagcccagcgaccgggagcctgagtgcacgcagcccgagcccacgggcgactgacagctctgcaggagagattgcaacaccatcccacactgtccaggccttaactgagagggacagaagacgctggaaggagagaaggaagcgggaagtgtgcttctcagggaggaaaccggcttgccagcaagtagattcttacgaactccaacttgcaattcagggggcatgtcccagtgnnnnnnnnnnnnnnnnnagatactaaatcgtcccttctccagtcctgattactgtacacagtagctttagatggcgtggacgtgaataaatgcaacttatgtttt

SEQ ID NO: 64660 - DNA, 546 bp, Homo Sapiens
  misc_feature (21)..(21): n is a, c, g, or t
tcatcctcttacagaccctcntacaagatgagatagcagaagactatggtgaattgggaatgaagctgtcggaaatccccttgactctgcattctgtttcagagctggtgcggctctgcttgcgcagatctgatgttcaggaggaaagcgagggctcagacacagatgccaataaagattcagctgcatttgaggataatgaggtacaagatgagttcctagaaaagctggagacctctgaattttttgagctgacgtcagaggagaagctacagatcttgacagcactgtgccaccggatcctcatgacatactcagtgcaagaccacatggagaccagacagcagatgtctgcagagttgtggaaggaacggcttgctgtgttgaaggaagaaaatgataagaagagagcagagaaacagaaacggaaagaaatggaaggctaaaataaagaaaatggaaaagttgagaatgggttaggcgaaactgataggaaaaaagaaattgtgaagtttgagccccaagtagatacagaaggtggtgtaa

SEQ ID NO: 64661 - DNA, 602 bp, Homo Sapiens
  misc_feature (404)..(420): n is a, c, g, or t
acttcttgtcatttcactttattcatctatcatattagcttttacagttaaaaaacaaaacagttaaagatactgtcaatttggaaatgagaaattccagttccgaaacaaggcaggtatgcccctaaccctgtcattcatcaagttagtcagtctggacagatgaaggtgctggcatctgattacctcctggtcataagccagaatagcagatgggaaagactgactccaaaaacacagccacaggagtaagcatggcagcatcaacactttgtcagttctccccagcagtcaagctctctatgtgacaccttgaagactccattaattccttcatttcttctttcatttttccattgtccatccattttcatttgtccatcaaacctttagtgaatatggannnnnnnnnnnnnnnnnggccaggctcaatgcagggtaatgatgagaagggagaaagaagtctgagtcttgtccctgtcctcaagcttatagggagtaaacaaagttggttataatgaaattaacagagaatacaactgcttccacttattgagcacctgatgccagatgtacaatagttctcaaggtagggtttgtct

SEQ ID NO: 64662 - DNA, 283 bp, Homo Sapiens
cagtcctatttatctgcagtcgtattaagtcctattgctagaataaggttactacaaaaaaggttatattctgaaagaaaaataactgacattatatataaccaattaatttaaagtattgccatttaaattacacactgagagcatgtcctatgcagacatagatttttctgttcatttatttttcttcattgcagtggattgatttgataaatagatgtgttgaattactacatttgctgtacatattatttaataaactttattcagaattgcgtggcaa

SEQ ID NO: 64663 - DNA, 647 bp, Homo Sapiens
  misc_feature (567)..(591): n is a, c, g, or t
cttcacagattttcctaaagaaacttctgactccctttcccttaccctttcctcttcttaatgctctgttacgaaagaaaaagctgatgttgctgttgagagtctcataccaggactggagcccccagttccccagcgcctcccatctcagacggaatctgtgacctcgaatcgcacagattctctcaccggggaagattccctgcttgattgctctctgctctctaaccctactactgaccttctggaagagtttgcccccacagcaatctctgctccagtccataaagctgcagaagatagtaatctcatctcaggttttgatgtccctgagggctcggacaaggtggctgaagatgagtttgaccctattcctgtattgataaccaaaaacccacaaggtgggcactctagaaacagcagtgggagctctgagtccagtcttcccaacctagccaggtctttactgctggtggatcagctcatagacctgtagccgtgacccagtagcagatgcagttctgtaaccttcataccgtaaaatacattttcattacggagttatgnnnnnnnnnnnnnnnnnnnnnnnnnctgcaaataaggggccctccagcccttttctcctaccccttgccttctcctgtaga

SEQ ID NO: 64664 - DNA, 464 bp, Homo Sapiens
cccagcttttgaaagattctgccaggtcaacactggtcctctacccctgctgggccagagtgagccagaaaagtggatgctgccccctcaaggtgctatctcagagaccaggtaaaaagcttgggttactgtgggttgaagcttgggagtgtccaggtgctgtagccaggtgtctctgtcatccgggacctctctgtccagcctcagggaccttcacagtgcctggcacagaacctcactcatgactgttgctcaggaacgagctgccctccccactgttctgactccttcccctatcacctggcgcctgtcctggctgagatctttgagatcatggagaaagtccagccctggagaaatcccactggctctgccatctgtccactccatcgcccaagccagaaacccgcctgtacaggattaagaagaaaataaaaaacacttgcattaccaacacccagaaa

SEQ ID NO: 64665 - DNA, 372 bp, Homo Sapiens
ccgtgtgtttattttttattatttttcaagataaggagaaagaaagtacccagcaaatgggcattttacaagaagtacgaatcttatttttcctgtcctgcccgtgagggtgggggggaccgggcccctctttagggacccctcgccccagcctcattccccattctgtgtcccatgtcccgtgtctcctcggtcgccccgtgtttgcgcttgaccatgttgcactgtttgcatgcgcccgaggcagacgtctgtcaggggcttggatttcgtgtgccgctgccacccgcccacccgccttgtgagatggaattgtaataaaccacgccatgaggacaccgccgcccgccttgggggtttctccccccgaaa

SEQ ID NO: 64666 - DNA, 1043 bp, Homo Sapiens
  misc_feature (901)..(901): n is a, c, g, or t
caggtcagtgaggtccacacatggcctttgctttctgtgtctcttaaggctcttctgaccatcagtcattcctttgtccccctgccccttgtatgctgtgccatttgtttgaggggtagactgtttgctctgtagagctccccatattctggatctgtttgcatcctctaggtattcccttcaagagaattgcagctgagtctgattgtacctctagagctgaacattatgggagtacttcttatcttttaaactttctcatagttgccacatagagtcttagtgaattttgaacagagccttggctggtatgtggcattacagttagcaggaataagcagaagtgaagtgaccttggaaagctccacttggcccataagcgctaacactgtcaggagactctacttttgtttcttggctattagatgggacctatcatgggaaggttgaggttgtggaaatgtatcttgctttttcacaccacctttctctttctttcaggattttcttactggagtgcaatgtgagagaagtacgagttgctgtggccaccattctggagaaaaccctagacagtgccttgttttatcaggataagttaaaaagccttcatcagttactggaggtactacttgctctgttggacaaagacgtcccagaaaattgtaaaaactgtgctcagtactttttcctgttcaacacttttgtacaaaagcaaggaattagggctggagatcttcttctgaggcattcagctctgcggcacatgatcagcttcctcctaggggccagtcggcaaaacaatcagatacgtcgatggagttcagcacaagcacgagaatttgggaatcttcacaatacagtggcgttacttgttttgcattcagatgtctcatcccanaggaatgttgctcctggcatatttaagcaacgaccacccattagcattgctccctcaagccctctgttgcccctccatgaggaggtagaagccttgttgttcatgtctgaagggaaaccttacctgttagaggtaatgtttg

SEQ ID NO: 64667 - DNA, 508 bp, Homo Sapiens
agtattagattgttacttacgtagattttatttttactatgccttaccaagtacatccttaaacaaagtagtatgtacatgaaattgcacttaaccaaaactattgtgtaaaacaaattttaattcctcagggttttaatttaaactagtatttttttagattatttgttttaggtgatttaatggtactttaataactactaagaaatattggctatttcaatgtaagttataaggtggtacattcctaagggtatttatagttgatgataacatgaaaactgaaataagataaaatacaacgtgctaaatcttttatgtattctaactttaaaagacaagtgcaacaaagttagactgacttctatatgtgctcttttactctgataatattaaattaggactaacttatgttttataatgattataatttacatgcttatttttaaaatagtatatgtggacacatatatatcattatattaaaataaattctaccattttaaaa

SEQ ID NO: 64668 - DNA, 555 bp, Homo Sapiens
gctacgaatattgttgtagtacagaaacccactttgcccgttagtgtgtggatagtatgtgtgtgtccgcactcatgataacttgaatgttgaaccagacatagggttcatttttgaaaggttaaaccacactgtttcaggaacttgctccaaatactacttggttatcccttcctttaccagttagaactaaagagtgtgatgtatgaacacactgggttgggattttctgttgaggatatgcagggcattttggcatgaggcaaatacagaagcaagatttcattctacttggtgatttgaatcatgacagtcctcattccaatctctctttaattctctctggccctggccacactctgtatttgaaaatcttgtttttgctctttccggagcttgcctctctgtacgtgcatattgtgaaggtgtatacatctatcattcaaaggtccagtgtgtcagcagtggtgtcgccctcaggttagatgtggtcgtgtcctatataatcagtggcatcgtgtgtgctgtgtgcatagtttcattttaatgcccgct

SEQ ID NO: 64669 - DNA, 856 bp, Homo Sapiens
tggttccgaggtccggctgtggccattccaggccccctgtggcattgtccagcctctgtgcacacctggtgtcttcactcccaggggcagacagcagccactgcagctcctctcttcgtgagtaacagtagtgatagcagctggggctaacaggctaggctttgtgttcatgcgcatttggtcagcttctcactcgatcctccctaaagcaatggggaggcccccactagcccagttttcaggaagtcaactgggaggttagatgggggccagggtcccacagctactgatggcccgagccaggtcgagcttcctggtgtccagtccggatcccacttgcagatctcatgctctcagataggtgggacaagttcttttgtcacagtgctggctctgtcctgaggcctcattgctggctgggtgtgctctgctgggaaaagctttgcggggcttgcattggttaaccacagaagagaaggggactgtttggggtgcctctctgcagcctccccgtgctgggctggaagcacggtctactgtgttctctcaatgttcactgtactttaaaatgatttctttctaaagatgtaacctccacacctttctccagattgggtgactcttttctaaaggtggtgggagtatctgctcggggtggtgtggcccttggatgggtcaggtgggtgtgagaggtcctcggggaggtgggcgttgagctcaaagttgtcctactgccatgtttttgtacctgaaataaagcatattttgcacttgttactgtaccatagtgcggacgagaagtctgtatgtgggatctgtgcttgggttagaatgcaaataaaactcacatttgtaa

SEQ ID NO: 64670 - DNA, 532 bp, Homo Sapiens
agcattcatctaaaaccacagcacgctgcgacgctcagccctgcagtgggccctcaccagtccccgcgcctccgaatccaccctcccggggctgctcgtggctagcggggggcacctgcggggaccaagccagcccggccgaggcccgggtcccgcccgccacggccctcggggccccgcccacatctggcagaagccacgccccgtccgtgtgggtggggacggcccgccggaccgaaattcccagactgctgcctcaggcaacgggctttccgactccttggcttcttatgtgaggaaaccacagcgcggccggcatccagagagtcggttagccgcgaagttcccgccggacgaagggaccagccagcgccctgctagacagcgaggccggaagcggaggcgtggcccctgcgcggccccggaaaccagtgaggccggcgcgcgcccgccggaagccgcgaccccgacgcgccccccattgccctcggcgccggaagtggtcgcgggtcgttctgcttcctgcccgagg

SEQ ID NO: 64671 - DNA, 549 bp, Homo Sapiens
ggaccgccgtccctctgcgacctgtatgaagaggaggaggaggaggatgtgaagatggcggctggcagatgctgctggaagaggaaatcccggggggccgccgggctctcttcgacagctacacaaatctggaacgggtggccgattactgcgagaacaactacatacagtcagcagataagcagagagccctagaagaaaccaaagcctacaccacccaatccttagcaagtgttgcctatctgataaacaccttggccaacaatgtcctgcagatgctggatatccaggcatcccagctacgaaggatggaatcttcaatcaatcatatttcacaaacagttgatattcataaagagagagttgcaagaagagaaattggtattttgactaccaataaaaacacttcaaggacacataagattattgctccagccaaccttgaacgaccagttcggttatattagaaaacctattgactatacaattctagatgatattggacatggagtaaaggtgagtacccagaacatgaagatgggtgggctg

SEQ ID NO: 64672 - DNA, 596 bp, Homo Sapiens
  misc_feature (65)..(257): n is a, c, g, or t
ctgctccgcccctctctgctccctcctcaggaccatcctgagatcctccctataaaagggtgttnnnnnnnnnnnnnnnnnnnnnnnnnnnnnnnnnnnnnnnnnnnnnnnnnnnnnnnnnnnnnnnnnnnnnnnnnnnnnnnnnnnnnnnnnnnnnnnnnnnnnnnnnnnnnnnnnnnnnnnnnnnnnnnnnnnnnnnnnnnnnnnnnnnnnnnnnnnnnnnnnnnnnnnnnnnnnnnnnnnnnnnnnnnnnnnnnctaatgacagtgtgagctctagatggtgtgagaccaccccaaagccaagaaatggctacagccgtggaaccagaggaccaggatctttgggaagaagagggaattctgatggtgaaactggaagatgatttcacctgtcggccagagtctgtcttacagagggatgacccggtgctggaaacctcccaccagaacttccgacgcttccgctaccaggaggcagcaagccctagagaagctctcatcagactccgagaactttgtcaccagtggctgagaccagagaggcggacaaaggagcagatcctagagctgcttgtgctggaacaatttcttacc

SEQ ID NO: 64673 - DNA, 373 bp, Homo Sapiens
ctaaaatatgtagggtatatatatatttatgtatttaattttgctgtaagagacaccctttgtacgtggacttcagtgacgtggggtggaatgactggattgtggctcccccggggtatcacgccttttactgccacggagaatgcccttttcctctatgctgatcatctgaactccactaatcatgccattgttcagacgttggtcaactttgttaactctaagattcctaaggcatgctgtgtcccgacagaactcagtgctatctcgatgctgtaccttgacgagaatgaaaaggttgtattaaagaactatcaggacatggttgtggagggttgtgggtgtcgctagtacagcaaaattaaatacataa

SEQ ID NO: 64674 - DNA, 533 bp, Homo Sapiens
  misc_feature (341)..(349): n is a, c, g, or t
caggcttcagggttaagattgctgtttttctgtccttgctttggcacaacacactgagggttttttttattgcgggtttgcctacaggtagattagattaattattactatgtaatgcaagtacagttgggggaaagcttaggtagatatattttttttaaaaggtgctgcctttttggatttataagaaaatgcctgtcagtcgtgatagaacagagttctcctcatatgagtaagaggaagggactttcactttcaagtggaacagccatcactatcaagatcagctcatggaaggagtaaagaaaatatctcaaaatgagacaaactgaagttttgcnnnnnnnnnaatgacttaagtttttgtgctcttgcaagactatacaaaactattttaagaaagcagtgatatcacttgaacttcagtgccctcactgtagaatttaaaagccttactgttgattgcccatgttggacttgatggagaaattaaatatctttcattatgctttacaaaatactgtatatgtttt

SEQ ID NO: 64675 - DNA, 258 bp, Homo Sapiens
ttggcactagcttacccttcatcgatatctacttttccactctggactaccaggacacaactgtccacaagcttcaagagctgtactatgagatcgtgcatgtgctgagcctaatgctggaagacttgccccaggagaagccccagtccttggaaaaggtggatgagaagtagctgggcatggggcacccatgtgccgagagccttgcagaccatgacaggtccctattaaacacaggctttctgagttgtcctctca

SEQ ID NO: 64676 - DNA, 544 bp, Homo Sapiens
cagaatgttctcaaatgatttagttcaaatactgaaatacttaatgagcaattacttgatttttaatgatgacttcgaaggagtcatcactaggtgctttgtcctttttgtattctagttgcacccacctcttggattggatatagcaataacatttattggccgttgtgagctcttgatcccagtcattacccctgagaactaaaaatagatggttcttaattcaacttactgaaaatttccccaaacaatagcaaatctgacttttccctcttcagttgcctggtattaaggttggataaatgaagcatgcacagctacaggctttctacttaacttctgggtttgctattacaaatcctatttactctcatacccttctccttagtccttcatatttctctgcctctattcttctatactgcagatttttctcacctattgtacaaagaaattgcgatgtatattttcatgtaatttgattttggaattctgtcaccttatgtagtgagttcttccaaaatataattttttttcaataaaa

SEQ ID NO: 64677 - DNA, 824 bp, Homo Sapiens
  misc_feature (26)..(26): n is a, c, g, or t
  misc_feature (103)..(103): n is a, c, g, or t
  misc_feature (109)..(109): n is a, c, g, or t
  misc_feature (121)..(121): n is a, c, g, or t
  misc_feature (123)..(123): n is a, c, g, or t
  misc_feature (135)..(135): n is a, c, g, or t
agtcagcccttggcactacgtgcatngagtccttcagagcttatccgcatcggctcatcggcacgcatggagaagtctgaggggccaaccgagttgtcagccntcaggnactctgctgccngngccatcgtctcntgcaccccggtgcacctatcgacaagcttccattgcccgtcaccatcaagagccccctcaagtcctttctcgatggccaacggcatgaacgcggtcatgatgcacggccgttcctactccctggccagcggggccgggggcggcggcagcaagggcaacagcctcaagaggtccaagtccatccgtccaccccagagccccccccagaactgctcgcggagtaactgcaagatctcctagcggggatgggcggggccgcctgtgcagatgccaggagggctcgagctggacactcctggctggacgccaggccagtgccgcctacgtggagactgtccacacagctgcctcagaagcgccgggctttcctcacacctgagccgggtgcgaggaggagcatgcacggaccaagcgcggcaggcgggaggagggggcgcggctgggctgctggtgcttccgggaatcttggtctgaaacaagccgggcctccccagctgcctgggcttgaccggcggggagcctggttggcctttcttatttatatagagaacacttcacttttttgtacatttttaaggggccttcagggaagcctgggtgtggcccggtggtggtgcactggtgacttcatggccacgccagctgcggggacgcaacttgggactcctcgagaggggactcgcggccgc

SEQ ID NO: 64678 - DNA, 566 bp, Homo Sapiens
gccaagaagggtttttccttgaagatagtcccaccctggcccttccccttccccctttcctgtgccccttccagggcctgcttgggcccacgagcacccttggcctctggggctgactggtgtctttttccgtgcatcccttgcagggtgcagcccggaatcccgaggatgtggaccgggagcggcgagaacacgaacgcgaggagaggatggggcagctacggggtccgcgacccgagccctgccccctggcccacccacgggggccacttgccaaccgggtccgcagtgccgccgagcccgtggcttccacgccagcctcccgcatccagccggctggcaatacttctcccagagcgatctcgcgggtcgaccgggagaggaaggtgagtatgaggctgcacaggggtgcgcccgccaacgtctcctcctcagacctcactgggcggcaagaggtctcccggatcccagcctcacagacaagtgtgccatttgaccatctcgggaagtgaggagagcccccattggaccagtgtttgcttagtgtcttccctgtattttcttta

SEQ ID NO: 64679 - DNA, 431 bp, Homo Sapiens
actgttgtcaaaagaaaactaatgaataaattagtttgtcattctagaatttacagttctaagattagtataaagagtatatagattgttaatccccaccagctagactttgaacttaagtcagacttaaagatttgagaaattatttgtgtcgtttactagacgtgatttttagttctgtttgattatatttcctacacaaacttcttatttaacaggatagcctactaaattaaatgtttcttatttcacttaactcatttgattaacctgtattctaaaacatttggggtttttccccctattcagttttaatcttggaatatgcatttgtaaattgtgatgtcattgagactatatttatatttgacttggcaacattcacatgtcataagccttagtgcagagaagcttggctcttctccgagtgt

SEQ ID NO: 64680 - DNA, 326 bp, Homo Sapiens
cgtggggcccattatttacgacccggcttccttctatggccattccgagtttgaactggcaatcgccttgatgtttggggggttccccagatccttcttcaccgcctaccaccggaagatccccaaggctccgggcttcgaccagcggctgctgctctaccagctgtttaactacctgaaccactggaaccacttcgggcgggagtacaggagcccttcgttgggcaccatgcgaaggctgctcaagtagcggcccctgccctcccttcccctgtccccgtccccgtctccgtctcctcgtcctgcctgtagatgtaccgactcga

SEQ ID NO: 64681 - DNA, 330 bp, Homo Sapiens
atctcaggccaggacgacgaccgagacggtgagggcggccaccgctggggagggaggcccgggctcaggcctggaagctccctattggatcaggactgcaggcctgacagtgatgggttaaatctaagcagcatgaactcagcaggggtttctgggagccctgagcccccaacatctccaagagcccctagagaagaaggactccgggagtggggtagtggctctccgccctgcgtcccaggtcccccggagggacttcggcctatgtctgactctgtgggaggagctttccgtgtggccaaggtgagctttccctcgtcctgcctgaga

SEQ ID NO: 64682 - DNA, 457 bp, Homo Sapiens
cttttaattacgatggtgtcccgcggaatcaaacttcagccgtcacagctgaggactggcttcgtggtccctgatgggagagcatgaccagaagcccttggagaccagctcttccaaagtcaaagccaagaccattgtgatgattcccgactcccagaagctcctgcgatgtgaacttgagtcactcaagagccagttacaggcccagaccaaggctttcgagttcctgaaccactcagtgacctccagaaggaactgagtgatatatggtctgctgtgcacgtgctgcagaactccatagacagcctcactttgtgctcgggggcctgtcccaaggcctcgagcctaagaggccacaaggtgcaccagtgcctgagccctccactcccctcgtgggactctgactccgactgtgaccaggacctctcccagccacctttcagcaagagctggtcgc

SEQ ID NO: 64683 - DNA, 243 bp, Homo Sapiens
caaagtaggcaattctttgtatattttaaggcaaataatcacttgccctctggtgccttccatgcgtcgcataagcactcttgtcaatcatggaattggaaaaaaagatgtacatttagttaaacaagataacactatttttgtagcatgattttagattgtgtccttttaatattgttttcaaccatggtagttttgaggttttggccattttctctttaacacttcgtatgtattttaaag

SEQ ID NO: 64684 - DNA, 536 bp, Homo Sapiens
catgagactgtcttttatgcggggcgagataacgaggcatggacgtgttgtgagcggaggcctagcctgttcaaggtctgaatttttacccctagaatgtaagaagcatgggagcagggactttgttttgctccctgccatatccacagccctagaaaaacgtcgggccattgatagctctcagtaaatgcttgacaagtaagtgaatgaacgaatgcacaattaatgaaatgagggttgcgtcaatgaataactgggaatctgactcctgcagggagccttcagcccacaggtgtatgtaagacccgccccgcctctcatccttcgggctcccacccccgccgttaggctgcggttcgcgccgcggtcgccagagggcgcggagcggcggggcttcccgcacggagggctttgcgttaggcaccgcgtggggcggggctgcggtcgggctcccagactgctgggccctcatcggctgggcctcgtcgaccggcaagcggaacgcggcagcggggctgggcctgtgcggcggccgc

SEQ ID NO: 64685 - DNA, 512 bp, Homo Sapiens
  misc_feature (304)..(331): n is a, c, g, or t
ggactgaaggagccgggcccagcgagctcccgggaggtgtgtggacatcagccctgacggggaaggcgagccaggagcctgcaggcctgaaccagggtgatgctgaagatgatgaccttcttccaaggcctctagagccatcagcctgtgccaggcaccctcgacttgcctagaggcccccaaaagttgcagtccacatcagaggcagagtcacgaggcttccatgtcggaggcctcctctgaggacctggtgccacccctggaggctggggcagccccatatagggaggaggaagaggcggcnnnnnnnnnnnnnnnnnnnnnnnnnnnntccaaaggcctggccaatgtgttctgcgtcttcaccaaagggaagaagaagaagggtcagcccagctcagcggagcccgaggacgcagccgggtccaggcaggggctggatggcccgccccccacagtggaggagctgaaggcggcgctggagcgcgggcagctggaggcggcgcggccgc

SEQ ID NO: 64686 - DNA, 704 bp, Homo Sapiens
gtctcgggcgcgggcgggagggcacctgtaggtccctgggagaggcagcctcggatcggcccctgcccacctcacgctgcgttccatgctggccccaggcgatgtcagtcctgctgcaggccaggactagttccacggccctgagcatgcgttagccccttcttgcctccatgcctcagtttacctcggagtgagcttgcgggagacgtctccctgcctggccggggctggctctgtcgtagcggagggcagcggtggtgcagagccgggagccggagccggagccgcgccgcgccgcaccatggcgcccaccctggccactgcccatcggcgccgctggtggatggcctgcacggccgtgctggagaacctcctcttctcggcagtcctcctgggctggggctcgctgctcatcatgctcaagtcagagggcttttactcctacctgtgtaccgagccagagaatgtcaccaatggcacagtgggcggcacagcagagccggggcacgaggaggtgagctggatgaacggctggctcagctgccaggcccaggacgagatgctaaattttggccttcactgtgggctcctttctgctcagtgccatcaccctgcccctgggtatcgtcatggacaagtatggcccgaggcaagctcaggctgctgggcagcgcctgcttcgcggtttcctgcttgctgattgc

SEQ ID NO: 64687 - DNA, 310 bp, Homo Sapiens
ctggagacccagggaggcccatggtggagatcatttgtaaggaatggatcatggtctgggtttccaaaactaccctagtacagtgaatgagagaaatctgcctggaaattgtttcagaaccatgtacctttatgctttgtgattgtgaaacattgacttttttgtaaccccaaaatgaaaactgtttagtaaaggggatctattttgtgtgttttgaaacttaggtgcaatgtcccctggaaaaagctaaagaaatgtatatgttcaatgacattttaaaataaaatattatatatatgtaaataaaaaa

SEQ ID NO: 64688 - DNA, 471 bp, Homo Sapiens
  misc_feature (379)..(379): n is a, c, g, or t
tttaatataaaaataaaaactttattctgtctcatcaaaagctaccagctgctgaagcaaacatgaagggtggcggggggggcagggattctagggccccagagtaagtagaccacactgagtcccttttggtcctcctgcctggatagtgctgagtggaaggggaggagctgggacccaaaggtcttggcttaggtgtgggagcagagaacatgagacctcattatggtcctaaatctccaaaggctctactggacaaacaagcttgatgttaagagagaggggaatgagtgacattgagaaacaagatcacccttgaagagctgtctgctggagagcatacacacgatcctggagctgggcctcttcctgatgcctntccagggcttgcagtggagtggacagagaatcagaactgagttctaataccatacctgccacttactccatatgggacctgaacctaagttt

SEQ ID NO: 64689 - DNA, 770 bp, Homo Sapiens
  misc_feature (158)..(158): n is a, c, g, or t
  misc_feature (205)..(205): n is a, c, g, or t
  misc_feature (208)..(208): n is a, c, g, or t
  misc_feature (212)..(212): n is a, c, g, or t
  misc_feature (240)..(240): n is a, c, g, or t
  misc_feature (245)..(245): n is a, c, g, or t
  misc_feature (261)..(261): n is a, c, g, or t
  misc_feature (288)..(288): n is a, c, g, or t
  misc_feature (314)..(314): n is a, c, g, or t
  misc_feature (329)..(329): n is a, c, g, or t
  misc_feature (335)..(335): n is a, c, g, or t
tggttatatgtcatttttgaatggctgtggttggtgctttactagacggggttggggctctgggtgttcttttcttgagtggtttcattggcagttatggcttggtctgctgattcctagggtttcgaggtcgtactgcgtgctcacgtggtggctgntgtggggtaggtgtgcgcaaccacaggcactatggtagcaccacctnggntacntacttagctttgggggtgctctcttgcntgggntttgtggtcctcaagntgtgtgaccatcagctcgcatggtggngtctcttccagtgcctcacaggccanttttggtccaaggtntgtgangtgctccagttccactttgggtttttgtttttgacacatttcaacactcacccaagattccatccctttggtgggaagatgcgttgaacccagggaagaacttgttgaaaaccgatgacccccagcattgaaatggactttgagatggcagcgtggtgccagtgtcagacatcctgtgtgtgatgatatgcactgatcacacaagactgccctttcctgagaagctgcgggcttcggtgtggaggggtggagtgctgtgatctcgacaacttactttcaaagacataaagcacagatctccgcacaggggatgtgtgtgttcctgatgtaatttgcataacttttctgtagtttgaaatgtttccaaataaatattggcaaggggagtggaaatgacaccaagaagcccctcatgctcatggttggacagagaaa

SEQ ID NO: 64690 - DNA, 483 bp, Homo Sapiens
tcaaccagttagaaagccagttcctgtgggtcgagtttaggcctttttggccatagttgagaattttgacttgggatactgggttgttggtgacaaataatgtcttccttttcccccttcccgcctggctcggttatgggaatagccgtcagtgcatccatgtctgtgaccaacacccagccagactaatgtacacagcagggagaaataacattcaaatggtggttcacacatctcatctcaagataagattcttagggttcactgctttattcaaaagtgttttcactgtagctccttcatatggaatatcaaaactgaagaaattcacatgtggaaatgcaaatagacattgattaatcaaggtagcatctttatgtaaatatataaataagtttgggcattgaaatgtaaactgtacagctaatagacttttctcctctgcaatgtgggttgctgtcatttcagtaatgtgtatgttta

SEQ ID NO: 64691 - DNA, 450 bp, Homo Sapiens
agtcggtacatgacttctgtcaccagactcagagacggaaccagagacgggccagagcatccccctcctccaccatgaaactcgctgtcaccctcaccctggtcacactggctctctgctgcagctccgcttctgcagagatctgcccgagctttcagcgtgtcatcgaaaccctcctcatggacacaccctccagttatgaggctgccatggaacttttcagccctgatcaagacatgagggaggcaggggctcagctgaagaagctggtggacaccctcccccaaaagcccagagaaagcatcattaagctcatggaaaaaatagcccaaagctcactgtgtaattagcatttagaagctgaagatccccaactgctccagcctctgccgctgccatgctttgagtccacgcccaccagccttgctggtggacagaagtctggaccga

SEQ ID NO: 64692 - DNA, 651 bp, Homo Sapiens
cgccaacatggcggcgcccagtggcgtccacctgctcgtccgcagagtttctcatagaattttctcttcaccactcaatcatatctacttacacaagcagtcaagcagtcaacaaagaagaaatttcttttttcggagacaaagagatatttcacacagtatagtttgccggctgcagtttcttcagctcatccggttcctaagcacataaagaagccagactatgtgacgacaggcattgtaccagactggggagacagcatagaagttaagaatgaagatcagattcaagggcttcatcaggcttgtcagctggcccgccacgtcctcctcttggctgggaagagtttaaaggttgacatgacaactgaagagatagatgctcttgttcatcgggaaatcatcagtcataatgcctatccctcacctctaggctatggaggttttccaaaatctgtttgtacctctgtaaacaacgtgctctgtcatggtattcctgacagtcgacctcttcaggatggagatattatcaacattgatgtcacagtctattacaatggctaccatggagacacctctgaaacatttttggtgggcaatgtggacgaatgtggtaaaaagttagtggaggttgccaggaggtgtagagat

SEQ ID NO: 64693 - DNA, 472 bp, Homo Sapiens
gcaagcattgcagtgcagagccctagggcattgcctacaggaagtctggggacatgtgggagccgatgacctatgccaagagtgtgaggacatcgtccacatccttgacaagatggccaaggaggccattttccaggacacgatgaggaagttcctggagcaggagtgcaacgtcctccccttgaagctgctcatgccccagtgcaaccaagtgcttgacgactacttccccctggtcatcgactacttccagaaccagattgactcaaacggcatctgtatgcacctgggcctgtgcaaatcccggcagccagagccagagcaggagccagggatgtcagaccccctgcccaaacctctgcccgaccctctgccagaccctctgctggacaagctcgtcctcctgtgctgcccgggccctccaggcgagcctggcctacacacaggatctctccgactacagagagttcta

SEQ ID NO: 64694 - DNA, 318 bp, Homo Sapiens
tgtctttccctgctgctccatagccaaggcttcaagctctcaggacttggctatggaggaggacgaagaaggcaggagctcatccagtccagccttacctacagcaggaaactgcaccagctagactccattctgggaccatctccaggagtccatgagaggctttcttctcctatgtcccaattctcagaactcagatgtggctagaccaacccctgggaaactgccccagcttctcccaccataggggccggacccccatcaccagcctagatccagggctgcctctgcctcttagggagcagagagcagcaggca

SEQ ID NO: 64695 - DNA, 925 bp, Homo Sapiens
gtggatgctgtggaaggctgttcctgtagtcatttgccttgtgtagcttccagggaagctgcccgggagtgtcgcaggaagaagaaagaatatgtcaaatgtcttgaaaatcgtgtggctgtgcttgaaaaccaaaacaagactctcattgaggaactcaaggccctcaaagatctttattgccataaagtagagtaactgtctttgacttggaccttgtttactctaatcaaggcaggagatgcagcagtcctacttattgccatgtggacttgtgggaaggacacgtgtgacccttaagaatccagtttggattagtgtttgaaattgaattgggaatgttgttccaggatgtggaatgcagccgtgatcacacttaccgagcttactttgatctgtttgtcaatagcatgcaaaaaatgctttgtttgccctttgcttctgctttttttcagggaagctgccaaagaatgtcgacgtcgaaagaaagaatatgtaaaatgtctggagagccgagttgcagtgctggaagtccagaacaagaagcttatagaggaacttgaaaccttgaaagacatttgttctcccaaaacagattactagaaatatttaactatgaactgaaggcagcatgtatagttggcttttgaaggaatccagtatattagctggcaagaatggtggcttcttttctttgtatcattcatcttcttttttaatcacttaacattcctaaaatggcttcactgtccgtagttaagtcgtagctataacttcaaattttttaaaaaagacaaactgtaaaaaatgtgtgtattcttaaaatgcaatatttgtaaggcttgttccaatgccacatacttgcagctcccattctatgtgtcatcaatagtgtcctatgcaataaaattatttgcaggtcttt

SEQ ID NO: 64696 - DNA, 576 bp, Homo Sapiens
cagaggctgaggaagaattgggacctagcttggcctggtttatcttgcagattatggactttcctacagatattgtcccaatgggaaccacaaacagtatcaggaaaatcctagaaaaggccataatgggacaatagagtttaccagcttggatgcccacaagggagtagccttgtccagacgaagtgacgttgagatcctcggctactgcatgctgcggtggttgtgtgggaaacttccctgggaacagaacctgaaggaccctgtggctgtgcagactgctaaaacaaatctgttggacgagctcccccagtcagtgcttaaatgggctccttctggaagcagttgctgtgaaatagcccaatttttggtatgtgctcatagtttagcatatgatgaaaagccaaactatcaagccctcaagaaaattttgaaccctcatggaatacctttaggaccactggacttttccacaaaaggacagagtataaatgtccatactccaaacagtcaaaaagttgattcacaaaaggctgcaacaaagcaagtcaaccaaggcgcacaataggttaatcg

SEQ ID NO: 64697 - DNA, 323 bp, Homo Sapiens
gagtcagcggccgaggaggagagcaactcggacgaagatgaggtcatccccgacatcgacgtggaggtggacgtggatgaattgaaccaggagcaggtggcagatctcaacaaacaggccacgacttatggcatggccgacggtgacttcgtcaggatgctccggaaagacaaggaggaggcagaggccatcaagcatgccaaggctcttgaggaggagaaggccatgtactcgggacgccgctctcggcgccagcggagagagtttcgggagaagcggctgaggggtcgcaagatcagcccacccagcatgctctcaaacac

SEQ ID NO: 64698 - DNA, 534 bp, Homo Sapiens
gagcggaggaggtctacagctggtcggagtctcaggaccaggtcttccctacgctggagcagcggggagacagccaccatgcacatcctcgtggtccatgccatggtgatcctgctgacgctgggcccgcctcgagccgacgacagcgagttccaggcgctgctggacatctggtttccggaggagaagccactgcccaccgccttcctggtggacacatcggaggaggcgctgctgcttcctgactggctgaagctgcgcatgatccgttctgaggtgctccgcctggtggacgccgccctgcaggacctggagccgcagcagctgctgctgttcgtgcagtcgtttggcatccccgtgtccagcatgagcaaactcctccagttcctggaccaggcagtggcccacgacccccagactctggagcagaacatcatggacaagaattacatggcccacctggtggaggtccagcatgagcgcggcgcctccggaggccagactttccactcctcgctcgatctacgtacgagg

SEQ ID NO: 64699 - DNA, 560 bp, Homo Sapiens
cagaacaaactgcaaaggctatagcagctggaaccagtgatcactttactaaaccatctcctagggcagatgtgtttcaaagacaaaggatacctgactcatatgcacgacccttgttgacacctgcacctcttgatagtggtcctggaccttttaagactccaatgcaacctcctccatcctctcaggatccttatggatcagtgtcacaggcatcaaggcgattgtctgttgacccttatgaaaggcctgctttgacaccaagacctatagataatttttctcataatcagtcaaatgatccatatagtcagcctccccttaccccacatccagcagtgaatgaatcttttgcccatccttcaagggctttttcccagcctggaaccatatcaaggccaacatctcaggacccatactcccaacccccaggaactccacgacccgttgtagattcttattcccaatcttcaggaacagctaggtccaatacagacccttactctcaacctcctggaactccccggcctactactgttgacctatagtcagcagccaca

SEQ ID NO: 64700 - DNA, 1052 bp, Homo Sapiens
gagtcctttaaattctcagttatcaacgccaaggtttaaggtctagatagggtttgctatagggtttgctctgacaatttttaaagcttttggattgttctaacatagcttaagctattggttcctaaaaatcccaaatcaagatctatgtagaatataaaggaagcctgaaccaatccttccacatactgttaagatgtagacttggaacaaagctgttgggacccagagcaatgaatttttgaactgaagctactggtactccccagcaccacctcatactaagaattcctcactctgacatgacagtattttttctgaccaggagctgaaagaccctgacattcatgatccaaagatataagaaattttgatatgtctgcatgcagcacagaactttgaacctaggaggcagtcaataaatacatgagaaattcagctgtcattcagttactcttaattctttataaaactttaaatgataccacatatttgtttgtttaaaatggctttcccaaaatcaaagtagactaaagcagccatctttaaaatccaggatcatcaatgctattaacagtatcaggtaaaaagtacactttaaaatattttaatcaggcagagttttatggatagagaatagaagagaaaggtagtaaatattgaacatattccaatataggaacctatctctgttttagtacaaaatatttctgacatctgaactagaggtcaagagaataaattcatttgtatacatctgagcaacctgtctttcagcatgatcacagtatctagccttttctgacaccataatagttcattttatagggaataagccattaggtgtatataattgctttctagaaatgacctaatgtccccaaccactgtgtagtggcagatcactgtttcacagcatattttctcccaaggaaagtattcaaaagagactgcaactaacaagactcttatttcatcaaaatttaaatatttctgagttgtatttttaatgcctctttcttttctgcctaaatgcttagaaattataaagc

SEQ ID NO: 64701 - DNA, 534 bp, Homo Sapiens
agggcttgaagacgactggaactgggacacgtgggacgggcctgagcaggagggagactggagccagcaggagctgcactgtgaggaccccaacttcaacatggacgccgactacgaccccagccagccgaggaagaaaaagcgcgaggcccccttgacgggcaagaagaagcgcaagtcgcccttcgccgcggccgtggggcaggagaagcccgtgtttgaacccggggacaagacgttcgaggagtacctggatgagtattaccggctggactacgaggacatcatcgacgacctgccctgtcgcttcaagtaccgcacagtggtgccctgtgactttggcctcagcactgaggagatcctcgctgctgacgataaggagctgaaccggtggtgctccctaaagaagacctgcatgtacaggtcagagcaggaggagctgcgggacaagcgggcgtacagccagaaggcccagaactcatggaaaaagcggcaggtcttcaagtcactcttgccgagaagaggcagaacacg

SEQ ID NO: 64702 - DNA, 537 bp, Homo Sapiens
tgctttgggacggcggaactacggcgtctggccatggctccagtgaggacgaggcattccgatctggtagccgggcttaaaggactgaaggtcatcgatgtggcgtgtgggagtggggatgctcaaaccctaggctgtcactagagaacgggcaagtgtggtcttgggtgagatggtgactatgcggaaattgggcagaggtggtagtgatggctgcaaaaccccaaagctgattgaaaagcttcaagacttggatgtggtccaagtccgctgtggaagtcagttttccattgctttgacgagagatggcccagtttattcatggggagaaggtgacaaccagagacttggacatggaacagaggaacatgttcgttatccaaaactcttagaaggcttgcaaggggaagaaggtgattgatgtggctgcaggctccacccactgcctggctctgactgaggacagcgaggtccacagctgggggagcaacgaccagtgccgcactttacaccgtgcgcgtacacagtctcgtcatc

SEQ ID NO: 64703 - DNA, 1066 bp, Homo Sapiens
  misc_feature (125)..(142): n is a, c, g, or t
  misc_feature (165)..(401): n is a, c, g, or t
ccacgcgtccggttggccaaccatgcatcctccctagaaatgcatttgaatttgatttactaatcttttatttaggaaatttacatttttacattagtgagattggtcttttgggctattgtacnnnnnnnnnnnnnnnnnngagatggagtcttgctctctcannnnnnnnnnnnnnnnnnnnnnnnnnnnnnnnnnnnnnnnnnnnnnnnnnnnnnnnnnnnnnnnnnnnnnnnnnnnnnnnnnnnnnnnnnnnnnnnnnnnnnnnnnnnnnnnnnnnnnnnnnnnnnnnnnnnnnnnnnnnnnnnnnnnnnnnnnnnnnnnnnnnnnnnnnnnnnnnnnnnnnnnnnnnnnnnnnnnnnnnnnnnnnnnnnnnnnnnnnnnnnnnnnnnnnnnnnnnngtgtgagccaccatgcccagcctggttattgtattttgatattgggattttgctagctctctaaagtaaataggataactgtatatctttttctgtgcattaagcagttataacatgggaatgatttgttcatgaaaggttgaaagtctgtacttacagaacttttgagttcacagtgctttctggaaataatttctttataactgtcagtttcttttgtgactattatgttacctatttttaaatttaagcaactttaaattaaaaaaattgtttttaaaatatattcttccttttatgtttatttagtaaatttaggtaatgtatactttttaagaaatatttttattttgttcaaatttaaacatctgttgttagcagaaaattctaatagcaatttcttttctattaactttgccatttctaagttataggaaatttaccttctcttaattctaccactttttacttgactagacttgttaagggtatacattttctgttcagaaaactagtgtttttattggcttatctattgtgattttgttttaaaatatgttaatttctcaatttaggcttattattttgttttctgtagttttttgactttttgagactgatgcttattttttgcttgtatacaaatgaatgtgttgaagactttt

SEQ ID NO: 64704 - DNA, 657 bp, Homo Sapiens
gggccggagggccgcggtgtgccgcggggcagttgcgggttgtcataacggtccccgccggagtgaggcgaggccgcgtcgctcagttctggccgtctagggcccctgtaaggatgagagcgcagaggacgcagggccgctggaggcgcaggtaacgaagctagggtgcggttgggaccgcggctgagctttttccgggacccgtggtgctgaatggagaggacggagacgaagccgagccgcggctcctagcggcggcgccgatgctcgagctgtagctgccaggcgaggatgtgtggagcgcaggcggcgcggggtaaatgagaggtctcgggccccaggacccccggggcccgggatgagttagcgagggcagccgcgggggccagttccgaccgtgacaggccaaggcgacggccgccgcccgcccgccccttccgtgcagaagcagctgctcctttccgcgcccgcccgcctgcgctcccggccctggagaccatgaggttccgcatctacaaacggaaggtgctaatcctgacgctcgtggtggccgcctgcggcttcgtcctctggagcagcaatgggcgacaaaggaagaacgaggccctcgccccaccgttgctggacgccgaacccgcgcggggtgccggcggccgc

SEQ ID NO: 64705 - DNA, 813 bp, Homo Sapiens
taggctaggtacgaggccgggtggttaatcggcacgaggagcgccatggctgcgcccccggcccgcgcggacgctgatccttcgcccacgtcgccacctacggcccgagacacaccaggccggcaggctgagaaaagcgagaccgcgtgcgaggaccgcagcaatgcagagtccctggacaggctcctgccacctgtgggcactgggcgctctccccggaagcggaccaccagccagtgcaagtcagagcctcccctgctgcgtacaagcaagcgtaccatctacaccgccgggcggccgccctggtacaatgaacacggcacgcaatccaaagaggccttcgccatcggcttgggaggcggcagtgcctctgggaagaccactgtggccagaatgatcatcgaggccctggatgtgccctgggtggtcttgctgtccatggactccttctacaaggtgctgactgagcagcagcaggaacaggccgcacacaacaacttcaacttcgaccacccagatgcctttgacttcgacctcatcatttccaccctcaagaagctgaagcaggggaagagtgtcaaggtgcccatttatgacttcaccacgcacagccggaagaaggactggaaaacactgtatggtgcaaacgtcatcatctttgagggcatcatggcctttgctgacaagacactgttggagctcctggacatgaagatctttgtggacacagactccgacatccgcctggtacggcggctgcgccgggacatcagtgagcgcggccgggacatccgaggtgtcatcaagcagtac

SEQ ID NO: 64706 - DNA, 534 bp, Homo Sapiens
tcatgggaaggttaagactggagcaaagcttttccaaggtgagcatattcagcgtttacctggaagtctcttcttcccacctgggctaatcaggttacaattttcaagggtaaacaaactaccagctacaggatagggaagtggtggtggaataagagaacatgatacctggaggaagggaagaaaccacaagcattttcctactgaaaaatagggtgacatgtcagtcaaattctgatcaactggaacttgagtttccagttagattccatacactaggagggagttttctatcaaaatcctgcagattgaagaagctggtttattagaaccagcctgtcgcttttcaaagctgcttaaaaataagatactgacctcacccctagagatgattcagtgggcctgggtggggccaagaaatccgtggtgttttgtaagcactgctggcgatttctcatggcagtaaagaccacactgagactgcactgattttgattaaagtacataggcttggctgtttttacacagctaact

SEQ ID NO: 64707 - DNA, 920 bp, Homo Sapiens
  misc_feature (116)..(116): n is a, c, g, or t
cccggttctctaattgccaacatgatctacgaaattatcaatttaaagaaaagatacagtatattcacatatacctccattgccctgggtgtatgtgagaatatttatttgcactnttatgtcagcacagcaggtgacttccatgtccagcttgagtgagaatgatgcattccaggcatttgtgtggtggttactaggtattggggcattgacttttgctcttctgatgtcagcaaggatgcggatattcaaagagactctctacaaacgatttgggaaacactccaaggaggctttgttttataatcacgcccttccacttccgggtttcgtcttcttggcttctgatatttatgaccatgcagttctattcaataagtctgaaccccttcaccctgtggcactggctgggcaccttgtttgtcttcattgggaccttaatgtacacagaggtgtggaacaacctagggaccacaaaaagtgagcctcagaaggacagcaagaagaactgaggcctgtctggagtacgtagaccagtgtcgtcgtgagggtgggaccctgtgaaggtctgaccaccgttttcgcttttgttaatgccgagctacccgcagtgttgagccagccgtgcaaaaggaaatcttcaggaggggacttctcacgttgctcagactgacacttgtagactaaatagaaaccccctcagcccttaaaatagaaaaagaaccggttcgcttcccccaagcacccccgtggaattcctgttcgggccgcctccggcccttgaaaaagcttttcctagacaattcggtttgggggccgcggggccacagaaagggaaaagggaaacaggggcccataactgggtttcccatagggaaaatcctggggcaaggaacaacggcgctggggaatttcccccc

SEQ ID NO: 64708 - DNA, 974 bp, Homo Sapiens
  misc_feature (502)..(502): n is a, c, g, or t
cagcatttgcagcagggggaatggaaataataactatgtatcttcttttcatgtaatttggtcacagaataaggtattcaagttaagtctaatccaagtcttagagatctttaagtatcctaaaatagcagcctaagtagtcatcatgtaaagaagttgactttcaggaatgtcagcattgacctctccttgccactgttactcagctaaacataacttgccattcttaaaaataaaaaagctcccacccagaaactctagtgatactcagttttgacctcttactgcttccatgtgggacttcttttcagcttttaaccattggaattttctacctgctatgttcctctctggaaaatatcaatttggaaatgctgcctttcaaatcaatgccatgatcatccatattgttgagtttgttgttggtgttccagaagtgtccccattttacaactttatgcacacacctggcaaatcattaacatgagcattcaacagtacntgggatgggtggggtgggggtagggggctcaccaacagaactggccagttgacattgcctgaaaaggcaccacctttaagggccagttgtggggttggtaagcacagttatgaaaatttctatctagcctccgttttgaatggttttaagaaattttgtatatggaggatgggaatgcttatatatttattgaaaatccttttatttgaaattaaaattattttggtatataattgtttgatatttggggagggtttttggagggggagataatgtcactgataaataaaaagctgttgattttgcaaaaaagtactgctagtgactgataaggatgcctttgttttgtacctgaaccaaatccttggttttacctttccttaatccaaaatatttaggcatctgaacatttttcaccaggattttcattatataccggggatttttaatttggtgccaatactttacaatt

SEQ ID NO: 64709 - DNA, 624 bp, Homo Sapiens
tcccaaaaggccgctggctctgtgcagaatcctgtctatcacaatcagcctctgaaccccgcgcccagcagagacccacactaccaggacccccacagcactgcagtgggcaaccccgagtatctcaacactgtccagcccacctgtgtcaacagcacattcgacagccctcgccactgggcccagaaaggcagccaccaaattagcctggacaaccctgactaccagcaggacttctttcccaaggaagccaagccaaatggcatctttaagggctccacagctgaaaatgcagaatacctaagggtcgcgccacaaagcagtgaatttattggagcatgaccacggaggatagtatgagccctaaaaatccagactctttcgatacccaggaccaagccacagcaggtcctccatcccaacagccatgcccgcattagctcttagacccacagactggttttgcaacgtttacaccgactagccaggaagtacttccacctcgggcacattttgggaagttgcattcctttgtcttcaaactgtgaagcatttacagaaacgcatccagcaagaatattgtccctttgagcagaaatttatctttcaaagaggtatatttga

SEQ ID NO: 64710 - DNA, 543 bp, Homo Sapiens
agtgggggccccccaggctcgcgcgtggagcgaagcagcatggtcagtcggtgcgcgctggccctggcggtgctctcggccttgctgtgtcaggtctggagctctggggtgttcgaactgaagctgcaggagttcgtcaacaagaaggggctgctggggaaccgcaactgctgccgcgggggcgcggggccaccgccgtgcgcctgccggaccttcttccgcgtgtgcctcaagcactaccaggccagcgtgtcccccgagccgccctgcacctacggcagcgccgtcacccccgtgctgggcgtcgactccttcagtctgcccgacggcgggggcgccgactccgcgttcagcaaccccatccgcttccccttcggcttcacctggccgggcaccttctctctgattattgaagctctccacacagattctcctgatgacctcgcaacagaaaacccagaaagactcatcatccgcctggccacccagaggcacctgacggtgggcgaggagtggtcccaggacctgcacatcagcggccgc

SEQ ID NO: 64711 - DNA, 613 bp, Homo Sapiens
atgtgggggcgactgctcctgtggcccctggtgctggggttcagcctgtctggcggcacccagacccccagcgtctacgacgagagcgggagcaccggaggtggtgatgcacgccctcaatcctgcctgccccccgcggctacccaggccaagtctgtgccaatgacagtgacaccctggagctcccggacagctcacgggcactgcttctgggctgggtgcccaccaggctggtgcccgccctctatgggctggtcctggtggtggggctgccggccaatgggctggcgctgtgggtgctggccacgcaggcacctcggctgccctccaccatgctgctgatgaacctcgcgactgctgacctcctgctggccctggcgctgcccccgcggatcgcctaccacctgcgtggccagcgctggcccttcggggaggccgcctgccgcctggccacggccgcactctatggtcacatgtatggctcagtgctgctgctggccgccgtcagcctggatcgctacctggccctggtgcacccgctgcgggcccgcgccctgcgtggccggcgcctggcccttggactctgcatggctgcttggctcatggcggccgc

SEQ ID NO: 64712 - DNA, 703 bp, Homo Sapiens
ccacgcgtccgagaaaatgtgggctttttcccctctcccgtgttttgtttgtcctgtagatagagggaggaaagccgtgcagtggcaggcgggaccccctctggtggcgggaccccctcttgcggtggtcttgcggggccagccgggacctgtcactttattatttaaggagtgtgtgtgtagagtcgctggcttattaacagtattgtgtgtgggttgggtttttagtttgttccttctttttgaagtcccttcatttcaatccttgactctctctccccttcccttgcccagctctgttgaatgctgctgtgcgcgtgtgagggccgctctgcacacagggcccttgggttgtgtgaactgaaattctccctgtatttgtgagactcgcaggagtccccatctgtagcacaggcaatgccagtgccatgctgcagcctcagaaaccaggcctctcactccagcagcaggcagaaccgtgtctgtggtcgggtgctgtccacagctctgtctgccttgttcttgggcttgagctggatagaggtggggtctcttcaccttccctgaattcagaacagaccctgtgcctggccccagtgtgcccaggcaattccccaggccctcattgggagccctttggtgttctgagcagcagggcccaggcagcacatgagcagtgcccaggggctccctgcgtgaggac

SEQ ID NO: 64713 - DNA, 851 bp, Homo Sapiens
ccacgcgtccgagttttaatacagccatcatcccaagaccagaaggaaatgcacagttggataagatggggttcacaattatcagaaaatgcatcagtgccgttgaaacacgaggtataaatgaccaaggattgtacagagttgtgggggtgagttcaaaggtccagagacttctgagtatgttgatggatgtaaaaacatgcaatgaggtggacctggagaattctgcagattgggaagtgaagacaataacaagtgccttgaaacagtatttgaggagtcttccagagcctctcatgacctatgagttacatggagatttcattgttccagccaaaagcggcagcccagaatctcgtgttaatgcgatccatttcttggtacacaaactgccagagaagaataaagagatgttggatattttggtgaaacacttaacaaatgtttcaaatcactccaagcagaacctgatgactgtggcaaacttaggagtggtgtttggaccaactctgatgaggccacaggaagaaactgtcgctgccctcatggacttgaagtttcagaatattgttgtggaaatcttaattgaaaaccatgaaaagatttttcggacgccgcccgatactacattccctgagcccacctgcctgtcagcgtcacccccaaatgcgccaccaaggcagtcgaagagacaaggccagagaaccaagaggcccgtggccgtctacaatctttgtctggagctggaagatggtgacaatccttacccttccaaggaggacacccctaccagcagtctggactcactttcctccccgtctcccgtgactacagctgtccctgggcctcct

SEQ ID NO: 64714 - DNA, 416 bp, Homo Sapiens
  misc_feature (118)..(118): n is a, c, g, or t
  misc_feature (133)..(133): n is a, c, g, or t
taaatatgattttatgtgaagtccatttctttattctactaaggagagacacagaaataaagatcagaagcaaatgtgagcaaatctgttttactgttaactcaatttatgaacttgnaattgtgccacatgnctttttcctctaaaaactggatcctaggtgttttaattacctgtgtgcagctattttaaatagcattttacttgaataatatgtatgttgtcattgtttcatgctatactttgtgggataaaacttgggaatgagtgtggtaagaaatttataaagttttgcttttaaaacgtggacataactcatttttctagtttttgacaattgtgtgttttagtgtctagtctgcagagagctgtgtgattaataaacgtggaattaacagaatttcctctccctgtaa

SEQ ID NO: 64715 - DNA, 667 bp, Homo Sapiens
caagaattcaggaaaggcacactgatgttggggagcctcttaagagcctctaatgttctcccaaaaccagagttgagagtcggagtgccagtcgtcggggcccactattcctgaataagggacatgcaagggccagaagtagcttgactctcgcctaaatatctgtgcctttgcctgtcctttctcccactctactgaaacccggaacagattcccgcttgccttctgatgaagagaggttaggtaaagagagtttggaggaaaaaagacaccaggaggcaggctgtggggtaggagagggttctgagaggaggcagcaatccagaatacctccttttctagccagcatcccttgaacttttgaaaggttgtgcctaccactggctggcacaccagggcaatgatttccctgcagaaggaaggaaagaatgtttcacccttgcatccttcttggagaagctacagcctgtgctcagttgagtggttcacactcagactttggctttatggttttccttcctccttgtctttgccctgaccttgatcaacaggggtgaaaagaaccaccctgaggtttccatgcctctcccattttagtggtagcattttgtgtctttactccacccttcaccctagttccaccaaggttcacacaccagatgtaact

SEQ ID NO: 64716 - DNA, 973 bp, Homo Sapiens
  misc_feature (422)..(435): n is a, c, g, or t
gatatagaacaagtggtcaaaagcaggtggtacggtccggaatcccgggatatgtgaccacgcgtcgggtaaagtgtagcttatatgcaatactacttggaggaattcttctactaattgtatttaatgtggaaatgtatagtttcattgatttaatcataaataatggaaatggtctccaagaagttttatttttcattttttgcttatacactctgattcctataatacagtgctataagctatgcacagaaaataaaatgtttgaaatccaagaataatggttcttactgctaagagggagtaatagttattactaatgattttgatgggttgcattttgttgcaatgtttattccacttgcagttagaatatgaatatgttttatcactagtgtggctaaataaccaaacattgtgtnnnnnnnnnnnnnngccaagatttcatggttggtggaatatttcttaagcatctggcccctaaagagaccgtttcttaccaagcctgtaaactatggcttgatggaaattcttgtattttatttaggaatggctgttggtttactcaccacatctgtggaatcatggctataaatgtttggttacaaactctttgtgacttgtaatttaacttaatctcatctaatgtaaatattagattctgatgtcagtaacatcttccataggtataactggtgtcattatagtttcagagtactctgagtaatcaaatgggtaaagcggttgagtacatagtagattatacttatggatacgaattacacacggttgcgggtggggtcaggttcgagaagcagcttcggatgcgggttagataaagttgttgggggaaggatcaccagcgaggggttatacctggccagattgcgtgtttggtccaaccctttttgttttccaaatagtaatgtatcagcgggtagtaccccgaggggatggccgcttttatatcttt

SEQ ID NO: 64717 - DNA, 420 bp, Homo Sapiens
gttttcttcaagggaacccagatttagttctttacagaattttccagtgaaattaaaacatgttgtaatagctgtgtttgagatgaaataagaggttgtgggtagaggggaggcacctaaaggaaaagaggaaaggtgcctgggctacctatgcagataacctggagtggacttcactgtggactcgtggtactaaggcttggcctggacaggcagtctagggggtatgggaatacacggtgtggttgttcaactatttgcaaaggtcaaccaaatagaccacatgttcgcaaagtatcatctgaggaaattaagtaccttcttagccctctcagtcataaatttgaacaaattttaatacacttccctcatgcccttctatataaaacttaataccattagttccccattcttgacatt

SEQ ID NO: 64718 - DNA, 709 bp, Homo Sapiens
ccacgcgtccgaaaagaaagagattttatcaaaccttcacaattcctcatcagatgtgtcttatgtctctgatataaatagtgtgtatgaaagaattcgacttgagaaacttacctttgcacatagagctgttagtgtcagcacagatccaagtggatgcaactttgcaatcctgcagtcagatcctaaaacaagcctttatgaaattccagctgtgtcctcatcatccttttttgaagagtttggcaaactgttgagggaagcagatgaaatggacagcattcatgatgtgacatttcaagttggcaatagactcttccctgcacataaatatattttggcagtgcattctgatttttttcagaaattgtttctttcagatggtaatacttcagaatttacagatatttaccagaaagatgaagattctgcagggtgccatctctttgtggtagagaaggttcatcctgacatgtttgaataccttttacaatttatatacacagatacttgtgactttttaactcatggcttcaaaccaagaatacacttaaacaaaaacccagaagaatatcagggaactctgaattctcatttgaataaagtgaatttccatgaagatgataaccagaagtctgcatttgaagtttacaaaagtaatcaagctcaaacagttagtgagaggcagaagagcaaacctaaatcttgt

SEQ ID NO: 64719 - DNA, 487 bp, Homo Sapiens
  misc_feature (41)..(54): n is a, c, g, or t
ttttcttcctttgttttttaaaagtttatgacagttggctnnnnnnnnnnnnnnagcaaccccatcccagaatcctattttcctgggaagtccttaaagcccctaaccatcccacacttttcactttcctttccaccttattcattctctgtacttaccacagtattttgcacttgattacatatccttcactctcttcttttcatcccatcaccccctaaataggtcaggtgagggaggctgggaagaggtgggaggaggggcagaagtgaaggaagaataggaaggatattacctcttctgttatttttttaagaaacattgtttggtggcagcaatctccctgtccctatcactgttagaggcctaattttatatctataaatatattaaaaagcaagtcaaacttggatgtatcaaggtaaaattattgtcaaagtttaaatacctatatattctctgaatgcaataaagggacttaagagtg

SEQ ID NO: 64720 - DNA, 433 bp, Homo Sapiens
tcttttgtgtgaattttgttattatggtcaaagaatgcattcctaagttttcatttgagtacccaaatacacaaaaggtgtccctttaaggaaaataaagaattaagttttaaataacattacattttacaatctgacatctggagtatattgaacataggctatttcttgatataacactcatttaattgtggccatccaaatgaatattattgcagaatttatcttgttcataatgatttgtaaatggtgttatagctgaatacctgtgcatgaaaatgggcaatattttcatctgtttacttgtagtgccatagaggccaatatgcacaatattaactaatgccaagacatggctgtttaaaaaatttaatgttcaaacagttatcactgatgcttttgcactatttattaataaaatcatatattgtgt

SEQ ID NO: 64721 - DNA, 681 bp, Homo Sapiens
ccccggcacacttgtgctggcaagggagaaatgtgtgtgtgtgtcttagctttaaaacagtcacagtccttgctctatcatagatgaacaaatactttcttgatcattctgtaagaccaggaggttggtaagagtgactaaccagcctaactttaatacacatgtataaagatgttcacagagaaagatgctctgtagagaatttgctaccgaagttggctcaagaatttgtttttagtgttatttaccaagattaggacgtcagtggcttaaattctttgaattcttttcaaggactgcaagattatttgataaagagtagcatgaatcttgtgctctaatattacacagtaagttcaaagaaaggatgtaagtcaaagacttgttacatagagggaaaatggactgggatagaggacagactgatagtttctttctttcatatcacatgtatagagaaataattatatcagaaactcacaaacctagacatggaaaaacagattactgtctattgtcagcatcattttcatctgtaagtcactactggaatatatttttcttttaatttccagtgactttagaatacacacagtttttccgacttttcaaaaatttgattaaatggttttatagtataatattgggaccccataccgttagcccttgtatgtataccaa

SEQ ID NO: 64722 - DNA, 708 bp, Homo Sapiens
ggcagtaactatagcggtctcttaggtagcgaggcctggcatggcgaattcggcacgaggaacaggtttggtgccgcgggctggggtaggcggcggtatgggtccgtggactctggggcactgggaagatcgcgagtcgtgcgcatgggaaggtcctcccccggtcctccgggtcatctttgctcccgaggagcggcatatttcgcatctgcctgaggttagagttacttgttattggtaaatagccactatggagactaaggaccagaagaaacacagaaagaaaaacggtgggcccaaagctgcaaagaaaaagaagcagcatctgcaggatctccagctaggggatgaagaagatgtctggaagagaaatgccaaagcttttgcaattcagtctgctgtggggatggcttgatcctttcacaggactcaggatttgaagacaaaaaagcatcatattccagtggttgatcagactccactagagccgccaccaatagtgatagtggtgacggggcctccaaaagttggaaagagcactttgatataatgcctcattgggaacttcacccagcagaagttgaccgagatcagaggccctgtgatgatcgtgtcaggtaaaaagctccgactcaccattattgaatgtgggtgtgacattcacatgatgattgatctggctgaagtagcagatctggttgccaagct

SEQ ID NO: 64723 - DNA, 628 bp, Homo Sapiens
tgcaattcctaatcgccactttcatccccttccccagctaccaagaccaccctttccaattccacagcagcacaccttgttaaatcagcagcagaataatttgcctgaacaaccaaatcagataccacctcagccaaatcaggtagtccagcagcaaagtcagttgaatcagcagcctcagcagccacctcctcagctttctcctgcataccaggcgggacccaacaatgctttttttaatagtgcagttgctcatcggccacagtctcctcctgcagaagctgtaattccggagcagcagccccctcccatgctgcaagaaggccacagtcctgtgagagccattgcacaacccggccccattcttccttcacatctgaatagcttcattgatgagaaccccttgggattacgctataggggaggctctagatcgtatacatgggagtgccgctctggaaacattaacgcagcagcaggcacggttccagcattggagcgagcataatgcctttctcagtccgggcagcgttccttacccacaccatctccatcctcaccttcagcatcttcctcagccgcccctgggattacatcagccgccagtgcgggcagactggaagctcac

SEQ ID NO: 64724 - DNA, 621 bp, Homo Sapiens
aggatccccttacaacccacgatcacgaggacgtccatcccgtcgagaaccagtccgggatgtgggaaggcgtcgaccagaagattatgatattcataacagcagaaagaaaccaaggattgactatccccctgagtttcaccagagaccagggtatttaaaggatccacgataccaggaagtggacagacgattttcaggagttcgccgagatgtgtttttaaatgggtcctacaatgattatgtgagggaatttcataacatgggaccaccaccaccttggcaaggaatgcccccttacccaggaatggaacaacctccacaccatccttactatcagcaccatgctccacctcctcaagctcatcccccttactcaggacatcatccagtaccacatgaagcaagatacagagataaacgagtacatgattatgatatgagggtggatgatttccttcgtcgcacacaagctgttgtcagtggccggagaagtagaccccgtgaaagagaccggggacgagagcgagaccgccctagagataacagacgagacagagagcgagatagaggacgtgatagagaaagagaaagagagcgatatgtgatcgtggggtgtaa

SEQ ID NO: 64725 - DNA, 431 bp, Homo Sapiens
ttttaataaaagatttacattccccaacttgaagttcatctatttgatataagacaccttcgggggaaataattcctgtgaatattctttttcaattcagcaaacatttgaaaatctatgatgtgcaagtctaattgttgatttcaggacaagattttgtaaatcagttgctccaaaaactgattggtttttgtcacttcatctcttcactaatggagatagctttaccctttctgctttaatagatttaagtggaccccaatatttattaaaattgctagtttgccgttcagaagtataatagaaataatctttagttgctcttttctaaccattgtaattcttcccttcttccctccacctttccttcattgaataaacctctgttcaaagagattgcctgcaagggaaataaaaatgactaagatatt

SEQ ID NO: 64726 - DNA, 896 bp, Homo Sapiens
  misc_feature (69)..(128): n is a, c, g, or t
aacaaaacgagaaaacataaaggaaaagcgaaaggctatcttagaggcaagacttgccaaacttcgacnnnnnnnnnnnnnnnnnnnnnnnnnnnnnnnnnnnnnnnnnnnnnnnnnnnnnnnnnnnnttattgggcctttgccaccggagccagaggctgtgccaaccccacgtcctgctgcccagagtagcaaagtagaagtcattgtccaggagaggaaggacaccaagcctggagtgccacacatccgggagtgggaccgcggaaaagaattttcctttggatactggtcgaagaggcagtcagatctccgggctgagagagatcctgagtttgccccgccgtcagattactttgtgggtcagaagagaactggtttttccagcagccaggcatggagcagacctgggccagcacagagtgacccagggcagtgccctgaccagagccacggacctagccctgaacatacgtcacccactcctgcccccgacaacccaccacaagcccccacagttactttcaaaactctggatgacatgatttcctattacaaacaagtgacatgatctttcaaagcacgctgacttgggtttgtactttgacagtgcctttctctcccagagggagaaataactttaggaactgaattgtacctttgtcctgtcctttccctaggaggcacagacttcgggttggatttgtcagcaaggaggaaagttatggaaactttggccacttggctgttcattttattctaagtgggatagggacatacctacctggatttacatgtgagctgcgatagaatagaagtatttattctgtaaaattagacactgagatgtgcttataaccctgtttcatatctactcccacgacttactcatattt

SEQ ID NO: 64727 - DNA, 1021 bp, Homo Sapiens
  misc_feature (970)..(970): n is a, c, g, or t
  misc_feature (976)..(976): n is a, c, g, or t
tggaccggtccggaattcccgggatgagttttgcacgtggatcgccgttcgggtgggcgagatggagacagcccccaagccgggcaaggatgtcccgcccaagaaagacaaacttcagaccaagagaaagaaaccgcggcgatactgggaggaagagaccgttccgaccacagccggagcctctccagggcctcctcgtaacaagaagaatcgggagctccgtcctcagagaccaaaaaatgcttacatcttaaagaagtctcggatctctaagaagcctcaggtcccgaagaaaccccgagaatggaagaacccggagtcccagcgcggcttgtccggggcccaagatccattcccaggccccgcccccgtccctgtggaagtggtccagaagttctgtcgcattgacaaatcccgaaagctaccacattctaaagccaaaactcgaagccgacttgaggtggctgaagctgaggaagaggaaacaagtatcaaagctgctcgttctgagctgctgcttgctgaagaacctgggtttctggaaggggaggatggggaagacacagcaaagatatgccaggctgacattgtggaggctgtggacattgcaagtgcagccaagcactttgacttgaatctgcggcagtttggaccctacagactaaactactctcgaactggaagacacctggcttttggagggcgccgaggtcatgtggctgcccttgattgggtaacaaagaagcttatgtgcgagatcaacgtcatggaggcggtgcgggacatccggtttctccattcttgaggcactgcttgctgttgctcagaaccgctggctccacatctatgacaatcagggcattgagctccactgtatccgccgctgtgaccgagtaacccggcttgagttccctgccttcactttctcctgctacgctttaaaaaacagggtctaacctccctggagggncccccnggggggaagattgtggcagctctgaatgctccagctgggcggctt

SEQ ID NO: 64728 - DNA, 365 bp, Homo Sapiens
gatctatggaaacactgaactaaacttttatttctatgttgtggggacttggataactagcccaggaaatgactctggttttgattgtcctgtaatgggcagattgctccctcggttctcggtatcttgagcatctattgtgtgatcatgcccacacccttcccagagccattgagcccttagcctcaactatttccccaccccatccttttaccaggagagcacccttacttggcccggcttccagagaccctcgaaatctccgagaagataaacagctgctacctcttagtattattctgattttattttgcccttaactgattgttatatgctacaagggatttcagtggactgcagagtgt

SEQ ID NO: 64729 - DNA, 663 bp, Homo Sapiens
gtggttattatttttgtcacggaaagcatcctctccaaagttggagcttctattgccatgaaccatgcttacaaagaaagcacttcttattgaagtgaattcctgcatttgatagcaatgtaagtgcctataaccatgttctatattctttattctcagtaacttttaaaagggaagttatttatattttgtgtataatgtgctttatttgcaaatcacccactcctttacaaccatactttatatatgtacatacattcatactgtagaaaccagctcatgtgtacctcatatcccatccttaagagaagaaatgttataaagtagaactaaatataaattttcagaattaatgcattcaaagtaatatatcaaatccaggactttgttaacttcaggtaaaaacttcattagggtaatatcatctcaattttttcaaatgaaaggattctctaattagaaatttatatgtcagagctgttataaatttatcaactgtcaaatatgttctggacagctaaatcatttgagatttttggttttttgatttctattccctaacttgtgaagacaatgaaaaattaggcagaaatatttagtatctagtcagtatctgtagctacactgtataactgttcttcaataaaatggttcatattttat

SEQ ID NO: 64730 - DNA, 945 bp, Homo Sapiens
gtcgcgcctgctcgagcgaacgggaagagaaggtgccacgccctcctcccggattcacgccttgtgctgggcgacgccgctgcctgctgccccgacttgcccagctcgccccaaggggcgaggactgaggaaagcactgcctttctgttcttaaagcgaacctttgaaggcctgggcttcgcgcccggcttctttctcagccgttgtttccgttttttggtgacaagaggctagtaatctcgtcacggagccaacgtaaggtaatctgtgtttgagggtgtcctgtattcttttgtggcctgatcaaattttgattttgttttctttaggtgctggcctcgagcccaggtttttggtagacagcatcataaatttcaggccacgtctgccttattctcactggaattctcagtacatttcagtcaccttgtagactttgggaacaaataacgtgaatactggaacccacaagtttccaacctgttggcaacccctgttaacagggtgtcctgaagacatctaactttacttcagagacaatgtttctagggctacggtttttgttgtcgtcgttgtttttcacccccagttttttaacttccctcccagtttttaaaccgttttaaggttgtccacaaaataggcgaataggcacctcttatctctgttcaccttcttgaatcttcagtgccagagttcttcaatacacaacccaggagggatatgataggcggccagtggatataactccttttagaacaaaggaacattaacctttgataccatgcattgtgttcacgacttgggaaactcatggcattgaccaaaacccaagcataaaccctgttccagcgtttacctgcttatccaaatgtcagctggatacatactattaagagaagtgccccaaggtccacagggaaatacgtcacaccgcgctaaggc

SEQ ID NO: 64731 - DNA, 1021 bp, Homo Sapiens
  misc_feature (946)..(960): n is a, c, g, or t
ccagttgtgtgttatattaggttagccttactctctccccggacgtgacccatgttggaacagtcacgggcccgtgtcatgataccatctggtgtgagtagctgtttaccacaaccttcctcagcaggaataatcaacctgagtctttgaatatcactggaagactctgaatctcccctgtggagttctattccttggaacaccccccaatggaggtaccccccatccagagaatatcacgatcacctggatccagatgagcaagacttaaagaggggcctacccagaggagctaagcagagtccggagaacctacccagcggtcttccttcagattgcagaactgaagcccaggaagatgattgtatgactgtcatagggaaatacgtctgagtttttctgatacctatcaggattatgaggagtactggagagcttactacagggcatggcaagaatattatgctgccgcttctcattcatattattggaatgctcagagacatcccagttggatggcagcttatcacatgaataccatttatctacaagaaatgatgcatagtaacccgtgattataggatatacctgagaccatcaggaactgtcaaccaatgatacctttggatatccatcctcctcgacttatagtaccgtggtgtatagtggcatttctgataaacttgaaaagacttgagtctttccaactgggacacatccactttttcagattgttttgatttaggcccggtatattatcttcatttttaagagtttctttaagaaacttcatcagattgttgaaagataatttttgggacatagagctgaaagtttcagggtgcccttttctataagatcttccccaaagaaacatttaaaaagatgacatatacccccccttacttaaaaaccataaaagccatagatttgattagtaatattnnnnnnnnnnnnnnnggcggcccgctctagagtatccctcgaggggtaacagcttacgcgtacccaggcctttttc

SEQ ID NO: 64732 - DNA, 503 bp, Homo Sapiens
gagtccgggaggtccatctctttctcctcctccgctgcctgaaacaggcaagaacagagtggtctgcactagtcaccaggtgaggtgggaccaagaggccaggccgggaccgccatgtgctggaacctaacccaaccgtggtggtatcctacagtggggatgtgtgactgtggctcagtcatgccacctgaacctcaggtgtgccaccccaggaatttggaggtattgggcaaactaagagaggttgtatttgtaaactgtacccaagcacattagaatcccatcacctcccacttccatgagcccaaggccacaggtacctctcacctgcacagatctgccagcttcctccctcatcccctgcctaacaactgctgtcctcacaagctgaacgtgtgtggctgcttcagcaaatcatcaccacctccaatgtctcctctcccaagaggtcaatgactcctgttcccgtcactcttaccgcttctcttactacttgacctcgt

SEQ ID NO: 64733 - DNA, 700 bp, Homo Sapiens
  misc_feature (38)..(38): n is a, c, g, or t
  misc_feature (71)..(71): n is a, c, g, or t
  misc_feature (368)..(426): n is a, c, g, or t
  misc_feature (570)..(570): n is a, c, g, or t
gggtgcgggagccccgggtcagtcgccggagaccaggnacgcggggcctgctgcccccagtgagctcgggnaagctcttccacgcgcgggaggggcctgcgcggcccgagaaccccgagatccccgcgccgcagcacctgcccgccatcccgggtgaccccaccctgccgtcgcctcccgcagaggccgggctgggcctggaggactgtcggctccagaaagaacaccgagttcgggtgtgccggaagagcgtggaccgtagctgccccctggtggccctgtcggtgcagaacacggcggagagcagattcggcttccgcttcctcagctgcctgccggtcaccgcggacacctgccgcggcgcctannnnnnnnnnnnnnnnnnnnnnnnnnnnnnnnnnnnnnnnnnnnnnnnnnnnnnnnnnncgggctgtgtccgctgcatcatttattgaaccaacgtggcctacaaagtaaaccgcatttctgtacacctgagagctggaaatgttggtttgggttccggggcgtcctgcgccaagaggagggaacgggccgccctatcgcagngcgggaaccctacagatcccccggagacgggaggcctggaccgtacccccggcggcctcaggcgagcagctgggaccttgggccactgcggcctaggaggtggctcttaccctggggccggcaagggagt

SEQ ID NO: 64734 - DNA, 612 bp, Homo Sapiens
gcactcaaggggacaccattttctaatagccacagtgggagacaaatgtcataattcttgtcccaataagttgccttgtgaggtcattctaagttctacgtgccctaaaaccatgtacttactgaaaagcctgacaaactgttatgaaactgtgcaactgtcagaagaaaagttattccaccttagaatgtgctcttgtatttaagacccttttcaagaaatgagcatacaaaatgcacactgacaaattcaactgatcaaagactccacagtggagcatcaaagaaggcaggatgctttgttcagtcttgaacgtgttaacataaggtttattatgtgttacagaaaacctttctggaggttaagaaaatccatcagctattctagatttgttaacaagaaacaaaattttcaaaaattatcgttaaaagggatgtgtctatagggaaagactggtgttcaaattctgaagcaaatgccctgaggctcacagatttattatagcgaatcagacaggcgacagtacaggagaaaagtagtgcatgtgtagggagatggacaacatttgggacctctccttgtcgaagagtcgtgacagcaaaatcacttcct

SEQ ID NO: 64735 - DNA, 297 bp, Homo Sapiens
tgtgatctggtttacaatacgtaaagaactgaaaagaaagaaaaagtgggatttacgcaatctctttggattctggtcatgagaagaaggtaatttccagccttcaagaagacagacatttagaagaagagctgaaatgtcaggaacaaaaagaagaacagctgcaggaaggggctgcaccggaaggagccccagggggccacgtagcagcggactcagtgggtggccatcgatctggaccgtccctgcccacttgctccccgtgaacactgcgtacaaacatcctaacagttcaac

SEQ ID NO: 64736 - DNA, 652 bp, Homo Sapiens
cctgatgggtggcatcattgtggggctcattttgagattaccattctggggacaaccttcagatgagaactgctttgaggatgcggtctactgggagatgcctgaagggaacagcactgtctacatccctgaggaccccaccttcaagccctcaggaccctcagtaccctcagtacccatggtgtccccactacccatggcttcctcggtacccttggtaccctaggctcccagggcaggtgaggagcaggctccacagactgtcctggggcccagaggagctggtgctgacctagctagggacgcaagagtgagcaagcagcacccccacctgctggcttggcctcaaggtgcctccacccctgccctccccttcatcccagggggtctgcctgagaatggagaaggagaagctacaaagtgggcatccaagccgggttctggctgcagaagttctgcctctgcctggggtcttggccacattggagaaaaacaggctcaaagtggggctgggacctggtgggtgaacctgagctctcccaggagacaacttagcctgccagtcaccacctatgaggctcttctaccccgtgcctgcacctcggacacagcatctcctatgctctaaggtcccgcagacctctcttggcta

SEQ ID NO: 64737 - DNA, 759 bp, Homo Sapiens
  misc_feature (588)..(588): n is a, c, g, or t
  misc_feature (621)..(621): n is a, c, g, or t
  misc_feature (711)..(711): n is a, c, g, or t
gggccgtcgacagacgggcgaggaagggagagagtcggcggcgacaccatgtcatctcccagtccgggcaagaggcggatggacacggacgtggtcaagctcatcgagagtaaacatgaggttacgatcctgggaggacttaatgaatttgtagtgaagttttatggaccacaaggaacaccatatgaaggcggagtatggaaagttagagtgcgacctacctgattaattaccctttcaaatctgcattctataggattcatgaataacattttccatcccatcattgatgaagcgtcaggaactgtgtgtctagatgtaattaatcaaacttggacagctctctatgatcttaccaatatatttgagtccttcctgcctcagttattggcctatcctaaccccatagatcctctcaatggtgacgctgcagccatgtacctccaccgaccagaagaatacaagcagaaaattaaagagtacatccagaaatacgccacggaggagggcgctgaagaacaggaagagggtaccggggacagctcatcggagagctctatgtctgacttttccgaagatgaggcccangatatggagttgtagtagaaaaagcacctgctnttcagaaagactattatttcctaaccatgagaagcagactataatattcatatgtaaacaaagcaattctttgtattactaaaccaggtntttatgaataatagcattggtatatgtatattatatatcaccccttta

SEQ ID NO: 64738 - DNA, 393 bp, Homo Sapiens
actacatattcttttcaacagcaaccaaagaaaacatacctcaatactttcaaaactgaagacatagaggactcagatcaaagacaaaatttgatccatatattggtgctagattttgcaggaaaccccagcagtgtgaacgcatcccaacataggttaagagcaagttgaaaacaaaggccatggcattttgcccctgcatccttcagacagttatatcctccttttaaaccattgttgttgagtgtaagatgtccttcatgttttcttataaagtcagtgtttagaaatgttaccctttctaagttatatacagatcaaatgcttttttctttcacgtacatccatcatttgcaactgctgttcgtacacagaaacaggactgctcaaatg

SEQ ID NO: 64739 - DNA, 436 bp, Homo Sapiens
acaattttctgcatcttgaggaaggggcgtcattttcctgttcgcacaaaggcaccacaggggctaacagtgggcctgcaatcttagatcccatccttgccttcttcgagggatctcttgggaccctcctggttttaactgggaggcccagaccaactcctttcctgcaaaccaccctccaaggcctgtctcacacgatcaaggcagggaaagataggcaggagtcccctcacgaagtcctcaagtcctggcccctctggcgctctggaagcggtactgtatctctctccgaggcctggtcaagcactaagtgcatttacaaatctctgagaatgtttttttatactaaaattgaccattatattctactgtgagaagtgcagtctgcactatattgttttaaaaacgaagagaaagaagaaaaaggaaaacacag

SEQ ID NO: 64740 - DNA, 442 bp, Homo Sapiens
tccctcttcccggcgcggcccccggcttccgcgcgccgcccgccacccaatcctcttgctaccatgtccgtggagctcgaggaggccctgccagtgacgaccgccgagggaatggccaagaaggtgaccaaggctggcggctcggcggcgttgtccccatctaagaagaggaagaatagcaagaagaagaaccagccgggcaagtacagccagctggtggtggagaccatccgtaggctgggcgagcgcaacggctcgtcgctggccaagatctacaccgaggccaagaaggttccgtggttcgaccagcagaatgggcgcacctacctcaagtactcgatcaaggcgctggtgcagaacgacacgcttctgcaggtgaagggcaccggcgccaacggttccttcaagctcaaccgcgagaagctggagggcggcggggagc

SEQ ID NO: 64741 - DNA, 415 bp, Homo Sapiens
tcagcagcagcaacaccagcagcaacaaatgatgatgatgctcatgatgcagcaggatcccaaatcagttaggcttccagtctctcaaaatgtccatcctccaaggggccccctgaaccccgactcccagagaatgcccatgcaacagagtggcagtgtgcctgtcatggtcagtctgcaaggacctgcctccgtgccaccatcacctgataaacaaagaatgccaatgcctgtgaatactcccttgggaagcaattcaaggaaaatggtctatcaggagagcccgcagaatccttccagctcgccactggcggagatggcctcactccctgaagcaagtggcagtgaagcaccatctgtcccaggagcctaaacaacatgccttcacatcagcaccgggggatctctagagcag

SEQ ID NO: 64742 - DNA, 759 bp, Homo Sapiens
ctgcaccaggaaacggcccggatcccggcagcggcctgacccggctccacgctggccaggaggatgaaaggccccagctgggggctccttgccaccagtgctgtgtcttgagagctgccatcccggctggccgcccggatggcgaccccagcctcggccccagacacacgggctctggtggcagactttgtaggttataagctgaggcagaagggttatgtctgtggagctggccccggggagggcccagcagctgacccgctgcaccaagccatgcgggcagctggagatgagttcgagacccgcttccggcgcaccttctctgatctggcggctcagctgcatgtgaccccaggctcagcccaacaacgcttcacccaggtctccgatgaactttttcaagggggccccaactggggccgccttgtagccttctttgtctttggggctgcactgtgtgctgaaagtgtttccaatctctgggacctctgtacccaaactgaaactctaaattggggccctaactaattttccttttgaggttgtgggcataattgctgatctagaatacagtctgggtcccaacactgtgtctcagtgagactgttgatgccttgagatgaccatttcagatctgaatcccatgggtgtgagggtgatgggtactccaggactggcctatgctgtgttgtcgggcttgggttcggctttctcaggggccaggcatatgggttctagagtacctaccatgacctagaa

SEQ ID NO: 64743 - DNA, 338 bp, Homo Sapiens
gcattctattttactttattgttacagtttaaacaaattcagaaacgtggggtgtttctggctacttgagtaaaacgcactgcaaacgcaaagggaacaacgctgtaaacttaaatgatttctgaacagctcaggatcctcctggaggggatccttttcatctcacatattgattctgaacactatgttagcacctgctcccagaaggtcccttgacactggagcaagtcagaatatcttaatatcatagcttatttaacagcaggaaagcaactttaacatagacttgaggtttaggtagatctggtattatctagaacccaggcttaaattttgca

SEQ ID NO: 64744 - DNA, 474 bp, Homo Sapiens
actttccactaaatattaagtacagctgaggggaagaaagtttaaaaaagcttaaaaatgttagctaattctcatcattttcgccgcatttatccgtgcagcttttttgttcatatatttattcctgttaacttctctagctgaaagagaattttattatctgaatggagttccccatcaccttaggtacaaaatattagtgaaaagctggtgtaaatataagattgtattttcatgtcatgccatatttctaaatttatttttttgctagcattaaatttttcctatttaaacgatgctgtatagtatatgagctaatctgccagttactatgatattgcttgcttatactattcagtttttgttgatagctttaaagcatattgcacgcttttcatctagcaccctagtaatcaactattactctttttggaaaggatacactgacaaattcttaagttaatggctttagca

SEQ ID NO: 64745 - DNA, 528 bp, Homo Sapiens
  misc_feature (78)..(81): n is a, c, g, or t
  misc_feature (110)..(118): n is a, c, g, or t
  misc_feature (299)..(299): n is a, c, g, or t
  misc_feature (324)..(324): n is a, c, g, or t
ggggagggtctggccattttttgggttcttcccgcccacaacaaaaggtggggagacgattcccgggtatattcttcnnnnggctgtatagcaaaagttctgtgccattnnnnnnnnnagtgtgtggcagatagttacaaaatttggctgcgcagttcaattttgccctaaagtttctggctttgacggtctttctcccaatggagcacatttttatatgcaactaccgggcccaggagggaattacccccaacttgggcatatcagagaggagccaccctggcagtgcctgccccaantaatgacaaggtgtttggacaatcntctgtgttaaccggacagcgagaccaagtcaaacgttactactctgttgtatatccaggctggcccatatatccacgtaacagatacacttctctctttctcattgttaattcagtaattctaatactgtctgttataattaccattttggtacagcacaagtaccctaatttagttcttttggactaatacaattcaggaaag

SEQ ID NO: 64746 - DNA, 544 bp, Homo Sapiens
ttggggtatacaaatgtcagtctgagtggtgtcttactcctttgtttataagtgaatgattgtgcatgttttgtatgtcatagtatgtcgtcacataaaagggagggagcgaaaaaccattacattaagataatattggaccaaactacttacttgctctaaacagttacttgtaccccttaacctgtcttcaaaagttgcatatagttacagtagtgtataaattaaatattgtggaaaaacagtcttgtatttttctgtatgtgtgtatatatatataattatgtacttctggcaattctatctgtatttaaagatgtgacaatcttgacaccaattttaagaatagctgtgagaccgaattaaagataatccctaccaagtgaaaattgatgtgtgttaagagggtacagaattatcaactgatttggtcagttgcttccaatgctggttgatttccctcattgtgtaaacattgacaggtatgtgacaaatgggaaaaaaaatccaaataataaagtgacatattggtgttcagcaatat

SEQ ID NO: 64747 - DNA, 503 bp, Homo Sapiens
tacagcacagaatgagtatttatttaaataaaggagaaaagtgggctgcagcagccggaatagagcctcgtctggcaagtcggggcctgggacacttccctgggcctcaacaaggatcaggctgctggaaacacagtcacttgggagctgctgggctaggtccagatccgcttcagggttcaggtgggcatccgaaggtgtctctggtcttccagcgaggtgggagaggcctcatccatggcccagcggtccctgcagaagccagaaggtgcaggggccaggggtgggagcatcggagggagtcccagagccctggaccttgggcctagaccgcgtgataaaactgggttgagggatgctggaaccagttacgactgaagtcagtgtagacctgagctgggagggaacctgttagtctccccacctcttccctgaagagacaggcacccctcccagccgtggtcaacggagggagtggcacttctgccttgagtccccagggg

SEQ ID NO: 64748 - DNA, 545 bp, Homo Sapiens
atcgtttgcgttactctgtcacaaacccctcgcattgagcctctcgctgccggattggaacattagttcccgaaagagcctcacaaaccaccggccctctgggagccccgggccgtgtcccgaataggggcttgtcaataaccacagtggccaccgttcctctccgcaatgtccactggtcctgtcaatgtgtcctccaccgggttacgggccgttactcaggttcccctgtgccctggggtttcaccctaggcggggctgggcggggcaggcctcctttgttctccacaatctactgtctccgagtgtacacgttgcgcttgtttgtgtttgatccccctgacttgtagccagcttgtgtaagatcccttgcagaacgagaaagttaaaaacaagcccacccagtactcacaccatcaagtctgttatagagtgtacgactgtattaacacggaggcctgcctggctacttttttaacatattgttaagtaatattaaaatcatgtctttctttttgaaagatggaatacattagtacagcagg

SEQ ID NO: 64749 - DNA, 310 bp, Homo Sapiens
aggaggcgagaaggaatccgacgctggggggcttgctcgggcggcagcgactgctgctgcggatgggagcgggccggctcggcgcgcccatggagcgccacggcagggcttccgccacctccgtctcgtcggctggggagcaggcggccggggaccccgaagggcggcggcaggagccactgcggcgccgggcgagcagcgcgtcggtgcccgcggtcggggcctcggctgagggcacgaggcgggatcgactgggctcttacagcggccccacctcggtctcccgccggcgcgtcgaaagcctgaggaa

SEQ ID NO: 64750 - DNA, 450 bp, Homo Sapiens
actattggagatgaagggttctttgacttattaagccgatttcaaagcaataggatggatgatcagagatgttgcttacaagaaaagaactgccatacagcttcaacaacaacttccactccccctaaaatgatgctaaaaacatcatctgttcctgtggtatcccccaacacggatgagtttttagatcttcttgccagctcacagagtcgccgtctggatgaccagagggctagtttcagtaatttgccagggcttcgtctaacacaaaacagccagtcggtacttagccacctgatgactaatgacaacaaagaggctgatgaagatttctttgacatccttgtaaaatgtcaaggatccagattagatgatcaaagatgtgctccaccacctgctaccacaaagggtccgacagtaccagatgaagactttttcagccttatttta

SEQ ID NO: 64751 - DNA, 518 bp, Homo Sapiens
atttcctgcttattttgattcattagatccttaaaaggaatggaaagctttgactccagaataaaagacatttatttcctttggagtcttattcttttaagtacttcttaaaacataaccatcaccatcaccagaattttttaaacatgagaataagacagacagaacttttctttggtagtgttaacacaaaatggtgtctgatcttcatacaagcaatctttgctcacatacatcaaaatggaatgacacaaggaaagaaccatttttcaaaaggaaacaagacaagctgccgtcagctagatacgtttcgattgttcaggaaagtctgtacaggaactttgattggcatcctgcttgtctaccttctttcctactttaaagtggtagctctgatcattgttgtcagtgttttcatgacccctacatgatactggtactatgaccatatacatgtcatgatgtaggacacttggttcgataaccttgatttgcaggtgaattggtccgggatccaa

SEQ ID NO: 64752 - DNA, 1146 bp, Homo Sapiens
cggcgtcgccaggcaacttcccccttcgcggcgagatggacctgggctcggggggtccggaaaactgcactgtgaggcggggcgatggggaagggccgaagccccgcagcccagctaaagcagacggctcgcactgcgacccgaagcgcgagtcatggctggggccttagtggcaacaagtgctgagatcagcgggctcagtagcaggaacacaagcacccccttgcggtgtctggaggaagcggcgcggacagtctcccgctccaccgtgtcgggcctgaagaggccgctgaacgctcgcgattactgaggcatctggtaggatcgcaaggccatcaacctacaggtgaagctcgaggcgctgtggcgctttgaagccggagagaagctcagtagaatcgggaaggcgctggggctgtccaactccaccttggccaccattcgtgacaacaaggaaaagatctgggcgagttcccaggaggccacactgcaggcggccaccaagttgacgcgtggccgcagcctggtgatggagaacatggatgcagctgctgagcatgcggatggaggaccagagccagcgcaacatgcccctcagtgtggtgctcattcgggagaaagcccacagcccgttcgagaaccgcaagcaggagcagggcgagggcgcctagcccgagagcttcggggccggtcgagggtgattcgctggctttaaggcgcgccacagcttgagcagcatcggggccagcggcccaagaacgcagcgtgcaagaacccagcgttaatgcgcagtgtgatccccggagggggggtacacactctggctggtgttcacccattgaataaagctctggttggttgttcacccatgaataaagcccaggttcctctgtaagccgcctgccgagaggaacgttcattttcctggtggaagatgaggtcggccccctgtgtcaaagccgccggagacctccttaccctattgctcggtggcaacgcagccggggactttaagctaaaggccctgctggtgtacccctcggagaacccgtgtttcctcaagggctccttcaagcccaacctgcccttggtgtggtgctcgcacaagaaagcctgggtacagcctgggtgacagagcgagactcg

SEQ ID NO: 64753 - DNA, 528 bp, Homo Sapiens
  misc_feature (48)..(48): n is a, c, g, or t
  misc_feature (120)..(120): n is a, c, g, or t
  misc_feature (149)..(149): n is a, c, g, or t
  misc_feature (151)..(151): n is a, c, g, or t
gccgcggacacgttttcactgtcaccctcgttctgtctgccacctgangggaatttgaggaccgccgccagggcaccccgtacatacacacagctgcttttgtggaggtggacgaaaggntgtggccggcagacgtggaggtccaggcngnggtggggacgtgggtgggtccgaggtgtgtgtggggtcggggtgggctctaggagttagcccttatccccactgaccaggcgggagccgccaggcttgcagctgggccagtgcccaggagccatcctggcgtggggccaggagcttgtccaaggccacaggcccacagcaccccctgccggcgggctccgtggggccctggagctgatgacgggggaggcccgtccgcctggcccaccaacccgcccaccttgactgcccccagaagtgtgtcttgagacctcctgggcgtgcttagaggggtgagttgtgtttggatttttagttattttctcttcagttttattagacttcttttttataaagcaataaatccat

SEQ ID NO: 64754 - DNA, 392 bp, Homo Sapiens
ctattgcttttctaatttccttccatatccctcaggcctcagtgttcagagaagccaaaaagaatgtatcacttctgtctgtccaaaggtttttgagagtctcacttctaaatgaaacaatgcaacatttcactttgatttctccactgaaatttccttgattatatggttagaggtatgtagttaggaatgtctgttaactttctgagaaccctagtgccccatcatattaactgtcagtattttggggtcattaggttaatagacttaaattgcctaggtacaagcaggactttgggacaaatctctttgtgctgtttggtaacacttaactctatttgttgcaatctttctccttaggtcctcacacaattccttacagagcacttatt

SEQ ID NO: 64755 - DNA, 496 bp, Homo Sapiens
tgaacacttcaggcctggtgcccgagggaaacgctttgcccatcccaggagcccatcggccaggggtggtcaccaaagcaggactcatcctctttgggaatgatgacaaaatgctgctggtgaagaatattcagctggaggatggcaaaatgatcctggcctcgaactttttttagggggcagccagcagtgtccttgagctgacagaaggcagagctggttactgcggaggctgtgcggagtttttggcagcggatcctcccccaaagtcctggaggttgaagactcccctgattttttcaagtcaggggccgggtctgtggacgttgtgaggctggtggaggaagtgaaggagctgtgtgatggcctggagttagaaaatgaaaatgtgtacatggcatccccctttggggacttcatccagtcaaaaacagcccttggctgggtgaggtgtgcccctcccagggagaataaagcttttgaaaagagaccgtcc

SEQ ID NO: 64756 - DNA, 475 bp, Homo Sapiens
gcatccgcgtcgttcgtccacggtctacgggaagagcgtgtatttcgccaggcgcgcctccctgtcggtgcaggaccgctactcgccccccaacgccgatggccataaggcggtgttcgtggcacgggtgctgactggcgactacgggcagggccgccgcggtctgcgggcgccccctctgcggggtcctggccacgtgctcctgcgctacgacagcgccgtggactgcatctgccagcccagcatcttcgtcatcttccacgacacccaggcgctgcccacccacctcatcacctgcgagcacgtgccccgcgcttcccccgacgacccctctgggctcccgggccgctccccagacacttaaccgaaggggccaccctctggcctcctgcttgccaggctcccagctccgcacaggctgatgctccccgcccccaactgtggccgtctgagctgtgcccggggacgcccctgc

SEQ ID NO: 64757 - DNA, 465 bp, Homo Sapiens
tggcagttcccagggactgttttcacctctgctgtctctggggtcagctgctgctcatcagctgcccgctagcatgtggccaggggtgcagggtggcggggggtcagcagcatgtccctgggcaggccctgggcaccctgtctcccctggtctcactgctgacctgggctggtcccagcctggattggcctcatcccggatctttggtcaccccacgctgccccatcttgcctgctgttccagttctggtcaagggccttgggggctggccccccaccaggcccttctagagcagcaccagtctcagggccctgggaccagctgccctacttcccaggtttgtagccaggagaagggggcatcacagagctgatggtccaataaggggggtgtgagccccgcagggactggcccgcacctgccttggatgttttcagcaattaaacttttttaagctggccaaaa

SEQ ID NO: 64758 - DNA, 494 bp, Homo Sapiens
  misc_feature (385)..(435): n is a, c, g, or t
tctgttctgtggacaactgttactgttcttccgtggccaaccatggcggccaccagccctacccccgctccggccactttccctggacagtgccctcgcaggagtactcacacccgctcccgcccacaccctccgtcccccagtcccttcccagcctggcggtcagagactggcttgacgcctcccagcagcccggccaccaggatttctacagggtgtatgggcagccgtccaccaaacactacgtgacgagctaacgccacgcaggcggcggggcgcctggggaatcttcctccccagcccccgggctcgggagttatgcatccagagacctgcccttctaccttcctcgcctgccctcttcctcattccattgccccaggtnnnnnnnnnnnnnnnnnnnnnnnnnnnnnnnnnnnnnnnnnnnnnnnnnnnattatgaatctcctggacgcagaggtgacagtgggagctggcctgggccaggacggcag

SEQ ID NO: 64759 - DNA, 631 bp, Homo Sapiens
gcggccgccagatctactcgcggtaccagaccctggaactggagaaggaatttcacttcaatcgctacctaacgcggcgccggcgcctccgacgatcgccaacgcgcttctgcctgaccgagcgacagatcaccaatctggttccagaaccgccggatgaagtggaaaaaagaatctaatctcacatccactctctcggggggcggcggaggggccaccgccgacagcctgggcggaaaagaggaaaagcgggaagagacagaagaggagaagcagaaagagtgaccaggactgtccctgccacccctctctccctttctccctcgctccccaccaactctcccctaatcacacactctgtatttatcactggcacaattgatgtgttttgattccctaaaacaaaattagggagtcaaacgtggacctgaaagtcagctctggaccccctccctcaccgcacaactctctttcaccacgcgcctcctcctcctcgctcccttgctagctcgttctcggcttgtctacaggcccttttccccgtccaggccttgggggctcggaccctgaactcagactctacagattgccctccaagtgaggacttggctcccccactccttcgacgccc

SEQ ID NO: 64760 - DNA, 667 bp, Homo Sapiens
  misc_feature (69)..(69): n is a, c, g, or t
  misc_feature (72)..(72): n is a, c, g, or t
ggagaaaacgtagttgggaaaggtacagaatgcactgccatggatcaggtcttccacgtggattgtttnacntgcatcatctcaacaacaagctccgagggcagccattttatgctgtggaaaagaaagcatactgcgagccctgctacattaatactctggagcagtgcaatgtgtgttccaagcccatcatggagcggattctccgagccaccgggaaggcctaatcatcctcacctgtttcaccctgcggtgatgtgccaccgcagcctggatgggatcccattcactgtggatgctggcgggctcattcactgcattgaggacttccacaagaaatttgccccgcgatgttctgtgtgcaaggagcctattatgccagccccgggccaggaggagactgtccgtattgtggctttggatcgagatttccatgttcactgctaccgatgcgaggattgcggtggtctcctgtctgaaggagataaccaaggctgctaccccttggatgggcacatcctctgcaagacctgcaactctgcccgcatcagggtgttgaccgccaaggcgagcactgacctttagattcagtcacctgttcagccggcactgagaagaacgaacacaagaaaaagataagaaatactagagtaaaggccatcaaact

SEQ ID NO: 64761 - DNA, 388 bp, Homo Sapiens
gcatttcacctttaccacttggcaggtgcccacagtacatcattcgcctaactcatcatgatccagaagtaactttgattttgtttcattcaacagagggattttttagtatcctcagcactcattctattctcatttctttctctccaatgagttaggccatgaacctgactcatttttggcacagaggactcttctgataacttgaaaaaatggactacctttttcagggatcttttggatctcacagagttcttaagatggaattttccagcctgccagtcatgaatctcagacagcctgccacctattgccctgatttgtgttataataaaggccttgttgcttaagacaccttcagtctttgcaggagggcatggaagctcaa

SEQ ID NO: 64762 - DNA, 414 bp, Homo Sapiens
  misc_feature (186)..(186): n is a, c, g, or t
gaagcaggcaaacgggaaatgctgggcatagagaccaaaggggcgctggctctccaaggggcgagtggacacaattggctcaagggacgctttcggaatccggcagagctcaagcagcggtgccaagtatgagggcacctgggaccaatggcctgcaagacgggctatggcaccgagacctatgcntgatggagggacgtaccaaggccagttcaccaactggcatgcgccatggctacggagtacgccagagcgtgccctacgggatggccgtggtggtgcgctcgccgctgcgcacgtcgctgtcgtccctgcgcagcgagcacagcaacggcacggtggccccggactctcccgcctcgccggcctccgacggccccgcgctgccctcgcccgccatcccgcgtggcggct

SEQ ID NO: 64763 - DNA, 335 bp, Homo Sapiens
gcctgagccaccgcgcccggccccttatgggttcttctacactgctgggatctctgttttaagtgctcagcttcatgattgattgctgggcttccattttcccatccagttctggagttcgtagagagtgaagatggtagacttgaacagataaataaacttaacgatcttgtaagagttgtctagctacttaaaaccctcagaagtaagagcttagtctcacgagttgtaagagtgggatttggagcttggtggtggagactgacttcagctgagagatgcacaacagtcatggttttcttaagcctcttatgaaaccatgaatgagagatgaa

SEQ ID NO: 64764 - DNA, 937 bp, Homo Sapiens
tgcgctgtgagctgaggcggtgtatgtgcggcaataacatgtcaaccccgctgcccgccgtggtgcccgccgcccggaaggccaccgctgcggtgattttcctgcatggattgggagatactgggcacggatgggcagaagcctttgcaggtatcagaagttcacatatcaaatatatctgcccgcatgcgcctgttaggcctgttacattaaatatgaacgtggctatgccttcatggtttgatattattgggctttcaccagattcacaggaggatgaatctgggattaaacaggcagcagaaaatataaaagctttgattgatcaagaagtgaagaatggcattccttctaacagaattattttgggagggttttctcagggaggagctttatctttatatactgcccttaccacacagcagaaactggcaggtgtcactgcactcagttgctggcttccacttcgggcttcctttccacagggtcctatcggtggtgctaatagagatatttctattctccagtgccacggggattgtgaccctttggttcccctgatgtttggttctcttacggtggaaaaactaaaaacattggtgaatccagccaatgtgacctttaaaacctatgaaggtatgatgcacagttcgtgtcaacaggaaatgatggatgtcaagcaattcattggtaaactcctacctccaattgattgacgtcactaagaggccttgtgtagaagtacaccagcatcattgtagtagagtgtaaaccttttcccatgcccagtcttcaaatttctaatgttttgcagtgttaaaatgttttgcaaatacatgccaataacacagatcaataatatctcctcatgagaaatttatgatcttttaagtttctatactgtattcttataagcgacccagagtgtcttctgggt

SEQ ID NO: 64765 - DNA, 971 bp, Homo Sapiens
ccgtcgagaggatggacgggtttctgagaacaccgtgtgtctcatccggaagctgctggtccttgacccccagcagcgcctggccgccgccgacgtcctggaggccctcagtgccatcattgcatcatggcagtccctgtcgtctctgagtgggcctttgcaagtggttcctgacattcgatgaccaaatgagcaatgcggatagctcccaggaggcgaaggtgacggaggagtgctccacagtacgagtttgagaactacatgcgtcagcagctgctgctggccgaggagaagagctccatccatgacgcccggagctgggtacccaagcggcagttcggcagcgcaccaccggtgcgacggctgggccacgacgcacagcccatgacctccttggacacggccatcctggcgcagcgctacctgcggaaataacagcctcagccggggccaccaggcactgcttccacttctttccagccccagccaaaggcgtggctgtcagggctgggccctgtagtgctggactctcccgggccacgatagggacagggcagggacagggacagcccaggtcacacgtggggtcagcagaggtaccacgaagctaccttttgggatgattgctcgattgtttggtttttaaatctgagaagcctagataactaatctgcttttaatcacgatgttttaatctacctctgtctctttaaccatgctgtctctggactgagcaagagggaggagggagcctgctcaccccactccagggccttccccagcggccaccaactgacctggggcgctgctccccacagtccaaataagctgaaagtgcagctcgctgcaggccccagagcgagcttcccctcctccctgctctcccaggcccctgccacagcctctttccgtccctctctttctgatccaggcccctcagtccaagctttggaaaaccttcacctcatctt

SEQ ID NO: 64766 - DNA, 573 bp, Homo Sapiens
ggaggtctgagttgtgttcttctcccctggcaaaggccattaaatgaactcatggaatctgaaggaaaaaccgtattgtctaaaatgatgggatcgcccaaatcagagtttactaagtggacacgaattaatgaaatcacttctgaaccagaccgtatcacagtttctggccattttcacagactatctagagaattggaaaaggaaaaagaagatactcaagggctcactttaggagaatcacctgaatcagaagatgatgactcaggtgatggaatggatgtagcagggcttgacattgaaaccagtttttcttcctcttctaccttggtagcattgtctgttggcagtaatcccccagtcttcttctgggttagactgtggtaatgatacagatattactactaaagtattctctactgaaccgcatcattcagaacataaattgcaaactaaaactttaaacacattacatctgcagtctgagccaccggagtgttctataggaggaaacaacttggagaatagcttgtgtgccttgagccctgaattgggagcatctattttaatgat

SEQ ID NO: 64767 - DNA, 309 bp, Homo Sapiens
aaacccagttatttcacttgatttgctagcttcagagaagagatctgaatctgtgcccagcgctaaaggctcagtgttagcatggcttgtgctggccggtgtgccatattcttgttggagatgaaccgtagcaccagagcccattcttccttgtcagtcttggcccaaagatgtcaccattcctagttatttgtcaccacataattggtgttgattggaaactttttctgagatgggacagaactgctgggttgtctttttccatgtaacttaagcatagtaatataaataaagtaatagttggatgct

SEQ ID NO: 64768 - DNA, 296 bp, Homo Sapiens
aaggtgagggatagaggaggaattgttggtaccaaggctctggcattcagagaataccacaggcatcgagtgcccacatactcccactttagcaacactgctgagatttggtctccagaaaaccttgctttgtctcatgtcaagtagcccttctctccaagctacttgatattgtcaggttagagtcttagttttttctgtgaaatgggcataagttaagcatgtaattggttaccctgatgtagagaagtattaatagaagagtgtggtggtttagatctctctgggctcaaatc

SEQ ID NO: 64769 - DNA, 582 bp, Homo Sapiens
  misc_feature (139)..(139): n is a, c, g, or t
gagagcgccggctgcaaagcgagcgcgagtgtcgacgcgtgcgacgcactaaattgtgccgcgctcgcgcccgccagaccatgtcctcctggggaaaaagtttccctagtccccccagcaccgcgccccaccctacgcnccgctggaaaaaaaacagcaacataaaatcctaggcttgaacattctgtgcgtcccaaatttctaatgtcctcggcctgcccggtttgccgaagggagccgagtgtcgaagagaagtcgggaaaaggtaagttgtgcagacacttggggaagtttcaaggagaccgccagctcaagatggaaaccgcggcccgggcgctaagaacgggcttcagctcccgctggcaaaaagagaaagtcgagcccgccttcctgcccaacaaaaaacaacaacatgacaacaagaaccccggagggagtggaatgagtgacgtcacagccgcgctctgaggctgacaaaggagggggcgcgcccctcccgctctgcgcccgcgcggccccggagagggggcgcctgaagcgccgggtagggaagtcagccgacttgaaacttttcctcttaaa

SEQ ID NO: 64770 - DNA, 993 bp, Homo Sapiens
ttttcagtgcacagaatagtatgcttccttcacagaacatgacagataatcagacccaaaggcatagatttattaagtgattgggaaaacatcttgtcaagtaatctgcctgcccagacatggatcatcgtagtcttatgtctgacacaaatcctggacctgacacccagctcccatctggcccagcccagaaccccggaatcgattttgatatcgaagagttcttttcggcctcaaatatccagactcaaactgaagagagtgaacttagcaccatgaccaccgagccagtcttggagtcactggacatagagactcaaacggacttcttactcgcagatacctctgctcagtcctatgggctgtaggggaaattctaacttcttaggccttgagcatgtttgacacacagacacagcacagcacttaaactctctttcttagacagctagccctcactctgcctctgggcaacgtacttctgacaacactccagcttttccgtgagtactgattcatctgacacagagacccaaactgaaggagtctccactgctaaaaatatacctgctctagaaagcaaagttcagttgaacagtacagaaaacacagaccatgagttctgggtttgaaaccctggggagcttgttcttcaccagcaacgaaactcagacagcaatggatgactttcttctggctgatctggcctggaacacgatggagtctcagttcagctctgtagaaacccagacttctgcggaaccacacacagtctccaacttctaaaactaacggtggagtccatgtgtgaaatggcatctaccatttcctctggattaaaactacggactggggacaacagtattaattcgattgaatgtggctgatgatgcagttgcttagcttctttgtgtttctttgccttttgtacttgtaaacagaaatttgcgtataaatgtgagtgtattataaagtttgagatgttgatctaaa

SEQ ID NO: 64771 - DNA, 833 bp, Homo Sapiens
  misc_feature (93)..(189): n is a, c, g, or t
gcagcagccgccgccgccgcgcatttccctgaaacctgggctcttgaagacgcatcactggagcagatggataatggagactggggctatatnnnnnnnnnnnnnnnnnnnnnnnnnnnnnnnnnnnnnnnnnnnnnnnnnnnnnnnnnnnnnnnnnnnnnnnnnnnnnnnnnnnnnnnnnnnnnnnnnactgacccagtcacattaaatgtaggtggacacttgtatacaacgtctctcaccacattgacgcgttacccggattccatgcttggagctatttttgggggggacttccccacagctcgagaccctcaaggcaattactttattgatcgagatggacctcttttccgatatgtcctcgacttcttaagaacttcagaattgaccttaccgttggattttaaggaatttgatctgcttcggaaagaagcagatttttaccagattgagcccttgattcagtgtctcaatgatcctaagcctttgtatcccatggatacttttgaagaagttgtggagctgtctagtactcggaagctttctaagtactccaaccccgtggctgtcatcataacgcaactaaccatcaccactaaggtccattccttactagaaggcatctccaattattttacccagtggaataagcacatgatggacaccagagactgccaggtttcctttacttttggaccctgtgattatcacccggaagtttctcttagggtccacctgatggaatacattaccaaacaaggtttcacgatccgctacacccgggtgcatcacatgagtgagcgggcccagaacaccgtgatgcccacatg

SEQ ID NO: 64772 - DNA, 585 bp, Homo Sapiens
atcactgcccttcccagaagcagctcttggtgctgaagagagcactgccttcctggtgtgactgggtgagtccatatgtctctctttgggtctcaaattttgccttccctaatgaaggggtaagattggactaaggtaagcatcttacaaccatttgtggtcatgagagcttgggtggggaaggattgtcacttgacccccgcagctctgtttctaagtgctgaaagagcttcaggctatgctacgggaggagaagccagctactgaggaaaagccagctactgagaaaaagcgggagtggtttaccattctcctcccccacctttcaccagagaagaggaccttggtcacagataaagagcccggctcaccagctcctgacgcatgcatcatgaccatgagacacaactggacaccagacctcagccctttgtgggtcctgctcctgtgtgcccacgtcgtcactctcctggtcagagccacacctgtctcgcagaccaccacagctgccactgcctcagttagaagcacaataggacccctacccacaagcccccaagtgagcccaacatcggggatcctcta

SEQ ID NO: 64773 - DNA, 350 bp, Homo Sapiens
ctggatgacgcctcgctgagctttgcccacgccaactgcaccctgatcatctcttaccagaagccaaaggaggttgtggtggccgagtctgagctacagaaggaactaaagaaggtgaagacagcccacagcaacgatggggactgcaagacccagtagttggcccctgagccttatacctccaccacagggggtgccgtgagacttcaaggcttggcccttcttgaccacggcagcctcctgtcttctaggagctatcaagggtctctaagaactgggcatggggcactcctagccagtgagtcatggtcatatttcctgagtaaagtcattctgagttacttactgca

SEQ ID NO: 64774 - DNA, 394 bp, Homo Sapiens
ccccaggggtgtacggtatttcttgactctgggaacagctgctacccccaagacttgccacgttgttctgccctcagatggaattaggtgaatgtgtgtagctgctttttcactcgtggtcctctccgcatcccttgctctgaccccagagctctgtgtatttgcatccagaggccatggaaacattctttgcatttaagagacagatttattccctgtggagagtgggtggattcattgccacactcttttctcccagggacccaggaaactaggactttgtgtgtttgctgcccacctcggttttattttttaaatgcattaaaaactgtgctagtctcctttgcatggacttcaagctgcatgaaatgcaataaatctcattttagataaa

SEQ ID NO: 64775 - DNA, 623 bp, Homo Sapiens
  misc_feature (11)..(11): n is a, c, g, or t
gacaggcagtntgcaggtccccattttgcagctgtaaatagcaataatgatattattattacagatttccataatcattctgtgaaggttgtttaatcaggaaggagaattcatgttgaagtttggctcaaatggagaaggaaatgggcagtttaatgctccaacaggtgtagcagtggattcaaatggaaacatcattgtggccgactggggaaacagcaggatccaggtttttgatgggagtggatcatttttgtcctacattagcacatctgctgacccactttatggtccccaaggcctggccctaacttcagatggtcatgttgtggttgcagactctggaaatcactgtttcaaagtctatcgatacttacagtaatggtgggcaggtggatacccgcttccatggtcttgcactataaactggaatggatttctcaatgcgggaccagattatgactagagtttttatgccagaaggaatcattggtgaactttccaaggttatttctgaatgtaacaatttccttaaaaatgacttatccaatttctgtatttcacctttagggttaaaaaaactcttctactgaatctataaaaactgcagttttacatctgtg

SEQ ID NO: 64776 - DNA, 483 bp, Homo Sapiens
  misc_feature (24)..(24): n is a, c, g, or t
  misc_feature (245)..(246): n is a, c, g, or t
  misc_feature (461)..(461): n is a, c, g, or t
ttctagaggacccctgcaaacggntggcatcaaattttgaaccttagagaatttgagtggaagatgacggagatgcattttgaagcacccctggtactcagcacacacatgcttacctaatgcatcactgtgacaaaagccacacgcattatcagtaactttgcttgccacggaaaaggtgtttttgaaggatgtggctataatgagaattgcatgattgctttaaaccaaatcaggtggtggannttttttttcttattctatttgcctgcagttgcctcactcacctggaaataccgtcacctgttacaggtgtactttcttaatgactgaaagataagtgggtagcaccgtcagagagaaaatgttggatctgccctaggttatagtagatgccggaattgcgtaaacccacttctctttaagctgcctggattgcacctttgaaatatgtctgccanccgtttgcaggggatcctctag

SEQ ID NO: 64777 - DNA, 353 bp, Homo Sapiens
aactgtagatcatgcatgtgattgtaaatgtaaatttgtaccatgttgttatggtagagaaacacacatgccttaaaatttaaaaagccgggccccaagcttattagtttaaattagggtatgtttccagtttgtattaatttgtaatagctctgtttagaaaaaatccaagaccctgatttatgaaactaatgtgacataatttccagtgacttgttgatgtgaaatcagacacggcaccttcagttttgtactattggctttgaatcaagcaggctcaaatctagtggaacagttcagtttaactttttaaccagatcttatttttttattttgagtgcccctattaatgt

SEQ ID NO: 64778 - DNA, 506 bp, Homo Sapiens
cggatccctcatcaggatctagaactgatgtttcatagacccatccctttttttgcttcctggcttgctgcacccgtccttgtaggactcattttgctgggctgaaagagtatggaataatatatctcatgtcattttttagaagaacaactatttgaaggtattttttggttttccttcacctgtatcccctgtgcaacgtgttttcgtgtaccagctcagagcttggaccgaattttttgtgatttgtgaaattggtttacatacctggaattttatacaggtgtttctcctgtgttatatatgccttatgtgccggtatgatattttcttcactactttttctatcttaatatagtgtggtattttattgtattattcttccattccttaatactgtaccaccttcctgctcagaaactgctcacttccttaaattgtcttttttcccccagcgtgaaatgtatccatttataactgcctattgcctgttctatagcatcacc

SEQ ID NO: 64779 - DNA, 273 bp, Homo Sapiens
aaaggttcagaaatttgccttgaagaagaacttccagacgaaatcactgcagaaatattcgcgactgaaattcttggcttaaccatttcagaagattccggccaggatggtcagtgaagttaccaggaatgtttaaagcacaaaggactttgggtgtgtgtgcatgcacatgtgtgtgttttccatgaggcactgctttttatgcatttccctcccccctctcatctttagaacatttagacattaaagcaagtttctggtgagcaatggaaa

SEQ ID NO: 64780 - DNA, 496 bp, Homo Sapiens
tgaccctgcgccccgcgctgcggctgccgttgcttttgctggtgcacgtgtgtgcgcgccccgagaagccgcccgggcaggtcacgcggctccgcgccctgcccctgacccaagggcagctggttctggtctggtcggatgaacacgtgggctccaagtgcctgtggacatacgagatccagttctctcaggacggtaaggcgtacaccccggtcagcaggaagccatcgaccttcaacctctttgtgttcagcccagacacaggtgctgtctctggctcctaccgagttcgagccctggactactgggcccgaccaggccccttctcggaccctgtgccgtacctggaggtccctgtgccaagagggcccccatccccgggcaatccatgagcctgtgctgagccccagtgggttgcacctccaccggcagtcagcgagctggggctgcactgtgcccatgctgccctcccatcaccccctttgaatatattttt

SEQ ID NO: 64781 - DNA, 459 bp, Homo Sapiens
  misc_feature (385)..(401): n is a, c, g, or t
aggggattgaaattgtagtccccctaacatctctggccaccctaatggacactctgtaagtcgcccttggacaaccgagattttgtttgtaaaaggtccaacctggtgagaagcacccgcatggcccagtttctctagggacttcatttcattttcaggttttccatccagctattagggatatgtaatggacttatataccgcaccccgccggcagccaggctgactgacatgtcatagttttcatagtagtcaccaatactatgatgggtttcatggtcttggttgtgaaatagatatctgaaacaccgtgagcttaggattaaaagtagtagtgagattttcccctttctgcctgtatccctttgagctcttaaatattttnnnnnnnnnnnnnnnnngtttccctgtgatacactagttagctactaaagtagagtcccgatttcttggtacgac

SEQ ID NO: 64782 - DNA, 514 bp, Homo Sapiens
  misc_feature (147)..(147): n is a, c, g, or t
gccacattggatttagcatgtgccaacagccatgagggtgagagttgaacaaccccttaatgcctgtgattccttcactcccccacccccaggcctctccatattgctgtggtgcagggtaacctgccagctgtgcaccggctggtncaacctcttccagcaggggggccgggagctcgacatctacaacaacctacggcagacaccgctccacctggctgtgatcaccacattaccgtctgtggtccggctcctggtgacagctggtgccagccccatggcgctggaccgccatggccagacggccgctcacctggcgtgcgagcaccgcagcccgacctgcctgcgagccctgctggacagcgcagctccgggcacgttggacctggaggcccgcaattatgacgggctcaccgccctgcacgtggcagtgaacaccgagtgccaagaaaccgtgcagctcttgctagagcgcggtgccgacatcgacgcagtggacattaagagcggccgc

SEQ ID NO: 64783 - DNA, 758 bp, Homo Sapiens
  misc_feature (109)..(109): n is a, c, g, or t
taggaaagctgcaaaacactgtggagtgctcccgtgtaaataaaaagaggaaaaaagtttctcaagtcgccgctgcacgacgtctggccggcgctggagcgggggtctncgctctcccgagcggccgcgcgctggactttattgtgccgcaaccagccccagttcccattgtttgtgtttttttcaaaatatggcaaaggttcaggtgaacaatgtagtggtgctggataacccttctcctttctacaacccgttccagttcgagatcaccttcgagtgcatcgaggacctgtctgaagacttggaatggaaaattatctatgtgggctctgcagaaagtgaagaatacgatcaagttttagactctgttttagtgggtcctgttcccgcaggaaggcatatgtttgtatttcaggctgatgcacctaatccaggactcattccagatgcagatgcagtaggcgtaactgttgtgctaattacttgtacctatcgaggacaagaatttattagagttggctattatgtaaataatgaatatactgagacagaattaagggaaaatccaccagtaaaaccagacttttctaagcttcaaaggaatattttggcatctaatcccagggtcacaagattccacattaattgggaagataacacagaaaaactggaagatgcagagagcagtaatccaaatctacagtcacttctttcaacagatgcattaccttcagcatcaaagggatggtccacatcag

SEQ ID NO: 64784 - DNA, 385 bp, Homo Sapiens
cttgatgtgtgaatatttgagaggtcataagcagtggttttggcccataccgtattataccatatacatcagtaagagctcatcttggaacctgttttgcagtttcaaaaattaaagacctacatcacacggttgatgtgaagaaagctttatttttcaaatgagtatttaatgaaagtatacataaccaatgttgggtatacagatgcttctcaacttatgatgggtttaggtccagataagcccactgtgagttgaaaataccaaaagtcaaacatcatagcttagcctaccttaaaagggctccgaacactacattagcctacagttgggcaaaatcgtttaatacaaagcctattttataataaagtatgttgaatatctc

SEQ ID NO: 64785 - DNA, 890 bp, Homo Sapiens
attttttcaagatggcttctcagatgaggatatcaaatgtatatgctttgcaaagttcgaaaagttcaaataacccactttggactaggtaagtctttctagaaaccatttaaagctaactgggtcttagcaacctcctgtgtatggaagagacaggtgaccgctccaggtttggtgctcacagaacccttttcctgactctcatggaagatggtggaagggaaatagactgtctcatcaaccctcctgtgtcctctgaagcaatctcagtttttattaaccacctcttctgtgtttctggtagctatttaacctgtatttaatctgtacttcctatgccagcctcaattttatttgatttttaaaattattctcttctaaccaatgaagtgtttgtcagtatgccccaaagcttgctcttttgtgctcccttttgaataactttctatccagaaaaagagattatttgggacttgagatttgcagtgataccaacttatagcaatgatgtactttaagggaactacccaactatgttgtgatagaagaaagagaaaccttcactttggcattttttttaatcactgtttatttttctgtttgcggcccaggaagcagtgggaggtggtggcagatatgctttgcatatggattgttatgtttttatttgggcaagtttaatcatggaaaactcaaaaagaaggggggaaatggtcagtttaagccaaaagaaactttctaaacaatgtataggtacacagcaaaattaaacaaatccaacaatttctgaagcttagtgtaattgagtggtggttgttattcaataaaattattcccaaaagtgtttctcctaagagtgcagttcccatgaatcacttcctgaacccatt

SEQ ID NO: 64786 - DNA, 564 bp, Homo Sapiens
agcgaccgcccttttggcagggatcattgaccctgatctattcgtcgggaggaggaagggcgcgaggatgaagatgaggactcgggcagtgaagagagcctggtggactcagactcagaccccgaggagaaggaggtgaacttccaggcggacctggccgacctgacttgtgagatcgaaatcaagcagaagctgatcgacgagctggagaacagccagcggcggttgcagacgctcaagcaccagtatgaggaaaagctgattctgctgcagaacaagatccgagacacacagctggagcgcgtccgtgtgctgccgaacctcagcaccatggagtgctatactgaggagaaggccaacaagatcaaggcagactatgagaagaggctgcgggagatgaaccgggacctgcagaagctgcaggccgaccagaaagagcacgcccggctgcttaagaaccagtcgcgctacgagagggagctgaagaagctacaggccgaggtggctgagatgaagaaggccaaggtggccctgatgaagcagatgcgtgagagagggacggat

SEQ ID NO: 64787 - DNA, 724 bp, Homo Sapiens
tgcagcccacccacaaggcttggggctcctgaagccagtcctaacccaggagccacatggagagctactgggaggccagacatgggcctcatgctgggtttcagagctgagaagctgggggacagagagcatggacacctgggttcaagggtcagcttggccccaaatcacctggatacgctttggatgaagccaggagggcctgtttatactggaaggggtggatcatggcaagacttatattcaatccctgatcttttttcccagagagggatggggcttacttgaagtaacacagcacttgactcctgactcccagtatgatgctctcatctcctattgcttccaaaggcctggggttagttaattaagttaattaggtggtgctcatatggctgtccatgtagctactaaacccagggattctggcccataaagccctctgggccaggtttatgggcaggtaagagtcacattaggccaactgtagccctgggtgtgcagacagatctgagtcccatctgaagctctggtagctgtgggaggagagcaggatttcccccgcttgcggaatgagtgggtgccttcccctctgaggtaattggctgtacagcccccagcctctgccccccagggccctcctgaggtgtctggaaggacctttgggatctttggcctcataaccagaaatcagaagcttcaaattctagaggccccttttctt

SEQ ID NO: 64788 - DNA, 579 bp, Homo Sapiens
cagaagggcttcgaaccgtggccaacagttccagtggactgcgtggacccgtgagctcaggagcctcagacgcctccctggagagccaagctggtgttcgaggtggcgcctccagggtccaccctgctgcccaacagccccgcggccaccagagggccgtccctggcccggctgtgtgccctggtggacctgtgtctgggctgctcccgctgcacccagcggctcaatgaaagcacctacgtcctccgtagggtggagcatgactgctcccgcgagatcctgctggcccgctttaagcaggccaccaagagcaaggtctggcgcgtggtgggctgccggcccaccttcccaaggcccctgtgctaccaagtctgccactactacagccctgggctcggctgccggcgccaccgaaaccggtgcacctttgcccgcagtcgcgaggaggccctggtctggaccttcgagcgtcagcacaacctccagcgcctatggctgaaggcggaggtgcagggcagcggggcccagggaggggcaggccgggcggccgacgccatccttacggagtttggcggccgc

SEQ ID NO: 64789 - DNA, 595 bp, Homo Sapiens
ttgcacttcagtccagaggagatacaagtgataatgcgactcccaaccagtgccagctggtggccttctggcaagagatgatgccattttcatgaattcctggaatttctgtgcctcttttatgtgggaaagggcaggctctggtttctgctgcctcttctcttacattgtcatttatttcttcactgtgttgagctgggaggagtcttcaatgtgggaagggattttctgccaaatgccattaatgctgctttatccttaggccctagagatactgaaagtcctggggcagtatcttctgatggtgtgcatgtgaggagaagatgagtttaggactgagaagtgcagaagttggaacagtggtaaggctgttttaaaataagatgttttgttttaataatatgctcctggcacgaagctaggagtacaatgtgactccaaagggagttcagttaatctctgaaatgcgcacacctagctattttcccctctcatcacagtctgagtctgtccattgctacccctttctcggggacataaccagtctgaaaggcccagaattgatatagtgactcctcatcccggatcctcagcg

SEQ ID NO: 64790 - DNA, 300 bp, Homo Sapiens
ccagaacctgcacctggggcttggtgacgcgatgactgagatgctggagtccccggtcagaaggacgatgccgagcgcgccgtattttctcctgcctctcctgagatcgccgccgttgttgggctgtggagacgtctcaaccaaagtggagccgacagaggccccgggagccgtggtgacagagcggccacaaccactagggggcgggaggcagagcggcccctagtccgcccctagtccgggacctctgggcggtcccgggcgggaagcgcacgcgcaaacgcggggcttcgcggccgc

SEQ ID NO: 64791 - DNA, 596 bp, Homo Sapiens
gggctctgggtcccggcgcccctccggccgcgagtcccacgcgccacccccgggcgccctcgacggtggatctagcggcggcgaggaggcgggtcccggccccggcgaaccccagtcccggcccccggccccgggcccagcttcggcatggatgtgaggttctaccccgcggcggccggggaccctgccagcctggacttcgcgcagtgcctggggtactacggctacagcaagtttggaaataataataactatatgaatatggctgaggcgaacaatgcgttcttcgctgccagtgagcagacattccacacaccaagccttggggacgaggaattcgaaattccaccaatcacgcctcctccagagtcagaccctgccctaggcatgccggatgtactgctaccctttcaagccctcagcgatccattgccttcccagggaagtgaattcacaccccagtttccccctcaaagcctggacctcccttccattacaatctcaagaaatctcgtggaacaagatggcgtgcttcatagcagtgggttgcatatggatcagagccacacacaagtgtcccagtaccggcaggatcc

SEQ ID NO: 64792 - DNA, 532 bp, Homo Sapiens
aagattcttgggaggagcgtcaagcaggaggggctggacctcacgtggcacggccgccaccgctacctcgtttgccgctccccccaaggtctcaccccccctctcccaccataccctgcccaacggacagcctactgtgctcacatctcggagagacagctcttcccacgaggagacccccggctcccaccccctgtacggacacggagagtgcaagtggccaggctgtgagaccctgtgtgaagacctgggccagtttatcaaacacctcaacacagagcacgccctggatgaccggagtacagcccagtgccgggtacagatgcaggtggtgcagcagctggagatccagctcgccaaggagagcgagcggctgcaggccatgatggcccacctgcacatgcggccctcggagcccaagcccttcagccagccactgaacccggtccccggctcgctcctcattctccaaggtgaccgtctctgcagcagactcattcccagatggtctcgtgcaccccccgaatgtcta

SEQ ID NO: 64793 - DNA, 643 bp, Homo Sapiens
tttggacaccagcctaagagctcacggggtccatgccactaacattttccccgagaaagcgcccctgcccattcggaggaagagaagcatcgaggaagctgtccccgctgtctgcaagaccaggacggtcatttacgagattcctcggagtcaggtcgaccccacgtccgccaacttcctgatctggcccccgtgcgtggaggtgaaacgctgcaccggctgctgcaacacgagcagtgtcaagtgccagccttccttcgtccaccaccgcagcgtcaaggtggccaaggtggaatacgtcaggaagaagccaaaattaaaagaagtccaggtgaggttagaggagcatttggagtgcgcctgcgcgaccacaagcctgaatccggattatcgggaagaggacacggatgtgaggtgaggatgagccgcagccctttcctgggacatggatgtacatggcgtgttacattcctgaacctactatgtacggtgctttattgccagtgtgcggtctttgttctcctcggtgaaaaactgtgtccgagaacactcgggagaacaaagagacagtgcacatttgtttaatgtgacatcaaagcaagtattgtagcactcggtgaagcagtaagaagcttccttgtca

SEQ ID NO: 64794 - DNA, 360 bp, Homo Sapiens
ccatgaatggtgatgagtcagtgctactggacatcatcaaggagaaagatgctgtggagaagcccattctttcatccgaagagttggcaggccctgtgaattgtgaaaacagtatacccacccctttcccggagcaggaagctgaatgtccagaggatgcaagactgtcccctgagaaaagcctgcagctagcttcagccaaccccgccatatcctccaccccataccagtgcacggtatgccatctgagtataacaacttgcacggccttctcactcattatgggaagaagcacctggcatgaaagtgaaggctgctgactttgcccagacatgactcacccagagagcgatgctgatt

SEQ ID NO: 64795 - DNA, 486 bp, Homo Sapiens
ccaccgtctcgcacagtgtcccaggaccctgcggtgcagtagaggcgcaccaaaactttgtctcttgtgatttctttagcggcatcaacatacacttctaagactcagctgatgtgcccactgtggaacaggcacactgcttgggggagggaggaaaaggagggccatcaaaattgcaataagctgggcccctcacacacccaaccccatctcaatgctgtcctgtgataaaggaccatcatccccctctccccaaagagaaaggctgacatcttcacttgtgagtcctggaataagggaccacttccccctccccaaagggataggtgctttacttgtggtcttaggataagggggcaaagcaagtatcactttgggacagatgagaggaggggaaaaaaggtgggagtagccctccaaagaggtactagggacccaaggggtgatatcaagaacacaaagccttacttcaggtctccatccagg

SEQ ID NO: 64796 - DNA, 599 bp, Homo Sapiens
ccacgcgtccgtccagctccttctttctgcaacatggggaagaacaaactccttcatccaagtctggttcttctcctcttggtcctcctgcccacagacgcctcagtctctggaaaaccgcagtatatggttctggtcccctccctgctccacactgagaccactgagaagggctgtgtccttctgagctacctgaatgagacagtgactgtaagtgcttccttggagtctgtcaggggaaacaggagcctcttcactgacctggaggcggagaatgacgtactccactgtgtcgccttcgctgtcccaaagtcttcatccaatgaggaggtaatgttcctcactgtccaagtgaaaggacctacccaagaatttaagaagcggaccacagtgatggttaagaacgaggacagtctggtctttgtccagacagacaaatcaatctacaaaccagggcagacagtgaaatttcgtgttgtctccatggatgaaaactttcaccccctgaatgagttgattccactagtatacattcaggatcccaaaggaaatcgcatcgcacaatggcagagtttccagttagagggtgtcctcaacta

SEQ ID NO: 64797 - DNA, 633 bp, Homo Sapiens
  misc_feature (111)..(111): n is a, c, g, or t
accgttaagtaggattgacaaatcacacagtaagcagtcaggatgatgcagatcagagttctggcagcagtactcctgccatgcggcgcgttctcaccctatgtgggtggnggcacagactcacatctgaccttgcacaaacaggccctctggacacagccccatgtacactgcctcaagggatgtctcacatcctctgtctatttgagacttagaaaaatcctacaaggctggcagtgacagaactaagatgatcatctccagtttatagaccagaaccagagctcagagaggctagatgattgattaccaagtgccggactagcaagtgctggaagtcgggactaacccaggtcccttgtcccaagttccactgctgcctcttgaatgcagggacaaatgccacacgggtctcaccagtggctagtggtgggtactcaatgtgtacttttgggttcacagaagcacagcacccatgggaagggtccatctcagagaatttacgagcagggatgaaggcctccctgtctaaaatccctccttcatcccccgctggtggcagaatctgttaccagaggacaaagcctttggctcttctaatcagagcgcaagctgggagcacagcactccaga

SEQ ID NO: 64798 - DNA, 932 bp, Homo Sapiens
  misc_feature (78)..(157): n is a, c, g, or t
  misc_feature (425)..(461): n is a, c, g, or t
gaatgagccactgcacctgtccctaaacagacttttaagagatcgttattacagttaccctgaggataccaaaatggnnnnnnnnnnnnnnnnnnnnnnnnnnnnnnnnnnnnnnnnnnnnnnnnnnnnnnnnnnnnnnnnnnnnnnnnnnnnnnnngacttggcataggttttatactaaacttactttgactgggtttggggacctctgctgggtaggtctctctaggggtgtgtgttaatggcccctggaccctagggagctgcccatgggcatcctctgtcctatctcccagatacagcatcatgcaggcctgctgggccttggagcccacccacagacccaccttccagcagatctgctccttccttcaggagcaggcccaagaggacaggagagagcgggactataccaatctgccgannnnnnnnnnnnnnnnnnnnnnnnnnnnnnnnnnnnntgagctggaggaggagagctctagtgagcacctgacctgctgcgagcaaggggatatcgcccagcccttgctagcaggccaacaactatcagttctgctgaggagttgaccgacagggagtaccactctccccctcctccaaaacttcaactcctccatggatggggcgacacggggagaacatacaaactctgccttcggtcatttcactcaacagctcggccagctctgaaacttgggaaggtgagggattcaggggaggtcagaggatcccacttcctgagcatgggccatcactgccagtcaggggctgggggctgagccctcaccccccgcctcccctactgttctcatggcatgtggctggccacaccaagcaggaagcacaaactcccccaagctgactcatcctaactaacagtcacgccgtgggatgtctctgtccacattaaactaacagcattaatgcaa

SEQ ID NO: 64799 - DNA, 742 bp, Homo Sapiens
cccagtatgcactcaatgcctgcagtgactttgtctccaaatggaaaatggctagcatgccaatcaatggacaaccaaatcttaatttttggagcacagaacagatttagattaaataagaaaaaaatttttaagggccatatggtagcaggctatgcttgtcaggtggacttttcaccagacatgagttatgtgatttcaggagatggaaatggaaaattaaacatttgggactggaagaccacaaaactctacagtcgatttaaagctcatgataaagtgtgtataggtgcagtgtggcatcctcatgaaacttctaaggtcataacatgtggttgggatggtctcattaaattgtgggattaatgagattaatccttaaactagctgggatcatttttgatccattgtcatatttatatttaattattaaatgtatctgatgataccttgatttacagataatgctgatgacattgacccctcgtttaaaacaagaaactgtaaatttgacataatttcatttgcaacttcaccctgctttttatacatgttatttataccagcccacccaaccgcagagacgcaacccatcttgtcgggccggtctccgcccctcgaaaaaacttctcaaaaacttttcctttgggccgcggggcccacctaggtaagtgaaccaggccccctccctgcttactttacgaaaacctgggccatgactaatcggcttggaatctccacc

SEQ ID NO: 64800 - DNA, 328 bp, Homo Sapiens
gcttcatctctggaagggtaaggggccatcttccgggttcaccgccgccatccccacccccggcacagcgcctcctggcgactaacatcggtgacttagtgaaaggactaagaaagacccgaggcgaggccggaacaggccgatttctagccgccaagtggagaacaggttggagcggtgcgccgggcttagcggcggttgctggaggaacgggcggagtcgcccagggtcctgccctgcgggggtcgagccgaggcaggcggtgacttccccactcggggcggagccgcagcctcgcgggggcggggcctggcgccggcggtggcgt

SEQ ID NO: 64801 - DNA, 739 bp, Homo Sapiens
atgcagtgcgggttcccgcggggctaggctggagcctcctcacccctccttgtgcatggggctcctgtgtctgcggtaccacttgaccctgtccccgcagcgggtacaagggacccggaagctgagccagcagaaccggggcccccctaagctacagctacacgatgtcttcattgcagtgaagacgaccggggctttccaccgcttgcgcctggagctgctgcttgacacgtgggtttccaggaccagggaacagacatttgtcttcaccgacagcccagacaaaggcctccaggagagactggggtcccaccttgtggtcaccaactgctccgcggaacacagccacccagctctgtcctgcaagatggctgctgagttcgacaccttcttggccagtgggcttaggtggttctgccatgtggacgatgacaactatgtgaacccaagggcgctgctgcagcttctgagagccttcccgctggcccgcgacgtctatgtgggaaggcccagcctgaaccggcccatccatgcctcagagccacagccccacaaccgcacgaggctggtacagttctggtttgccactgggggtgctggcttctgcatcaatcgcaaactggctttgaagatggctccgtgggccagtggctcccgtttcatggacacatctgctctcatccggctgcctgatgactgcaccatgggctatatcattgagtgcaagctgggcggccgc

SEQ ID NO: 64802 - DNA, 306 bp, Homo Sapiens
aaagttctccagtgtccccaagaggtattagaatcttgctgtacccaagcaagacgttaatttttcttttaactgttttggggagggagggagtgatagcttaactgctgaagccaggcgggggtctgctggaggattccaacagagagtatttcctccactgtacaatgtcacagactatctctatcatcattgctttgtggctgtttctgttttttactgtatgtaactggtagctgattgtactaggattaaaaacaataaactttcatgataaagccgatgagattcatgggctatacagca

SEQ ID NO: 64803 - DNA, 919 bp, Homo Sapiens
gtcctcattttgagaggtgctagctacctgcagccataatagttcttcatggctgccgtacattcttccaccttggccaggacaggttctgaaatccacttctctaccttcaccaccaccactgcccatcttgatctctttgagggttttcccatttcacttgatcttatttttgtttatcccttcctgcactttgtcaagagagtcctccagtttctatccaggaatgttcacatccaaagggttggacccacggatcattctgaatcttcctgcccctcctcactgcttaatccctgagtaccacttaatataatggaagcagttccccccaccctcaccccatctctttaagctcatcctagcaagacctctagagaccctagagactcgactttagtccttccccgccatggcacagtggggaaggtgtcaatggggagtgtcacggacaggaggtaggatcctgccgctcgcgtcttagtgtttctccctcaagactttccttctgttttgttgtcttgtgcagtattttacagcccctcttgtgtttttctttatttctcgtacacacacgcagttttaagggtgatgtgtgtataattaaaaggacccttggcccatactttcctaattctttagggactgggattgggtttgactgaaatatgttttggtggggatgggacggtggacttccattctccctaaactggagttttggtcggtaatcaaaactaaaagaaacctctgggagactggaaacctgattggagcactgaggaacaagggaatgaaaaggcagactctctgaacgtttgatgaaatggactcttgtgaaaattaacagtgaatattcactgttgcactgtacgaagtctctgaaatgtaattaaaagtttttattgagcccccgaaa

SEQ ID NO: 64804 - DNA, 671 bp, Homo Sapiens
actgataggttggctaaatgaagatcaaaaggaaggattttggtttcctggtggacattttgtacagtgctctccggtgctgtgacaatgatatggaaagaaaaaaagtcttggatgatctaaccaaggtggacttgaaatggaattctcttcttaagattattgaaaaggcatgtcctagttcagataaacatgctttagtaactccttggctcaaaggcgatatccttggtgagaaattggtcaaccttggcagattgtctttgtaatgaggacttggaatccagggtatcttcagaatctcacttctcagaaagatggactcttctaagcttggtattatccccacatgttaaaaatgattacttgattggagacgtatatgttgaaagaatcattgttacgacttcatgaaactttattcaaaaccaagaaattatcagaagttgaaagcagtgactcatcagtgtcttttatctgtgatgtggcctataactatttcagctcagcgaaaggatgcttgctaaggccatcatctgaagatttattattaactctctttcagttatgtgctcagagcaaagaaaaaacacattgccagattttctatctgtaaactgaaaaatacttggctctctggtgtaaattttggttcacgacactgacacttc

SEQ ID NO: 64805 - DNA, 299 bp, Homo Sapiens
ctgcccaggccacccgtgcacctgtcctgcttcctgcagtccccactccctgcctcctttgagggactgggggacttggggtagggggacagacgggaaagggtctgaatgctctggcaatggcgagaagaagcgatcgccacactgccactctgctgcccagccaccaggatttctgcctggagccctttgccctgtccctgctgcctgaggtggcgtagagcagaggagaagaatttgctccaggccaggagcacaaatcgttgttcaatgaatttctctccaactcgaccttggta

SEQ ID NO: 64806 - DNA, 474 bp, Homo Sapiens
gatttaccctttatagaacatattttcctctagatcaaggcaaaaatatcaggagcttttttacacacctactaaaaaagttattatgtagctgaaacaaaaatgccagaaggataatattgattcctcacatcctttaacttagtattttacctagcatttcaaaaccccaaatggctagaacatgtttaattaaatttcacaatataaagttctacagttaattatgtgcatattaaaacaatggcctggttcaatttctttctttccttaataaatttaagttttttccccccaaaattatcagtgctctgcttttagtcacgtgtattttcattaccactcgtaaaaaggtatcttttttaaatgaattaaatattgaaacactgtacaccatagtttacaatattatgtttcctaattaaaataagaattgaatgtcaatatgagatattaaaataagcacagaaaatc

SEQ ID NO: 64807 - DNA, 336 bp, Homo Sapiens
  misc_feature (266)..(275): n is a, c, g, or t
ccatttagttgggcgttgtgttttacacaaaaccatttttgaattaaggctatgatattaagatagaaatttggactgttgttctgcttttcctggcactcaaattcatgactagttttgaggtcaaacctatgttcgtaatgagagattttataaggatcaactaagaaatggaaggcaggtgaagatataaaaccctagaatgcttaaatgtgctgtaaaactattgtagatgtcactggattttaccaagtaatatcctttcnnnnnnnnnnccccccatctgctgtggcttttcagttaaaattttgtttataaaaggaatttgtttattac

SEQ ID NO: 64808 - DNA, 646 bp, Homo Sapiens
ttagttaggagctatggctaaacatcatcctgatttgatcttttgccgcaagcaggctggtgttgccatcggaagactgtgtgaaaaatgtgatggcaagtgtgtgatttgtgactcctatgtgcgtccctgcactctggtgcgcatatgtgatgagtgtaactatggatcttaccaggggcgctgtgtgatctgtggaggacctggggtctctgatgcctattattgtaaggagtgcaccatccaggagaaggacagagatggctgcccaaagattgtcaatctggggagctctaagacagacctcttctatgaacgcaaaaaatacggcttcaagaagaggtgattggtgggtggccccttcctccccccaacatcagtctgctgcagctgccagaaaacatgcctactactaccagcagaaagggagcagagcccagagcatcaccaggagtgcctgctagtgtactggcagcttgtcaccccctcctctcccttcacccagacacgtggtagggatggaaaaggattcttcacagagcactctggcacaccatatcggagatacttgatagatgagtttatggtttctctggtattcgagaagcatagatctgttctccatattggtaggttctccactcga

SEQ ID NO: 64809 - DNA, 1529 bp, Homo Sapiens
  misc_feature (1266)..(1286): n is a, c, g, or t
  misc_feature (1426)..(1463): n is a, c, g, or t
agttgtcggttgtttgttgggaatctacctgctgatatcacggaggatgaattcaaaagactatttgctaaatatggagaaccaggagaagtttttatcaacaaaggcaaaggattcggatttattaagcttgaatctagagctttggctgaaattgccaaagccgaactggatgatacacccatgagaggtagacagcttcgagttcgctttgccacacatgctgctgccctttctgttcgtaatctttcaccttatgtttccaatgaactgttggaagaagcctttagccaatttggtcctattgaaagggctgttgtaatagtggatgatcgtggaagatctacagggaaaggcattgttgaatttgcttctaagccagcagcaagaaaggcatttgaacgatgcagtgaaggtgttttcttactgacgacaactcctcgtccagtcattgtggaaccacttgaacaactagatgatgaagatggtcttcctgaaaaacttgcccagaagaatccaatgtatcaaaaggagagagaaacccctcctcgttttgcccagcatggcacgtttgagtacgaatattctcagcgatggaagtctttggatgaaatggaaaaacagcaaagggaacaagttgaaaaaaacatgaaagatgcaaaagacaaattggaaagtgaaatggaagatgcctatcatgaacatcaggcaaatcttttgcgccaagatctgatgagacgacaggaagaattaagacgcatggaagaacttcacaatcaagaaatgcagaaacgtaaagaaatgcaattgaggcaagaggaggaacgacgtagaagagaggaagagatgatgattcgtcaacgtgagatggaagaacaaatgaggcgccaaagagaggaaagttacagccgaatgggctacatggatccacgggaaagagacatgcgaatgggtggcggaggagcaatgaacatgggagatccctatggttcaggaggccagaaatttccacctctaggaggtggtggtggcataggttatgaagctaatcctggcgttccaccagcaaccatgagtggttccatgatgggaagtgacatgcgtactgagcgctttgggcagggaggtgcggggcctgtgggtggacagggtcctagaggaatggggcctggaactccagcaggatatggtacgagggagagaagagtacgaaggcccaaacaaaaaaccccgattttagatgtgatatttaggctttcattccannnnnnnnnnnnnnnnnnnnnagataccaatcttttaaattcttgcattttagtaagaaagctatctttttatggatgttagcagtttattgacctaatatttgtaaatggtctgtttgggcaggtaaaattatgtaatgcagtgtttggaacaggagaannnnnnnnnnnnnnnnnnnnnnnnnnnnnnnnnnnnnnactgtataatgtccctcaagtttatggcagtgtaccttgtgccactgaatttccaaagtgtaccaa

SEQ ID NO: 64810 - DNA, 851 bp, Homo Sapiens
agggcgggagaactctcctttttcaccaggaccgcttggtctagccctcaccctggcgctggccttcctcctgctgatcagcactgcagcaaacctgtcctttgttcctgtccagagtcagagaggaaccggcgcctgcatggggacatatgcataccacccgctgcaggagatgaatcggggagcctctggccgtcagagaaggagcagccagggggcgcccacaaccccttcaaggactgaagcctcaagctgcccggggtggcacgtcgcgaaagcttgtttccccacggtctggcttctgcaggggaaatttcaaggccactggcgtggaccatctgggtgtcctctagcccctgtggggcagccaagttcctgatagcacttgtgcctcagcccctcacctggccacctgccagggcacctgcaaccctagcaataccatgctcgctggagaggctcagctgcctgcttttcgcctgcctgtgtctgctgctgagaagcccgtgcccccgggagggctgccgcactgccaaagagtctccctcctcctggggaaggggctgccaacgaaccagactcagtgaccacgtcatgacagaacagcacatcctggccagcacccctggctggagtgggttaaagggacgagtctgccttcctggctgtgacacgggaccccttttctacagacctcatcactggatttgccaactagaattcgatttcctgtcataggaagctccttggaagaagggatggggggatgagatcatgtttacagacctgttttgtcatcctgctgccaagaagttttttaatcacttgaataaattgatataataaaagga

SEQ ID NO: 64811 - DNA, 906 bp, Homo Sapiens
ctgcaatgatccttcagagaacactcagttcttctagaaaggagacacttaaaatataattgcctctccctcccatccctaactcatacagccagaaagtcaggttgaaggattgtggaggactctgctcttgaacttttctgcacggacagcaggaccaccagtgcatgtgtgactcagtgtggcatttgtctgcagggcatatgtacaccaacccatccctgcctctttttaccagtgcatggatcatttctctctcttctgatctcttccagagtacccagtactatgacatgcgctggtcatgtgagcacctcattatggtgtggatcaatgcttttgtcatgctcaccacgcaactgttgccatccaaatactgtgatttgctacataaatcagctgctcacctgggcaagtggcagaagttggaacatgggtcctacagcaatgctccacagcacatttggtcagaaaatacaatatggcctcaaggggtgctggtgcggcacagcagatgtttatatagagccatggggccttacaacgtggcagtgccttcagatgtatctcatgcccgcttttatttcttatttcatcgaccattaaggctgttaaatctgctcatccttattgagggcagtgtcgtcttctatcaactctattccttgctgcggtcggagaagtggaaccacacactttccatggctctcatcctcttctgcaactactatgttttatttaaacttctccgggacagaatagtattaggcagggcatactcctacccactcaacagttatgaactcaaggcaaactaagctgcctctcaacaatgagggagaactcagataaaaatattttcatacgctctatttttttctggattaataattatgaaagtagctc

SEQ ID NO: 64812 - DNA, 519 bp, Homo Sapiens
aatctagtggtgactataggtgtgggttttgctacctggaattagaaaatataccttctgggatcttcaatatcattcctagtacctttttgcctaaaccagaaggaccttttttcttggactttaatagtattatccccatcaagatcacacaacttcagtgatggagaaatctcaagttactggcttttatacttacccaacatcagttcttctaataaggatgcaaatcttcaggacagtaagcagaaccatcagaatggaattaaatctctaaaaacgtgttaccctggaatctggtgcttgtcagggtgtttggtaagaactgtatatagtcagaattacctaaatcacctagaggtaccgtttacatggttttgtgtatatagagttggcttgcattttaggggcccttttgtataaaaagtgcatatgactaccattagactcgtcatcctgtgagatcctttgctaagaggataaaggaactgagacccgatgagaacaaagaaaggatat

SEQ ID NO: 64813 - DNA, 456 bp, Homo Sapiens
agtgtcgttggggtaggacctatattttaatactgttcctaacatttcattttactagcgagaaatctttgatttcattttattctttgtaattctagacactagattgtagtttagccataactgatgttttttaaaaagggatatattttcttgcacagttgttcaaaaaagagacaagtttcagtcctcaatgctgtcctttgttttacaggtacaagttttctagctcagacaaactatgaaaaactgtagactattctcaaggtattaactcgcagaccctctgggggtaggggcttttttctaagttacaggcagagtgggactgagatggtacagtgtgcacagacaggtactgagctgacagattgggattttctgtactaaaatgttactttgtatcaaaagttaaacaggctttagtacaacaaataaaggtcaatttctgtcaaa

SEQ ID NO: 64814 - DNA, 497 bp, Homo Sapiens
gtaccatgtccagtgactacagatatgaccttacaacaggttttaatggctatgagtcagatcccagcaggtggaactgattgctctcttcccatgatctgggctcagaagacaaacacacctgctgatgtcttcattgtattcactgataaatgagacctttgctggaggtgtccatccctgctattgctctgagggagtatcgaaagaaaatggatattccagctaaattgattgtttgtggaatgacatcaaatggtttcaccattgcagacccagatgatagaggcatgttggatatgtgcggctttgatactggagctctggatgtaattcgaaatttcacattagatatgatttaaccataagcagcagcacgatccagagatccattgccatcagtgatctcactaaaaatatacagctacttcccagctaatctccacccaatgaatgatgatggtatagtatgtgcataatggaaagttaccttactg

SEQ ID NO: 64815 - DNA, 558 bp, Homo Sapiens
  misc_feature (107)..(119): n is a, c, g, or t
cgatgcatgaagtgttcctgtgtcgtgtggcagcacatcctattttgagaagagatttaaatttccatgtcttcttggaatataatcaagatttgagtgtgcgaggnnnnnnnnnnnnngagaaacttgaagacttctttaaaaacatggttaaatcagcagatggagtaatcgtttcaggagtaaaggatgtagatgatttctttgagcacgaacgaacatttcttttggaatatcataaccgagttaaggatgcatctgctaaatctgatagaatgacaagatcccacaaaagtgctgcagatgattacaatagaattggttcttcattatatgctttaggaactcaggattctacagatatatgcaagttttttctcaaagtttcagaactgttcgataaaacaagaaaaatagaagcacgagtgtctgctgatgaagacctcaaactttctgatcttttaaaatattacttaagaggaatctcaagctgctaaggatcttctgtatcgaaggtctaggtcactagtggattatggaaaatgctaataaagcact

SEQ ID NO: 64816 - DNA, 1474 bp, Homo Sapiens
  misc_feature (264)..(407): n is a, c, g, or t
  misc_feature (598)..(606): n is a, c, g, or t
  misc_feature (683)..(768): n is a, c, g, or t
  misc_feature (849)..(857): n is a, c, g, or t
  misc_feature (1365)..(1365): n is a, c, g, or t
ggggtgggtcaaggagctagtttacaggcttactgtgatttaagcaaatgtgaaaagtgaaaccttaattttatcaaaagaaatttctgtaaatggtatgtctccttagaatacccaaatcataattttatttgtacacactgttaggggctcatctcatgtaggcagagtataaagtattaccttttggaattaaaagccactgactgttataaagtataacaacacacatcaggttttaaaaagccttgaatggcccttgtnnnnnnnnnnnnnnnnnnnnnnnnnnnnnnnnnnnnnnnnnnnnnnnnnnnnnnnnnnnnnnnnnnnnnnnnnnnnnnnnnnnnnnnnnnnnnnnnnnnnnnnnnnnnnnnnnnnnnnnnnnnnnnnnnnnnnnnnnnnnnnnngggaagaaagacaaggtaacatgaagaaagaagagatacctagtatgatggagctgcaaatttcatggcagttcatgcagtcggtcaagaggaggattttgttttgtagtttgcagatgagcatttctaaagcattttcccttgctgtatttttttgtattataaattacattggacttcatatatataannnnnnnnnacattatatgtctcttgtatgttttgaaactcttgtatttatgatatagcttatatgatttttttgccttggtatannnnnnnnnnnnnnnnnnnnnnnnnnnnnnnnnnnnnnnnnnnnnnnnnnnnnnnnnnnnnnnnnnnnnnnnnnnnnnnnnnnnnnccacaaaacaacctgtttcaaatcacacgatcacatcacactttaacccataaacccatccctacacacactctttgttgnnnnnnnnnggccccaaaaaaacttttttagcaccctccatttggggggcgggccccccatcacgcaaaaagcccttggccaatcgcttgggtcctcaggaatacccgtggccccgaatacgggcttccgatttttcccccatataagaaacagcctcggcgcggaaaccgtgggccgtttccaaacccccctttaaatctcgggttcctcccgccctttttgtcttggtgccttataagacggtgcgaacgtcccccgcgacgccccccatattacacaacaccccccgcccgaaatcccgtcgaatatttactccccaatattcgatccgcccccctccccacgagacaattctaccgaactatctctgcgcgttccccctattctccccactcctctgccacacaatcagcccagttcagacccgaatctcccctacccttaggccttaatcgtttcccttcccccccgctcctctatgcaacattagtgtccacccacagattaaataccctncgtccttccgcatatatctcaacaccgggcttctaccgattgtttcccgccttctatcccagcgctcccccgggtgcacgtgtccactctcccccatcttttttcattc

SEQ ID NO: 64817 - DNA, 831 bp, Homo Sapiens
ggtaagaatgttggtttactttcaaatcggtcccctgtcgagttcggctctgggtgggcagtaggaccaccagtgtggggttctgctgggaccttggagagcctgcatcccaggatgctgggtggccctgcagcctcctccacctcacctccatgacagcgctaaacgttggtgacggttgggagcctctggggctgttgaagtcaccttgtgtgttccaagtttccaaacaacagaaagtcattccttctttttaaaatggtgcttaagttccagcagatgccacataaggggtttgccatttgatacccctggggaacatttctgtaaataccattgacacatccgccttttgtatacatcctgggtaatgagaggtggcttttgcggccagtattagactggaagttcctacctaagtactgtaataatacctcaatgtttgaggagcatgttttgtatagaaatatattgttaatctctgttatgtactgtactaattcttacactgcctgtatactttagtatgacgctgatacataactaaatttgatacttatattttcgtatgaaaatgagttgtgaaagttttgagtagatattactttatcactttttgaactaagaaacttttgtaaagaaatttactatatatatatgcctttttcctagcctgtttcttcctgttaatgtatttgttcatgtttggtgcatagaactgggtaaatgcaaagttctgtgtttaatttcttcaaaatgtatatatttagtgctgcatcttatagtactttgaaatacctcatgtttatgaaaataaatagcttaaaatta

SEQ ID NO: 64818 - DNA, 374 bp, Homo Sapiens
tcaggagtgaccatagccactgctgaaaagtcacgcagctgctccctcggaccccccaaggatggttgctgttagcagaggattggtgcagtcccagctgaagcccactgtgtgccaaaggaagaagctcccagggctgcttccttcacctgcagaaagccccaagtgagccaccagcactcatggggcagtccctgtccaggctgcgccagggcttctcatagacgtcctgagaaggacggtgtcatgcaaggaaatggctgtggtaacactgatccttcataagaagcttcattccctcttaatctagttaagccaggacatccagaattcattgctttaataaagaacccaggccgggtgcagtggctcat

SEQ ID NO: 64819 - DNA, 575 bp, Homo Sapiens
attgaatgcagcattaactcagaacgtagcataaagtcgtcactgctcccagctgggacgtggtgtcttggcatcccttcctgccgtccttgactctttcccatcttcagttctataattttctcccaaacaaatgctcttttagagttaacactaaagatctggtctttgccgtcaaggttgacagaacagctgttcatggtgtttgcggtgaaacccgtgttctctttcaatgcagtctgtggctttaacgtgtgtcctgtaatttcgccaagatcatttcttgcctctggtaacttgggggtggatttccttgggctctctaggtgtactgctatgtcagatgcaaaatgtcacccagcttcctgtcacatatccttgtctgtgcattcatgcatctacctcattccggttttctttctaatctcatgtattcctgttgtgaggaaatgtgttcttttcccgatccttttgtagttcatacacatgacaattgggtttccacgcacgtgcatgagatgttcctccttcaaaccttgttactatgtcagcacattaactgcctggcatggaaa

SEQ ID NO: 64820 - DNA, 1351 bp, Homo Sapiens
gcggccgcggaggcggaagcatccatggcggagggcggcagcccagacgggcgggcagggccgggctccgcagtgcaggtcgtaatctgaaggagtggctgagggagcaattttgtgatcatccgctggagcactgtgaggacacgaggctccatgatgcagcttacgtcggggacctccagaccctcaggagcctattgcaagaggagagctaccggagccgcatcaacgagaagtctgtctggtgctgtggctggctcccctgcacaccgttgcgaatcgcggccattgcaggccatgggagctgtgtggacttcctcatccggaagggggccgaggtggatctggtggacgtaaaaggacagacggccctgtatgtggctgtggtgaacgggcacctagagagtacccagatccttctcgaagctggcgcggaccccaacggaagccggcaccatcgcagcacccctgtctaccacgcctctcgcgtgggccgggcagacatcctgaaggccctcatcaggtacggggctgatgttgacgtcaaccaccacctgactcctgatgtccagcctcgattctcccggcggctcacctccttggtggtctgccccttgtacatcagcgcagcctaccacaacctccagtgcttccggctgctcctcctggctggcgcgaaccctgacttcaactgcaatggtcctgtcaacacacagggattctacaggggctcccctgggtgcgtcatggatgctgttctgcgccacggctgtgaggcagccttcgtgagcctgctggtagaatttggagccaacctgaatctagtgaagtgggaatcgctgggcccagagtcgagaggaagaagaaaagtggaccctgaggccttgcaggtctttaaagaggccagaaatgttcccagaaccttgctgtgtctgtgccgtgtggctggaaaaagagctcttggcaaacaccgggcttcatctgatttccttcgcctgcctctggcagacccccataaggaagtttctactccatgagtagactccaagtgctgcggttgattccagtgagggagaaagtgatctgcagggaggtggacaccgagccctgagtgctgtgctgctgctggtctcctgatggctgttgctgcagaagatgtcctcctagactgtcattgcctcctcaggtgcctggggccgctaccaggtctttggggtaaatgttcagctgaaaaggctttatactaaaggcccattatttgcttttctccccgacttttcccccacagtatattaccatttacacaaattaccgctcgtgtcccggctccaccttctcgacgctatttttt

SEQ ID NO: 64821 - DNA, 488 bp, Homo Sapiens
tgattcaaatccattagtttgaacttttcgagcttattatccatttccttaaatcccatagcttatcagagttaacatcagagggaggtaaaatatttctgtgatattctttgtataaaatctacactttgaaatggattagtaacctgtgaacaatacatattttagttaacatataaattatgtgagcaaagtggttttcagtgtttttttcttattttagttttgaacctgtcttaaactcacagacttgtagaagaaatctctaattcagtatttattaggagttcacttttgccctattacagccttaattagtgacatcccagtgctgttacagcatagcagtgtcttaatatgtaatctaattgaaataacacatttgtaaaataattactagaaggtaaacttacgttaatgtcctgtgtggtttctacaaagtgtgtcattgtagacctcttggccactagatattttaagataaaaaa

SEQ ID NO: 64822 - DNA, 1397 bp, Homo Sapiens
  misc_feature (366)..(428): n is a, c, g, or t
  misc_feature (1050)..(1050): n is a, c, g, or t
actttttatatatgttatgtagtatatcctttctaaactgcctagtttgtatattcctataattcctatttgtgaagtggacctgttcttgtctcttttttcagtcattttctgcacgcatccccctttatatggttataaagatgactgtagcttttcgtgctccactgcgaggtttgtgctcagagccgctgcaccccagcgaggcctgctccatggagtgcaggacgagctactgctttggagcgagggtttcctgcttttgagttgacctgacttccttcttgaaatgactgttaaaactaaaataaattacattgcatttattttatatttttggttgaaataaaatttaattgactttgnnnnnnnnnnnnnnnnnnnnnnnnnnnnnnnnnnnnnnnnnnnnnnnnnnnnnnnnnnnnnnnccttgtcaagccccctagcccctcaaaaaagttccctaaaccacttcttttgccccgccggtcccacccagcgaaaacgaactgggcacttcctctgtgttcctgggccgccctctggcatagaaactagggctctgcaatcgtcgcgcccacaacaaaaccccccgggagcgaaaacccagaggtgtttcgtaacacaacattttccgagtgggaattttcctggaggggggtcttccccggagggtctttctcaagcgaggacccttctctaggaggagagcctccccaaaggcccatattttccgggcaccctaacttttgtgggccaactttcttctcggcgatcaaaccttctgtttccaaaaaccacactgttgtccagggcccattttctcttgctccccgcccgccctttgttatatagcccccaccaccgatatgaatatacgggtgacaatatctgtgtatggaaacatccacatctgttataattttccgcgccccaaacgactgcgcggtagactcttaataacccgttccgttttattaatacgacgccaccctttgtggttcggtataaacaagaccacgatcgtggccggccgcgtatatgtgggtngtttagtaacacacacctgcggtgtatgtgccgcataatacacacctctgtgccagttgctcccaaataataatcgggcgcgccccacacactatctttcgatagtcaccaccaccgaccgggcgtgcgccgacataaaaaacccctctcccccgcaccagaaaatatattgcctccctccgcaagacactatcaccgtctattttaaccactgtcgtccgacagaacgaaataacaccgcccgttcgcgcgcgggtacacatttcgtcggcgcccggagaatattctcattccctactcatatactccgcgcgcaacacattcccctccgccgcgtgaaccatata

SEQ ID NO: 64823 - DNA, 1179 bp, Homo Sapiens
  misc_feature (704)..(704): n is a, c, g, or t
  misc_feature (706)..(706): n is a, c, g, or t
  misc_feature (708)..(710): n is a, c, g, or t
ggcctcatacatggaggattgataccccagattcttccaaactccagatgttgatagatatgggctctagtctctatgtggaactccctgaattaccacgactgaagcaagagctacaacaggctcggtggttggacgaagtaagactgaccttatcagatccgcaacaagtcactttggatgtcatgaagaagctgatagactctggggtagggttggcaccccaccatgctgtggagaaagcaatggctgaactacaggagctccttacagtctctgaacgatgggaagaaaaggctaaggtctgcctacaggcaagaccgaggcacagtgtggcaagtttagaaagcattgtgaatgaagccaagaacattccagcctttctacccaatgtgttgtccttgaaagaagccttacaaaaggctcgagaatggaccgctaaagtggaagctattcagagtggcagcaattacgcttatttggagcagcttgagagcttgtctgcgaaaggacgccctattcctgtgcgtcttgaagcactgccgcaagtggaatcacaggtagcagcagcacgggcatggagagaacggactgggcggacgtttcttaagaagaattctagccatacattgttacaggtgctgagcccccggaccgacattggtgtatatgggagtggcaaaaataggaggaaaaaaaacccncnannnaaaacaaacaccctggcggccccctcggccccccgaaaagctttcttaaaccattcgcttggcgcgcgggccccccagggaagtgaccacggccctacccgcttcctaggcaaatcctggtcctggactaaggcttggactctccccaactaaaaacccccggagggcaacgagccgttccggacgactcccgaagcgccttttctcacggtccctcctcgccaccccccccatcgacaccaccgcagccccctgaaatcacgcctacccgccgtaccgcgttccgctacatgttcgcaccgtgactaacaacgccctttcaccacgtcccccgaacttccaccctctccttactcttgcgcccctgtagtccccttgacatatcccctggcgcgcccaagaccaccgacaacagagtggcgcacccaaccgactattctcggagccatccgcccggcgagaatgaatc

SEQ ID NO: 64824 - DNA, 1087 bp, Homo Sapiens
ctgatatgctggacagatggctttcttggctcacaagccataaaacagtggcagatcagcagtggacaggaaccccatcaactaccaacagcacatcctctactccttccagccccacgattactagtgcagcaggatatgatggaaaggctttcggttcacctatgatcgacttgagctcaccagggggagggtcttataatcttccctctcttccggatagttgactgttcaagtactattatgctggacaatatggtgaggaaagatactaatatagatcatggccagccaagaccacccacaaacagaacggtccagtcaccaaattcatcagtgccatctccaggccttgcaggacctgttactatgactagtgtacaccccccaatacgttcacctagtgcctccagcgttggaagccgaggaagctctggctcttccagcaaagcagcaggagctgactctacacacaaagtcccagtggtcatgctggagccaattcgaataaaacaagaaaacagtggaccaccggaaaattatgatttccctgttgttatagtgaagcaagaatcagatgaagaatctaggcctcaaaatgccaattatccaagaagcatactcacctccctgctcttaaatagcagtcagagctctacttctgaggagactgtgctaagatcagatgcccctgatagtacaggagatcaacctggacttcaccaggacaattcctcaaatggaaagtctgaatggttggatccttcccagaagtcacctcttcatgttggagagacaaggaaagaggatgaccccaatgaggactggtgtgcagtttgtcaaaacggaggggaactcctctgctgtgaaaagtgccccaaagtattccatctttcttgtcatgtgcccacattgacaaattttccaagtggagagtggatttgcactttctgccgagacttatctaaaccagaagttgaatatgattgtgatgctcccagtcgcaactcagaaaaaaagaaaactgaaggccttgttaagttaacacctatagataaaaggaagtgtgagcgcctacactagtgga

SEQ ID NO: 64825 - DNA, 558 bp, Homo Sapiens
  misc_feature (542)..(542): n is a, c, g, or t
ctagtcttaggaaacaaaaggtttattgaaatgcatgtagataaattatcatcagcataaaactgttatggagttttcaacatggggtcttttgctcttaaaatgaagtgaagctttgcaagtccattgtccaataggaaaaatattatatctctctgttcagataaagtcctttaaaaaagtaaatctcttttgaaacggtcttttaaacgtctccagcctgtttggctccccccaggtggtgttgctgtccttctccaattgtgagtctgttgaatgggattatcttcatagtggttttcttcatggaataccaccgggttttccaagtggcccaaataatgccattatcataaccattaggagtagatgcttttgagtaagtgccaccttggtaataaactccattgagatggcccgcgtgacacttgttcatccaccaaccagatccatcctgttcagcacagttgccttcaaacttatcattgtcattgtcccaggtactgaactgcatgccattttttggatgtgaaaacttgtcncttagtcatcgccaaa

SEQ ID NO: 64826 - DNA, 1363 bp, Homo Sapiens
  misc_feature (454)..(559): n is a, c, g, or t
  misc_feature (566)..(573): n is a, c, g, or t
  misc_feature (575)..(576): n is a, c, g, or t
  misc_feature (578)..(578): n is a, c, g, or t
  misc_feature (580)..(580): n is a, c, g, or t
  misc_feature (584)..(584): n is a, c, g, or t
  misc_feature (588)..(589): n is a, c, g, or t
  misc_feature (596)..(597): n is a, c, g, or t
  misc_feature (599)..(600): n is a, c, g, or t
  misc_feature (602)..(602): n is a, c, g, or t
  misc_feature (604)..(604): n is a, c, g, or t
  misc_feature (606)..(608): n is a, c, g, or t
  misc_feature (613)..(643): n is a, c, g, or t
  misc_feature (648)..(652): n is a, c, g, or t
  misc_feature (658)..(666): n is a, c, g, or t
  misc_feature (669)..(685): n is a, c, g, or t
  misc_feature (701)..(701): n is a, c, g, or t
  misc_feature (703)..(713): n is a, c, g, or t
  misc_feature (737)..(737): n is a, c, g, or t
  misc_feature (739)..(739): n is a, c, g, or t
  misc_feature (751)..(751): n is a, c, g, or t
  misc_feature (756)..(781): n is a, c, g, or t
  misc_feature (785)..(785): n is a, c, g, or t
  misc_feature (1065)..(1065): n is a, c, g, or t
aatatgttttgatcacagaacttctagaataacccagatgctctttcatattcttttaatacatcttgatcacagctgggggaaaaaaagctttttaattctataccttcctagtagataagtgaagagcagggaaagagacctttaaatattttgctataaaaaaatttgtgataagtttctatcaaaatggggagattgcagaaaaggcttcccttggctcccaaggaggtgtagcaggtgtgagcaatattagtgccatgtgcctttcacacagggtttgcatttatcagtctgttttccgatgatgtgtacatgaaagagtacaccatgtgaagagaagagagaatgattgaaaatgttttagtatagaactcttcttgcagtgggttgctattttctagattttactttttagggaacaaaataaaatcctttgttaaaactggaaaannnnnnnnnnnnnnnnnnnnnnnnnnnnnnnnnnnnnnnnnnnnnnnnnnnnnnnnnnnnnnnnnnnnnnnnnnnnnnnnnnnnnnnnnnnnnnnnnnnnnnnnnnaagaaannnnnnnnannananaganaaannaaaaaannannananannnggggnnnnnnnnnnnnnnnnnnnnnnnnnnnnnnnaaggnnnnnggaaannnnnnnnnaannnnnnnnnnnnnnnnngaagaaaaagcggagngnnnnnnnnnnnagcgggggcccagagggggaagangnaaaggaggcgangtacnnnnnnnnnnnnnnnnnnnnnnnnnnaaanccgcaacccggaagcccccgcaaaatttagatattttatcctccccccgaaaactaaagccccccgccgccggcggcgaggcaaacgcgggcgggggatattttctcagataaagaaatttcatttgtagtgggccggggatttgtgggggcgcgcccctctctccgggaagaagcgctgttttccaaatacaaccgcgctgtgaaagctgaacccctccggaggcaatactacaaaaaatggtctttctcccccgccccacgggggggtaatcaccttntttcgtcgcattagtggtggtgtaaacaccaccgggtgagagaaaacaaaaggtgcgcccccctaaaattgggccccccctcttatgaacacactccgttatgtgtgcgtgacaacacgtctaccccacgagagccttccccccggcggcacgcgagactcgcgatcttagaaaaataataatctctccctctatgggcaacaaatatctgggggggaataaaccaaccgtgagtgactcttctcccgaccgcggggtgtatattattatgtggggggaaagagcgctgcccgccacc

SEQ ID NO: 64827 - DNA, 795 bp, Homo Sapiens
cgtcacactgggtcgagttcacatgcaggactctttcttaatgcagccggagaaatatggaaaactgacaacttgtactggttgccgaacacagtgcaggtttttttgatatgactcagtgtataggtcctaatggatatatggagccatattgttcaactgcttgtatgaacagtcacaagacaaaatatgcaaaatcacaaagtttgggaattatttgccatttttgtaagcgaaactctttacctcaataccaagccacaatgcctgatggaaaactgtacaacttttgcaattccagttgtgtggctaaatttcaggctctaagtatgcagtcatctccaaatggccagtttgtagcgccaagtgatattcagttgaaatgcaactactgcaaaaattccttttgttcaaaaccagaaatcctggaatgggagaacaaagtgcatcagttctgcagcaaaacttgttcagatgactataagaagttgcattgcatagttacatattgcgaatactgtcaagaggagaagactcttcatgaaacagttaatttctctggcgttaagagacctttctgtagtgaaggctgcaaattattatacaaacaggattttgccagacgtttaggattgagatgtgttacttgcaactattgttctcagctatgtaagaagggagcaactaaagaactcgatggtgttgtgagagatttctgcagtgaagattgctgtaaaaaatttcaggattgtactacaaggctgcaaggtgtgactgttgtaattaaggaaggat

SEQ ID NO: 64828 - DNA, 911 bp, Homo Sapiens
tgagccaccgtgcctggccgtaaaggtattatttttaaagggttagctcacctaagacttccgcagctgagggcagtaacaagataggcatgatgcacagagccatgtggggattccagacccctcctgttgcatagtttcccagttgaatttgactcttctccatttatctcatttttttctggataggtctacctgcaagtcggatttcccaggttattgttggagatgagcggcagcagtacctcttggtgattgggcaggttgtagtgatgtccagttagctcagcgtttggctcaggcgaatgaaattgtcctatcctggaactgctggatgctttgcaagcagtatatgtttgaagtggcaatcatgagggaggatgaagctgtgaaggtaggaggctagcttcctgtactgccattctgaaaaggccttcctagtacacagcgcaatgctctggtagtgttcacatattgcctggccaaaccaatgaccattggaactcaatttaggagggaggctgggaatattctcctatgaagatagatgaggtagaacagtgaggctgaggagataaaaggcaaacaagggcaatagaatcctcagcctttcttgtgtgggggcacagaattaaacagtttcctttctgtagttaagagatatgtggatcattgatccatttgattttgatgagcattttgacaagtgcctcaattatctaccacattaccgtacgagtgctggtaagttactttgtccttcctacctaagccccaaattttaaacattaattttccacatggccagggacattttgtttttcttttctcagagactcttaagaactgcactggaattggatccacactctgaactcgaacccagtgtggagatcctatagagtgactag

SEQ ID NO: 64829 - DNA, 682 bp, Homo Sapiens
cctcaccagcaccagcgtatcggcctccccgctgcatgcacaagaggtatacggtgggctctattctgcatcttcattctcctcagccccggaagtcacgtacgcgggcgtctccagccacacgctgcctgtcagcgaggccggacagcttcttgggctcccgatggaccccagttggcagctctggggatgcctcggcaaaggcactggcctggatctactctccggatcactcaagcaataacttctcgtccagcccttctacccccgtgggctccccccagggcctggcaggaacgtcacagtggcctcgagcaggagcccccggtgccttatcgcccagctacgacgggggtctccacggcctgcagagtaagatagaagaccacctggacgaggccatccacgtgctccgcagccacgccgtgggcacagccggcgacatgcacacgctgctgcctggccacggggcgctggcctcaggtttcaccggccccatgtcactgggcgggcggcacgcaggcctggttggaggcagccaccccgaggacggcctcgcaggcagcaccagcctcatgcacaaccacgcggccctccccagccagccaggcaccctccctgacctgtctcggcctcccgactcctacagtgggctagggcgagcaggtgccacggcggccct

SEQ ID NO: 64830 - DNA, 578 bp, Homo Sapiens
catggggccgagggtgcttttgtgttcggaggtcccttcctcatggacgagagctcccgcctggcctttccagaggccacagaggaggagaagcagctaagcctcaccatgatggcccagtggacccactttgcccggacaggggaccccaatagcaaggctctgcctctttggccccatttcaacgaggcggaacattttgtggagttcaacccagttccacgggccggacagaatttcagggaggcttggatgcagttctgttcagagacgttccccagcaggttccaccattggcaccggaagcggaggaccaggaaggcccaggaggacttttgaggccaggccttgacccttcttggctggggcaaaccaactcttcaagtggtggcagaagtcccagcacggcagcccgcctctccccctgctgagactttaatctccaccagcccttaaagtgtcggccgctctgtgactggagttatgctcttttgaaatgtcacaaggccgcctcccacctctggggcattgtacaagttcttccctctccctgaagtgcctttcctgctttaaaaaaa

SEQ ID NO: 64831 - DNA, 347 bp, Homo Sapiens
taccccccctggtatccccacgcccgagtcgccagctagtcaaggataagccagtccagagttcggccttggaatctcagtgacagtgactttgtgatggatggtttacagccacttgagcccccgtagaactatatttgttggtggtgttcctcgaccctttcgagctgtggagccttgcgatgataatggatcggctatatggaggtgtgtgctacgctgggattagataccgaccctgagctaaaatacccaaaaggagctgggagagttgcgttctctaatcaactagagttacatagctgctatcagtgcccgctttgttcactcagcatgtacagataata

SEQ ID NO: 64832 - DNA, 964 bp, Homo Sapiens
  misc_feature (135)..(135): n is a, c, g, or t
  misc_feature (146)..(146): n is a, c, g, or t
aatgtcattggtaaccatacttgatcctaaattcctgtacttcctcaggccatccgagcatgaaacgctgtcacctacccacatccgctggctgtgacgcttgtcaaagtgttctctatcgagctgcatgcctangaccaccaaangcgttctgaccggtacagtgtcactgtgagaaggcggcgcgacatgtccagggcgcagatctgggctctggtgtctggtgtcggagggtttggagctctcgttgctgctaccacgtccaatgagtggaaagtgaccacgcgagcctcctcggtgataacagccacttgggtttaccagggtctgtggatgaactgcgcaggtaacgcgttgggttctttccattgccgaccgcattttactatcttcaaagtagcaggttatatacaggcatgtagaggacttatgatcgctgctgtcagcctgggcttctttggttccatatttgcgctctttggaactgaacgtgtaccaaagctcggaggctccgataaagccaaagctaaaacttgcttgttctggctggcgacttgtattcatactgtcagggctgtgctcaatgactggcatgttccctatatgcaaacaaaatcacaacggaattctttgatcctctctttgttgagcaaagagtatgaattaggagccgctctgtttattggatgggcaggagcctcactgtgcataattggtggtgtcatattttgcttttcagtatctgacaacaacaaaacacccagatacacatacaacggggccacatctgtcatgtcttctcggacaaagtatcatggtggacgaagattttacaacaagcaaacccttcaacaacagtttgataaagatgcttatgtctaaaagagctcgctggccaacctgcctcttgagttagtctataacagcgaactggtcacgaacatgatccatcaaggcccttcca

SEQ ID NO: 64833 - DNA, 912 bp, Homo Sapiens
  misc_feature (43)..(43): n is a, c, g, or t
  misc_feature (253)..(253): n is a, c, g, or t
gtgctctagaggatcttttggatgaggaacgtcactatcaagnaagcttatcttaatggccatgcagaaaccccagtatatcgattctcgttggctgatggaactatagtgactgcacagacaaaaagcaaactcttccgaaatcctgtaacaaatgatcgacatggctttgtctcaacccacttccttcagacgagaacagaatggatatagaccaaacccaaatcctgttggacaagggattagaccatcntatggctggatgcaacagttcggtaggcggcatgagtatgtcgccaaaccaaggcttacagatgccgagcagcagggcctatggcttggcagaccctagcaccacagggcagatgagtggagctaggtatgggggttccagctaacatagcttcattgacccgtgggccaggcatgccatcaccatcttcctaccagaacaacaactatgggctcaacatgagtagccccccacatgggagtcctggtcttgccccaaaccagcagaatatcatgatttctcctcgtaatcgtgggagtccaaagatagcctcacatcagttttctcctgttgcaggtgtgcactctcccatggcatcttctggcaatactgggaaccacagcttttccagcagctctctcagtgccctgcaagccatcagtgaaggtgtggggacttcccttttatctactctgtcatcaccaggccccaaattggataactctcccaatatgaatattacccaaccaagtaaagtaagcaatcaggattccaagagtcctctgggcttttattgcgaccaaatccagtggagagttcaatgtgtcactcaaatagcagagatcacctcagtgacaagaaagtaaggagagcagtgttgagggggcagagaataccag

SEQ ID NO: 64834 - DNA, 254 bp, Homo Sapiens
ttttatgaggaagcggagcgttctgcaagaagtatatttgcagaaaggctttctgctgttgaggccattgcaaatgcaatatcagttgtttcaagtaatggcccaggtaatcgggctggatcatcaagtagccgaagtttgagattacgggaaatgatgagacgttcgttgagagcagctggtttgggtagacatgaagctggagcttcatccagtgacgttcctcatcccagtgacgttcctcatcccagtga

SEQ ID NO: 64835 - DNA, 952 bp, Homo Sapiens
cctaatatgtctggtaggcggaagactttttaaaaaaactgatctggtctcggtaaaggttttaatattgcccaacataatgctgtaatagcattaaaaaaagtatttgtgaactctgtttcttaggggcttgtacatctctctgctatggacatacataaaattaattgtaattatactcagctcaactgctacagttctgtctaggcagtggcttgggtttttatcgagcaacaacttagacacgtgactgtaatatgctgcaactgtgtgtactgaaaatatgtgaaaatggttgaatgtggactgtgtatatatgtatgtaaaaatttctgtgagatgctgctgtcgccacttaacattaaatatgttctagtggattttaatcctagtggccagttctatgatactgtatgtattatacagctgatgacaggagtaagactgtttagtgaatatctgttaaattttattgttgtggccagagataatttcagaataaaattttaatgtcctaccttacttctctcccctttctgactataatttaactcctgatctatttctggtattatcctttgtcaattagcctggagagggtttagaatgcaaaatggatagctctatatcagggtcttgagaagttaaaataattcattctactagtttgttcatagcaatactttattagttcaatataagtatgcatgattccaagtggaaaaacaaaggttttagtaagtagttcttgcttttcccaggatattctattccttcacctgtcagatttttatgttaacttttttatatatagcctctgctgtgttctttattatgctagagcttcatatcttcttttattttaaccttcacaatgatagttaagctgggggagcagaacctttcaattattccccaccagtcttcattcttttctctgcacaagttctgg

SEQ ID NO: 64836 - DNA, 467 bp, Homo Sapiens
ttgttaacccaagatgctgctacacagatgccaaatggaaatcttccacagggctttttcagtaaacacgtgatgtggagtgcaagctcctccccttcccactagaacatactttaacagaaaacgagtcggaccttctaagctgcactctgtactgtgtgccgagaaggcatttctagacccgtgtttttaaagtagggaactttggggattgccagcccctgctcctcctcccagggagccaactgtccctcctcccctgtccctgggcccatggggcccggcagtggctgtgtcccctgcctgagggctctgtgcctcctgcctcagatgcggcctgtgccagagcggctgcctgtacagccagggtcagtttggccccaaacagggattcagaaaccaaatgtgtgttgtggccattttatgtgtgtctccgtcttattttaataccaaattcatcatgtagt

SEQ ID NO: 64837 - DNA, 469 bp, Homo Sapiens
acccgcgccgaccttctgctctgaatttggctaaaaatattggccttactttttcccgagatataaatgctgtgctaattgacgagggaatgtcagggggatgtctatagacacgggacaaccccttcccatatggcatttgacagacaagaagcgagagagaatgcaaatcaagagaaatacgaacagtgttcctgaaaccgctccagctgcaatccctgagaccagaagaaacgcagagttcctcacctgtaatatacccacatcaaatgcctcaaataacatggtaaccacagaaaaagtggagaatgggcaggaacctgtcataaagttagaaaacaggcaagaggccagaccagaaccagcaagactgaaaccacctgttcattacaatggcccctcaaaagcagtgtatgttgactttgaaaatggccagtgggccacagatgacatcccagatgacttgaat

SEQ ID NO: 64838 - DNA, 384 bp, Homo Sapiens
  misc_feature (136)..(136): n is a, c, g, or t
  misc_feature (153)..(153): n is a, c, g, or t
tcgaccttctgctctatgccatggacagctattggcacagccggtgcctcaagtgctcctgctgccaggcgcagctgggcgacatcggcacgtcctgttacaccaaaagtggcatgatccctttgcagaaatgacngtacatttaggttattntggaaataacggttgccttgcagcgcttgcggacagtcgattcctgcgagtgaactcgtcatgagggcgcaaggcaatgtgtatcatcttaagtgttttacatgctctacctgccgggaatcgcctggtcccgggagatcggtttcactacatcaatggcagtttattttgtgaacatgaagacctacagctctcatcaatggccatttgaattcacttcagagagtcctg

SEQ ID NO: 64839 - DNA, 468 bp, Homo Sapiens
ggacacagtggcacccgaagtggcagcggaaaagccggtcggagctttattgggccccggtgccgagagggccaggatggggagcaggcccaggatacacccactagtgcctcaggtgcccggccctgtgactgcagccatggccacaggcttagctgttaacgggaaaggtacatctccgttcatggatgcattaacagccaatgggacaacctacatacagacatctgttacaggagtgactgccagccaaaggatttttattgacgacagaagagaccagcctgtttgacaagcgattgcgtatcagcgtgaggcgaacatgaaagtgcctacacgagtacagagatattgtggtcaggaatgcaggatggctttcacccacatcttgttatccacaatagtcctcagagaataatgtcatctaaagtccacgagatccatctattccgggggcatcctctagat

SEQ ID NO: 64840 - DNA, 1073 bp, Homo Sapiens
gtgcgatgtgcgtgagtggttttatacacatgatatggtcttttgtctattctatgttataatatggctctgtgagagcactatttggctgtgacgctaacgcacagggcaagtctgtagaccgctgtttcagatcatggacctcgcggggttgatattccagctgagattctatcgtgcaataatccgtctgtctgctcattaggtcgctcatggtgtacccattcatcgtataaattgggtctcaaccctcaggtgcaattgtgtcaacattgacgtcaggcacgcggattattcatagtagtgattcatctgcgaataggcacttactatggttaggaccacagaagtttgtgttgtgtaaaagtaaatgtttggtctactattggttgacagacatttcagcatggttaagctggtttttgacaatctactcggaatatttgatttcggatttgaaggatttaaggtgtgtgaaaatcgatcacagtgttcttggcccttcaataagctgtccatgccgccttttgttgtgttacatgctcttctgcccagacctgttagtaatcctagggagccccctttggaggctgataagtacagttcagccttttctcctcgaagtagtataatgagcttgtagacattcctaaggaatataggtatttctgaatgatattaaaatatctgaggaattttaatacatacaatacaatgtacaaactttctgcccactcagattctcttctccatcatgtaacttagtatttcccattaacctacacactgatttttatgctactccttgtagaaaacaaaattctggtttgactcagtttttgtgtttataaacttttggaatgtgtaccccgtttatgtgaagaattatgacctatcagtcatagctaaatagtgaacctcaaaagtgttaacttttgactattcatgtgaggtttggtatcttgcatttatgtacatggctgtaaattatgtgcattattctctgtatttatcgttatctagctgacttttacttgaattgttcaaattttaaaaattaaaatacgctcatg

SEQ ID NO: 64841 - DNA, 393 bp, Homo Sapiens
aactaattaatgcactttttattttattagtagtcttttttaaaactatagactattgtttatctttgtgaataattaagtaaattattttctgtttatttctttttaatttttgtagtactggagaaaatgaaactgggattgacccatcaagatgcttggctcaataagaaaaccacgttaggagcaacctttgtatattggagacttcagagtaaccagcaaggaagagaaatcttaatcttcaagttaccatattttccaaatattacatggtacctgagttctgcttccttggatgtcattgcttaaatatagtcttgaagggcttgttttgaaatattgtatatattttttcaaatgtatacattgttaataaattaagaaatgaga

SEQ ID NO: 64842 - DNA, 317 bp, Homo Sapiens
ctgttgcttttaagccaacttctaatcgccatatgatagaaattatgaaccactcaaaacacaacccaagaaatatgccaaatcccaagtatgactttgtagcaaggaacaacagtgagctctcggttctaaaggatgatattttagagatacttgatgatcggaagcaatggtggaaagttcgaaatgcaagtggagactctggatttgtgccaaataacattttggatattgtgagacctccagaatctggattggggcgtgctgatccaccttatactcatactatacagaaacaaaggatggagtatggccca

SEQ ID NO: 64843 - DNA, 611 bp, Homo Sapiens
tgagtcgttggggttgacatttagaactttaagtctcacccattatctggaatacttgtgattctgtttattcttccagaatgcatgaactccttgttagcccttcagattgttaggagtggttctcatttggtctgccagaatactgggttcttagttgacaacctagaatcgtcagatttctggttggtttgtaacacagtcattctaggatgtggagctactgatgaaatctgctagaaagttagggggttcttattttgcattccagaatcttgactttctcgattggtgattcaaagtgttgtgttcctggctgatgatccagaacagtggctcgtatcccagatctgtcagcatctggctgtctagaatgtggattctgattcattttcctgttcagtgagatatcatagagacggagatcctaaggtccaacaagaatgcattacctgaatctgtgcctgcactgagagggcaaggaagtggggtgttcttcttgggacccccactaagaccctggtctgaggatgtagagagaacaggtgggctgtattcacgccattggttggaagctaccagagaaactatcccggtccaggtctgacctc

SEQ ID NO: 64844 - DNA, 1546 bp, Homo Sapiens
  misc_feature (1359)..(1368): n is a, c, g, or t
acgaggcagcagcagtagccaccactccgccgaggccgcaaccccggctcggcctccccaggccccgccgctgccgcagtcatggctgctgatggggtggacagaacgctcgcctctgctgtcagcatcccactccggaaatgtcactcccaccgcgcccaccgtacttgcaagaaagcagccccagatgcggagctcccacctccatatacagccattgccagtccagacgccagtggtattccagtaataaactgccgtgtgtgccaatcactaatcaatttggatggcaagcttcaccagcatgtggttaagtgcacagtttgcaatgaagctacgccaatcaaaaaccccccaacaggcaagaactatgttagatgcccttgtaaattgtcttctcatttgtaaggacacatctcggcgaataggatgcccaagacccaactgtagacggataattaaccttggcccagtaatgcttatttctgaagaacaaccagctcagcctgcattgccaatccaaccagaaggttacacgggtcgtgtgtgggcactgtggaaacacattcctgtggcatggaactgaggttcaacaactctggcacaatgcccacactgccaaaaaatctcctcagtggggtagtgcaacttccacggaagacgctgctttgcatatattaccattggaatgatatgtattttcattggagttgggttaactgttggcaccccagattttgcaaggcgatttcgagcaacctatgtttcttgggcaattgcttatctcctaggattgatctgccttatccgagcttgttattggggagccataagagtcagttatccagaacacagttttgcataagcttgtttatgattcagtaatgcaggtgagagtgtctagcagttcttggtaagctactctggacatctttaaattatttatcctaatggattccattctggtttatgtataatcgtttcaagactttgggagtcttttatgaacaaatgctcattgcactatattatatgcaaattgttttgctgctaggttttcaaaatttgaataataaagccttttcatgttcttttacatctcttatagatattttggatttgttaccaaacattacatttactctcacccttttattatttttaaataagttatttcattacttgctgatacatgagtattcctaagtgtttataaatatttctataatagtttcacatttatatttacattttaattaaacagtatcaaaattgcttgcttaaaacctaagcaatatgcattttgcttgaactgcttactgtaactttaacctaagattatagtgaccttattcaggnnnnnnnnnntttagtgtaacttcaaagacttgacattcttgtcaaaggaaaaaaaatttctagaaactgtttgcttgttttttgttgtttgtagaaagataaaatattttggtagtaatttaaaaaacaagaacgaatatttatttgtccacagttggagatgttggataaatgtcttttctcaaag

SEQ ID NO: 64845 - DNA, 558 bp, Homo Sapiens
ggtaggctgccccctacagagcaatccaggattactaaaaaccaggtttcacaacttctcccggagaaatttgcagagcagcggattcgagtatattgtaagaaggtggacagaaagagtttgtatgccgcaagacaatattttgttcagtggtgtgcagacagaaatttcaccaagccgcaggatggcgatgttatagccccacttttaacacctcaaaaaaaggaatggaacgacagtacttcagtccaaaatccaactcgcctccgagaagcatccaaaagcagagtccagctttttaaagatgacccaatgtgaatgtctgtagtcagttgtttacaaactcccttttttgcacaattcatttagaggcttcaatcatagaattctgcaaattaatgacaactcatgctttaattttgtattttgaatgtacacgcatgctgaagctaagtaacttttaatcaaagaaataagatggtattaggcaaatcttactatactatgaaaagcattaccttgcctatttttaatattattaaagcctttctccttcaa

SEQ ID NO: 64846 - DNA, 678 bp, Homo Sapiens
tgtacccggcgtgagaaaacccactcagcctgtaagacccgaaagcagaagtaatactgggaaccctttctgggtctgatggtgctgcctcaacctgagagctttcataagtagttctgaattcccaagctgcctaaaaaggtataaatgtgtaaaaatctcattattgccaaaattggataaatgcccatcttagctaaaacctcaaattgctagaaaattcacagggaagaaaacatttcaagggctatacctcagcatctaggctttttggactaaggagctttcctttttgaagttatatgataatgtacaggtcacagatcccctttcccaacactttgaagatgaatctggagtctgcttacttggaaggcaaagagtgacttgtgtctattgaaagtatatccgttttccccccacatggggattcatacttgagaaatagtgcaaagatgcttatctggaactgtgttctggtgaaagaaccaaattactggcttgttagccaacagcttctgatagcaattcatataaccctctaagaatacctgtttaagtcttgagtgttgaaaggaattgtttactttggaatataggaaaacagttgaatgtcagactctcatttgtatgtgatctaaatttgcaatcaatttcaataatatttacaatttgtga

SEQ ID NO: 64847 - DNA, 364 bp, Homo Sapiens
  misc_feature (255)..(255): n is a, c, g, or t
tacccaggaaagaggtatttaggaaatttcgagcacatggagcccaacctgcttattgcaacaagtattgtagaagagggtgttgaatataccaaaatgcaacttggtggtttcgttttgatttgcgccacagtatatcgatcctatgttcaatttaaaggaagggcaagggcacccatctctaattatataatgttagcggatacagacaaaataaaaagttttgaagaagaccttaaaacctacaaagctatntgaaaagatcttgagaaacaagtgttccaagtcggttgatactggtgagactgacattgatgtggtcctggtgatcgatctgtcctggtgagggtcctcaggcgcaccc

SEQ ID NO: 64848 - DNA, 1006 bp, Homo Sapiens
ctcacagacgcgcccgggccccggacccacagcagatgcccaagagagctgctccatgcgctgtggcgccctggacgggccatgttcctgccacccgacgtgctctggccttggcacctgctgcttggatttccgggacttctgcctggagatattgccctactcaggatccatgatgggcggcaaggactttgtggtgcggcacttcaagatgtccagtcccacagacgccagtgtgatctgcaggtttaaggacagcatccagaccctcggacatgtggactcctccgggcaagtgcactgtgtgtcacctctgctctatgagagcggccgcatccccttcactgtgtcactggacaacggccactccttccctcgtgcgggcacctggctggctgtgcaccccaacaaagtgtcaatgatggagaagagcgagttggtgaacgagacgcgttggcaatactacggcaccgccaacacctcaggcaacctcagcctgacctggcatgtcaagtcgctgcccacgcagaccatcaccatcgaactgtggggctacgaggagacaggaatgccctactcacaggagtggactgcaaagtggtcgtacctgtaccccctggccacacacatccccaactccggctctttcactttcaccccaaaacctgctcctcccagctaccagagatggcgagtgggtgcacttcggatcatcgacagcaaaaattacgcagggcagaaggacgtgcaggcgctctggaccaacgaccacgcactggcctggcacctgagcgatgacttccgagaggaccctgtggcctgggcacgaactcagtgccaggcctgggaggagctggaggatcagctgcccaacttcctggaggagttgccggactgcccctgcaccctgacccaggcccgggctgactccgtgcgcttcttcacggactacggctgtgacatgtagcagggcagcgtgtgcacctaccatcccggggccgtgcac

SEQ ID NO: 64849 - DNA, 628 bp, Homo Sapiens
taatggttggcaaggcccaacttctgcccctattctgtttcctgtgacagaagaagaccccattttgagcagttttagtcgctgccttaaggcagatgtacttggtgtttggcggcgagatcaaagacctggaagaagagaattgtggatattttggtggggtgaagaccccagttttgctgaccttattcaccatgacttatcagaagaagaagatggagtgtgggagaatggactttcctatgaatgccgtactctgcttttcacagcagttcacaatctattggaacggtgtttaatgaacaggaattttgtacgtattggcaagtggtttgtaaagccttatgaaacagatgaacaacctataaataaaagtgaacacttgtcctgctccttcacctttttcttgcatggagacagcaatgtttgtaccagtgtggaaattaaccaacatcaacctgtataccttctcagtgaagagcatatcacccttgctcaacagtctaatagcccatttcacgttatcttatgcccatttggactagatggcactctcacaggacaggcattcaagatgtctgattcagctacaaaaaaattagttggtgaatggaaacagttctatcct

SEQ ID NO: 64850 - DNA, 988 bp, Homo Sapiens
cggaagtggtccctgtagaaccactgtggcaccgctactccgtgccgcgcccgtcgagcattgcgttgctgcattgcgccccaccgactccactatgttgaagaaattcgacaagaaggatgaggagtcaggtggaggctccaacccattccagcaccttgagaagagtgcggtactccaggaggcccgtgtatttaatgaaactcccatcaaccctcggaaatgtgcccacatcctcaccaagattctttatctcataaaccagggggagcacctggggaccacggaagcgaccgaggccttctttgccatgaccaagctctttcagtccaatgatcccacactccgtcggatgtgctacttgaccatcaaggagatgtcttgcattgcagaggatgtcatcattgtcaccagcagcctaacaaaagacatgactgggaaagaagacaactaccggggcccggccgtgcgagccctctgccagatcactgatagcaccatgctgcaggctattgagcgctacatgaaacaagccattgtggacaaggtgcccagtgtctccagctctgccctcgtgtcttccttgcacctgctgaagtgcagctttgacgtggtcaagcgctgggtgaatgaggctcaggaggcagcatccagtgataacatcatggtccagtaccacgcactagggctcctgtaccatgtgcgtaagaatgaccgcctagccgtcaataagatgatcagcaaggtcacacggcatggccttaagtctccctttgcctactgcatgatgatccgggtggccagcaagcagctggaggaggaggatggcagccgtgacagcccactgtttgacttcatcgagagctgcttgcgcaacaagcacgagatggtggtgtatgaagccgcctcggccatcgtcaatctgccaggctgcagtgccaaagagctggccccggctgtgtcagtgctccagcttttctgctgttaa

SEQ ID NO: 64851 - DNA, 564 bp, Homo Sapiens
ctggaaagaaaggcagaagtgagaccaacgttggactatttacagagcgtcctggatgattctacacagccacggaagggcaataccagcagcagccttagagcacagggagacccgtccatttggcaggggtggctgcctcatttagagaggaaaagtaaccatcactggttgcacttatgatttcatgtgcggggatcatctgccgtgcctggatcctgaaatagaggctaaattactcaggaagaacaccctctaaatgggaaagtattctgtactcttagatggattctccactcagttgcaacttggacttgtcctcagcagctggtaatcttgctctgcttgacaacatctgagtgcagccgtttgagaagaaaacatctattctctccaaaaatgcacccaactagctctatgtttacaaatggacataggactcaaagtttcagagaccattgcaatgaatccccaataattgcagaactaaactcatttataaagctaaaataaccggatatatacatagcatgacatttctttgtgctttggcttacttgttta

SEQ ID NO: 64852 - DNA, 713 bp, Homo Sapiens
gcacggttgggagggaggcgtgttgtttgccaggtggcgaaggagcaggctagtgtctgtcagtggctgttcggcagcttgtcagccactgtcggagccgtccgcgaaggtctcagctgagcgcacgcaggagtgagaaggccttgggagcagggcgtcagagggctgctattgctttctgaggtttaagtgtcccctgtctgtctgctgctcccaggctgttactagccacaagatccacagcaggggaccatatgtcgaactgtttacatggatgttgctctaagtgaatgtttcgggatgccgaaatgatgaaatcacagccatagcagggatggctttccaggttggggtttcaattgactacttttatttcagtctgagcctgattaaaacatacagtgaaccttctaatgaattttgagttttgatattgtacattggtttactttagaagagtttttacttatgtaaattttgttctgttttggtgtttgaatatctagatggtcactgtaatttatacttgctaaaattaatttatattaccattttctctaaagttggccttaaaacgtgcttataaagtgaaggggtcatacagttgggccttcattattttgctgaattatgtgatgatttttttgctttctacccacaaaacatttattaattcacttcctcccagcccattctgatgttggagcggccgc

SEQ ID NO: 64853 - DNA, 496 bp, Homo Sapiens
atgccgggagcgatctttggaaaggagtccccggctcgagcgacactgcccccctggggctctgcaggagatggctggccgagctctcaagcagactggcagcaggagcatcgaggccgccctggagtacatcagcaagatgggctacctggacccgaggaatgagcagattgtgcgggtcattaagcagacctccccaggaaaggggagcatgccaaccccagtgacgcggaggcccagcttcgaaggaaccggcgattcgtttgcgtcctaccaccagctgagcggtaccccctacgagggcccaagcttcggcgctgacggccccacggcgctggaggagatgccgcggccgtacgtggactaccttttccccggagtcggcccccacgggcccggccaccagcaccagcacccacccaagggctacggtgccagcgtagaggcagcaggggcacacttcccgctgcagggcgcgcactacgggcggccgcaa

SEQ ID NO: 64854 - DNA, 488 bp, Homo Sapiens
cggtgtgaacgtgtgtccgcagcgtgatgggcaaccaggtggagaaattgacccacctaagttacaaggaagttcccacggccgacccgactggcgtggaccgggacgacgggccccgcattggggtctcctacattttctccaatgacgatgaggacgtggagccgcagccgccgcctcaggggccagatggcggcggcttgcccgacggtggggacgggccgccgccgccccagccgcagccctacgatccgcggctgcacgaggtggaatgttcccgtgttctaccgggacgaatgcatctaccagaagagcttcgcgccgggctcggcggcgctgagtacctacacgcccgagaacctgctcaacaagtgcaagccgggcgatctggtggagttcgtgtcgcaggctcagtacccgcactgggccgtatatgtgggtaacttccaggtggtgcacctgccccggctggaggtgattaacagctt

SEQ ID NO: 64855 - DNA, 804 bp, Homo Sapiens
ggtaggtaaatggagtacagatgggaaatcaaaccagtgtgtgactgggcatgatttagaggagactgttattgatatgacagatcctagcaggcaacctcatgagagcctggatgttcgtttcaatgcaggcagaaatctggatggagaagcagtatttatctcaaagagaagtggacctagaggcttatttcactaggaatcacaccgttttgcaaggtactcgattcaaaagagccattttccaagggcaatactgtagaaattttggctgttgtgaagacagagatgatggctgtgtcactgagttctatgcggcgaatgcgttgtgctactgtgataaattctgtgacagagagaattctgattgctgtcctgactacaagtccttttgccgtgaagagaaagaatggcctcctcacacacagccttggtatccagaaggttgcttcaaagatggtcaacattatgaagagggatcagtaattacagaaaactgcaactcctgcacatgctcaggacagcaatggaaatgttcccagcatgtatgccttgttcgttcagaattaacttgaacaggtcaataaaaggagactatggatggacagcacagaattacagccaattttggggaatgactttagaagatggttttaaatttcgccttggcactttgccacctagtctcatgctcctgagcatgaatgaaatgacagtaagtgttccttctgattcacgtatgtgcatgtatttgtaaaagtgtgtttgtgtgtgcattaaaagcaattataaatcacaaaaaaa

SEQ ID NO: 64856 - DNA, 1108 bp, Homo Sapiens
  misc_feature (30)..(30): n is a, c, g, or t
tcagggacttgctgtgtgggaggagggagncgcccgccctcccccccctggccccggtccggaattttcgggatcgcgcggcggctcccggcaggaggcagagggcacaccgccagccccaggccaggctgcgagggccgcggacccgagccgggaaggaccttgggcggacgagccgcgcgtcccgcagccatggagcaggacgacccggtcgaggcgctgacggagctgcgcgagcggcggctgggcgcgctggagctgctgcaggcggcggccggctcgggcttggcagcctacgcggtgtgggcgctgctgctccagcccggcttccggcgcgtgccgctgcggctgcaggtgccctacgtcggcgcgagcgcgcggcaggtggagcacgtgttgtcgctgctgcgaggacgccccggaaaaacggtggatctgggctctggcgacggcaggatcgtgctggcggcccacaggtgcggcctccgcccggccgtgggctacgagctgaacccctggctggtggcgctggcgcggctgcacgcctggagggccggctgtgccggcagcgtctgctatcgccgcaaggatctctggaaggtgagcctgagggactgcctggccacgtgtctgtgttccggcccataggtgcggccgccgcctggccgagggctgcgggctgagcctctggctggtggcgctggcgcggctgcccacctggagggccgtctgtgccggcggtggcgactgtcgccgcgagtatgtccggaaggtgagcctgagggactgccgcaacgtgtctgtgttcctggcccctagcgtgctcccgctgctggaggacaagctgcggacagagctgcctgctggggcccgcgtggtgtctgggcgcttcccactccccacctggcagcctgtgaccgcggttggcgagggcctggaccgagtatgggcttatgatgtttcctgagggtgggcaaggctgggggagggcgcctcctcgcgggatacccatcccaggctgcccccggacctagttctgcccccatcccggggggccttatttctcaggccagctgagtattagacacgataaagactctgagggttg

SEQ ID NO: 64857 - DNA, 420 bp, Homo Sapiens
catcaacctacctaaattatagcaacagctccttattagtctccctgttttttatttttattcctttctacactacaaccaaattgctccaaaagacttactgatcatgtcactgcattgctttcaccattgctcttagggtacaatacaaatttatcttcatctttaaggtctcagtatgccacttcatctaggaaaccttcattgatgccctctagattaggtgcccttactatccattccctatacaccctgttctttcccagacatacacttggcacactttattgttactgcttattgatcactgctagactgtaagctttgtaagggcagggaccatataagccttgttcactgttatatctctagtgcttagcacaatgcctggcatttcaataaatgtttggacaaacgaaa

SEQ ID NO: 64858 - DNA, 835 bp, Homo Sapiens
gtttacatcacaaacgggtttgttgacgttggaagcacgttgggttgaaacgcggatgaaatggtgacacggtaatcgagagcatcgggaggattgcccttggcccataccgacttgtttgcaagtggccgcgtggcagcccccccgacccctgcaactcggcaagggacaaagtttccgccggcgcatcaaccccacgctcaaagtttcctggccccggggacatgtcggaagcaggtgccttttgtgcgcgtccagccagaccagcagcatcgtggagtgctggtccctgcgcaaaggagggactccccgtgatctacatccttccagcagatctcccccgtggttggccgacaaacagcccacaagttctcaaatggcggatcctatcggccaccaacgatctggaccgtgtgtcggccgtggcgctgccccaagctgcccatctcgctcaccaacaccgacctcaaggtggccagcgacacacagttctaccctggcctcgggctggcctggccttccacgacggcagcgtccacatcgtgcaccggctctcactgcagaccatggccgtcttctacagctctgcaggccccgaggcctgtggatgagccggccatgaagcgccaccccgcaccgcagggccccagccgtccacttaaaggctatgcagctatcgtggacgtcactggcctggtggggattgacagccacagggaagctgagcgtgctccgcctctcaccattccatgggcacacccgctggaggtggggcatggcgctgcggcacctgctcttcctgctggagtactgcatggtgaccaggctacgactg

SEQ ID NO: 64859 - DNA, 816 bp, Homo Sapiens
  misc_feature (483)..(557): n is a, c, g, or t
  misc_feature (737)..(737): n is a, c, g, or t
  misc_feature (740)..(740): n is a, c, g, or t
  misc_feature (779)..(779): n is a, c, g, or t
ggagccctggggcacttttctgcttccttccagaggcctgggcctctgataacactttggctttttctccattcacgctgatttggcaaaaggccagagatgggcctccttccctggggaggtgtgatgtagttatcacattcaggacccttgttgatttatcatctattatttgaattcaactggacactctgtaaaatgctgcactgcagcaaaaacaaaaccaccaccaccccagagaaaaccatgtactaattggagtggggtacccccattcacaggttcccaggtcccctggctttggctgatttcaaaatatagagccctttcttgccagtacatccaagtttaaaattatcagcgaaatggtccatgtttttccaattacctgctgacacggttctaagctaagtgaaggggaagatctgagagcgtgctgtttgtggctgttgatgcatattcgtgatgtaacaggtcctgggnnnnnnnnnnnnnnnnnnnnnnnnnnnnnnnnnnnnnnnnnnnnnnnnnnnnnnnnnnnnnnnnnnnnnnnnnnncaaactgttaatcttcgaaaacgaccatttcacttcttggatatcaagtgctaacccagtatggtcttcttttttatgtaagggacagctttctccacagagtccttttctgctggtgaggacagcatttctgagcagggctttgttctctatgtgcattaggacttttatcatgccctntgntctgggtgtagttaccttgacagcatcaaatggcggccntcttcctaaatgtccccttcagtttttcatgaaccta

SEQ ID NO: 64860 - DNA, 623 bp, Homo Sapiens
gctgatgttacggaggatgtagtcctcctatgtcttcctggattttctccctggatcccagagaaatagcattcaagcccagcttgctcactcccatttgcatctggatcccagagaagtagcattcaaacccagcttgttcactcccatttggcactcttctttgctgcaggcagttggctgggataacatggcattcatcttcctcaatcgcttttttggatcctgaccgatgaggctgagagagaagaggttcgagactgggtgcttacagtctccatggaccagcggctggagcaggttctgcctcgggatgagcgtggcgcctacgaggcctccctagtggcagcgagcactggtgttcgagccctgccctgccttattacaggataccccattctgaggaacaaaattgaatttaagcggccagggaaggctgctaacaaggacaactggaataaattccttatggccatcaagacctcccacagcccagtgtgccaggacgtgctgaaattcatcagtcagtggtgtggagggctccccagcaccagcttttcctttcagtagttggtagagctgaggaagagttagggcctctccctcattaaagttttataaat

SEQ ID NO: 64861 - DNA, 942 bp, Homo Sapiens
  misc_feature (316)..(316): n is a, c, g, or t
cgcgcgcgccatttctagtcgttttcaaagcgcctcgcgctgattctcacgggcccggctgccggcccccgctctgccctggattggtagcttatgtcgatcttgatgaaagagcaattgatgctctcagggaatttaatgaagaaggagctctgtctgtactacagcagttcaaggaaagtgacttatcacatgttcagaacaaaagtgcatttttatgtggagttatgaagacctacaggcagagagagaaacaggggagcaaggtgcaagagtccacaaagggacctgatgaagcgaagatcaaggccttgcnttgagagaactggttatactctggatgtaaccacaggacagaggaagtatggtggtcctccaccagacagtgtgtactctggcgtgcaacctggaattggaacggaggtatttgtaggcaaaataccaagggatttatatgaggatgagttggtgcccctttttgagaaggccggacccatttgggatctacgtcttatgatggatccactgtccggtcagaatagagggtatgcatttatcaccttctgtggaaaggaagctgcacaggaagccgtgaaactgtgtgacagctatgaaattcgccctggtaaacaccttggagtgtgcatttctgtggcaaacaacagactttttgttggatccattccgaagaataagactaaaagaaaacattttggaagaattcagtaaagtcacagagggtttggtggacgttattctctatcatcaacccgatgacaaaaagaagaatcgggggttctgcttccttgaatatgaggatcaccagtcagcaagcacaagccagacgccggctgatgagtggaaaagtaaaagtgtggggaaatgtagttacagttgaatgggctgaccctgtggaagaaccagatccagaagtcatggcta

SEQ ID NO: 64862 - DNA, 1285 bp, Homo Sapiens
  misc_feature (780)..(818): n is a, c, g, or t
ggcgctgtagattacgccgcgatcccaggagatgcgggcaaaggaggggtcgtggagaggtgttatttaagcccccaacttctgatgctgaatttttagaaagattgcacctcttcctagctagagaggggtggaccgtgcaagatgttgcccgtgtccttgggtttcagaaccctactccgaccccgggcccagagatgccagcagagatgctaaactatattttggataatgttattcagcctcttgttgagtccatatggtacaagaggctgacacttttctcggggagggacatcccagggcctggagaggaaacctttgatccctggctggagcacactaatgaggtcctagaggagtggcaggtgtccgatgtagaaaagaggcggcggttgatggagagtcttagaggccccgccgctgatgttattcgcatccttaagtccaacaaccccgcgataaccactgccgaatgcctgaaggcgcttgagcaggtgtttgggagcgttgagagctctagggatgcccagatcaaatttctgaacacttatcagaacccgggagaaaaattgtctgcttatgtcattcgtctggagcctctgctacagaaggtggtagagaagggggccattgataaagataatgtgaaccaggcccgcctagagcaggtcattgccggggccaaccacagcggggccatccgaaggcagctgtggcttaccggggctggggaagggccagccccaaacctctttcagttgctggtgcagatccgtnnnnnnnnnnnnnnnnnnnnnnnnnnnnnnnnnnnnnnnacccttctgcagttaggcctggaagggcacttctgagtgccaggaaaggcagctttagtgcagacctagatcacagctacttttcttgtccctgtggggtcttacagatgtgtctctgagtagtaagggcttagccttgttctgttttgttgttttttggaggggaaggttagtcaggcctgagtattcatgtaacattctaaaattgtgccagcgagcaccgtgaacgactgcaatgcaagcgggtcttgctggctaaaatgccaggtaaagggttggttggacacagcgcttagtgcacgctgtcatcatggacatcataatcagttgtgaaaaaacacgcgaacctatgacacttcttattccacactgaatgtgaaattgcatgttcagatgttactacgaggcctggctcacaggaagtgttcagtaaaagtatgcagtgttagttactatatcgcgtcttt

SEQ ID NO: 64863 - DNA, 442 bp, Homo Sapiens
  misc_feature (57)..(57): n is a, c, g, or t
ggacacgcgcgcgacatcagtccagaacggcctggcctgcagcggtgcctgaccgancggcgacccgggctctcccgctcattcccatcgtggtggagcagacgggtcgcggcgagcgcgcctgatgacatctactcgcggctgctgcgggacgcatcgtgtgcgtcatgggcccgatcgatgacagcgttgccagccttgttatcgcacagctcctcttcctgcaatccgagagcaacaagaagcccatccacatgtacatcaacagccctggtggtgtggtgaccgcgggcctggccatctacgacacgatgcagtacatcctcaacccgatctgcacctggtgcgtgggccaggccgccagcatgggctccctgcttctcgccgccggcaccccaggcatgcgccactcgctccccaactcccgtatcatgatccacca

SEQ ID NO: 64864 - DNA, 1182 bp, Homo Sapiens
ctggaccggtccggaattcccgggatctgagtgtggctgaagcagcgaggcgggagtggaggtgcgcggagtcaggcagacagacagacacagccagccagccaggtcggcagtatagtccgaactgcaaatcttattttcttttcaccttctctctaactgcccagagctagcgcctgtggctcccgggctggtgtttcgggagtgtccagagagcctggtctccagccgcccccgggaggagagccctgctgcccaggcgctgttgacagcggcggaaagcagcggtacccacgcgcccgccgggggaagtcggcgagcggctgcagcagcaaagaactttcccggctgggaggaccggagacaagtggcagagtcccggagcgaacttttgcaagcctttcctgcgtcttaggcttctccacggcggtaaagaccagaaggcggcggagagccacgcaagagaagaaggacgtgcgctcagcttcgctcgcaccggttgttgaacttgggcgagcgcgagccgcggctgccgggcgccccctccccctagcagcggaggaggggacaagtcgtcggagtccgggcggccaagacccgccgccggccggccactgcagggtccgcactgatccgctccgcggggagagccgctgctctgggaagtgagttcgcctgcggactccgaggaaccgctgcgcccgaagagcgctcagtgagtgaccgcgacttttcaaagccgggtagcgcgcgcgagtcgacaagtaagagtgcgggaggcatcttaattaaccctgcgctccctggagcgagctggtgaggagggcgcagcggggacgacagccagcgggtgcgtgcgctcttagagaaactttccctgtcaaaggctccggggggcgcgggtgtcccccgcttgccagagccatgttgcggcccagaaacttgtgcgcgcagcccaaactaacctcacgtgaagtgacggactgttctatgactgcaaagatggaaacgaccttctatgacgatgccctcaacgcctcgttcctcccgtccgagagcggaccttatggctacagtaaccccaagatcctgaaacagagcatgaccctgaacctggccagtgtgcacgagtgggaaggacatggcgcgccctcccttggcgtggagccagggagcggccgc

SEQ ID NO: 64865 - DNA, 1097 bp, Homo Sapiens
  misc_feature (716)..(716): n is a, c, g, or t
  misc_feature (736)..(736): n is a, c, g, or t
  misc_feature (764)..(773): n is a, c, g, or t
  misc_feature (863)..(863): n is a, c, g, or t
  misc_feature (1060)..(1060): n is a, c, g, or t
ttaacatttaataaaaagaaagggtgaaataaactgaagaccattttagaactagtcagttctctgcagcaaagggaacaggagccatttgaaccctctgggacccctcaccccactgcttcagggtgctaggctgagggatgtttttcctcccccttaccgcccatgccttgaaagaaaagtcactttttgtggagggcatcattcattccggattcacaaaccccaaaaacctctggtgggagataggaagatagggcgtgggcctgggccttaacctcaatcttgtgtctgcctcagtcttttctgactggccctgaagttgtcagtggctctttctgtccttcagcccctggaaaggtgctccaggataacaaagaagggcaggttgaagcccctcatggaaggagctggctttgtggggctgcaaaggacttttaagtcctgcctgtactgaagttcacagcccacctgactgagcagactcttcctgttcctttctctaccacccttgccttcccaggactgcacggtttaacacagcagagtacagaaaggtgaagaagtgagcagaggcttatgaagatattcagatactcttctatgccatgaagcacaaagactttgttgagatttgcctcagttcagtagatcttccttggcagccacccataggttagttctttgtcttccgggtcctacagagcacagagaanatggaggtcccccagtctangtaggaagctgattggatgaagacttcnnnnnnnnnncgacagcaggatgggggctcttgagctccacacaccaggatggctttgggttttctacaactgtatgctatgtgtaaaagggtggctcanaatcgtggcattgaaaccaaggagaccatggcctactcttttgaaatggaatggggaaaaattacccttaaaaattttaatcccggagaattgtcgccactggcactcccagccctggggccaaacaaaaccctgacctcccgtcctccgggcaaaatacaatggaaaaaaatgggtagaaaatcccattgtccggnccccccctccggccccttcaaagaaactttttctaaa

SEQ ID NO: 64866 - DNA, 1059 bp, Homo Sapiens
  misc_feature (957)..(1009): n is a, c, g, or t
ctggaagctgtgatgtcccatttcatgcacggcaccagaacattccaccctcaagggagaagacacgtctttctagctacagcattaacttgcaaggggctgtcgactgggtgatgatgcagtcatgttttggccatcacttcatgctggtgctggagaaacaagagaagtacgaaggccaccagcagttttttgccatcgtcctgctcattggcacccgcaagcaagccgagaactttgcctacagactggagttgaatgggaaccggcggagattgacctgggaggccacgccccgttcgattcatgacggtgtggctgcggccatcatgaacagcgactgccttgttttcgacacagccatagcacatctttttgcagataatgggaaccttggaatcaatgttactatttctacatgttgtccatgatgtgactttcgtaaaccttcaaaattatttgggcatagtgctctatgtttaataaaggtttttatagatgttttattccatatgtcttcacaagtcaggacccacaattacccgtgttttgtttgaacagcagtgtcccatctggcttcgacccaacaaagttcattaacctggggatgaatggggttggcctgttggtgatttggatgctgttctgtgatctaaaacaactcttattgaattgtatttactccctaaacaacacttgacaggctgttgcacagggcttctatagatcagtgtgttaggaatgggaggccccttcctgcctgccttcccatattggtcccttgacattgacaaaagcacagtgactgtcagcagattcctttacttttgtttgtgggaggtaggaattgttttaatgcattttaaacagtgtttctgaaattggatggctggctaatagacactgaatcacccggagtgcttatcttaaaattgcagatttagggagcctgccaannnnnnnnnnnnnnnnnnnnnnnnnnnnnnnnnnnnnnnnnnnnnnnnnnnnnggttaaattgtgggaaagggtccagattttaaaggtgctttaaggttgcc

SEQ ID NO: 64867 - DNA, 889 bp, Homo Sapiens
cgtcgaccttctgctctgcttgtgcaattttttccaccctccatctctgtcaaacgtaagccttcctgaccctctaagacctacctttgtcatgtacctttaccctcaggcaaggagcaatctcttctcttcctcttctaccttgctgtagcttctccccaaggatttatcacattctgccttgaatcatagggaacagcatgtgtagtggaatgaacacaggcctctgaatccaagatacgagtttaaatcccagctttggaggtggttactttaagtctcaagtgccttcattcgtcttcctatatgaagtagatattacaatatcttacttacagagtcattgggagctatacatgcagcgattgggtaaagcacctggcacatggcaagcgattagcaaatgctggttacttctacttctttctcttcccttttcccagtctatcataatttccttgagagcaggcaccatgtcttatttacccttgtatttcccacagtacttcccatagtgagttacccttagtaaatactcagtaagttgaattgaatttaaattacctgtaagtcttaaaatgtgggattaaattaagaatatattgtcctggaaatacccaaatgtctattggtggatgaatggataaacaaaatgtggtatacacataatggaatattattcagccttaaaaaggaatgaaattctgacatgtgctacaatatgatgaacctggaagacattatatgtgaaataagccagacagaaaaggacaaatactatatgattccacttatatgaagtacctagagtagtgtaattcatagaaacagaaagtacaggttgacatgccaaatctgaaatgagacatgcttcaaacaccggaactcg

SEQ ID NO: 64868 - DNA, 697 bp, Homo Sapiens
cctggctgccaggtctggagagtcggcttgactacactgtgtggagcaagttttaaagaagcaaaggcagacctgagcatgacggctttttcgaggtaggagtcgactcctgtgaggtatggtgctgggtgcagatgcagtgtggctctggatagcaccttatggacagttgtgtccccaaggaaggatgagaatagctactgaagtcctaaagagcaagcctaactcaagccattggcacacaggcattagacagaaagctggaagttgaaatggtggagtccaacttgcctggaccagcttaatggttctgctcctggtaacgtttttatccatggatgacttgcttgggtatggagagtcggcttgactacactgtgtggagcaagttttaaagaagcaaaggactcagaattcatgattgaagaaatgcaggcagacctgttatcctaaactagggtttttaatgaccacaacaagcaagcatgcagcttactgcttgaaagggtcttgcctcacccaagctagagtgcagtggcctttgaagcttactacagcctcaaacttctgggctcaagtgatcctcagcctcccagtggtctttgtagactgcctgatggagtctcatggcacaagaagattaaaacagtgtctccaattttaataaatttttgcaatccagctagacagagaagac

SEQ ID NO: 64869 - DNA, 831 bp, Homo Sapiens
tttctggcatgtcggggacttgactccagcaccatcgggctcctgctggagtctctcaatgtgcacacggcagagctctaggtcactgtctcctgggaccaccacagagccccagcggcatgacgacggctacctcgaggtcattggcttcaccatgacgtcgttggccgcgctgcaggtgggcggacacggcgagcggctgacgcagtgtcgcgaggtggtgctcaccacatccaaggccatcccggtgcaggtggatggcgagccctgcaagcttgcagcctcacgcatccgcatcgccctgcgcaaccaggccaccatggtgcagaaggccaagcggcggagcgccgcccccctgcacagcgaccagcagccggtgccagagcagttgcgcatccaggtgagtcgcgtcagcatgcacgactatgaggccctgcactacgacaaggagcagctcaaggaggcctctgtgccgctgggcactgtggtggtcccaggagacagtgacctagagctctgccgtgcccacattgagagactccagcaggagcccgatggtgctggagccaagtccccgacatgccagaaactgtcccccaagtggtgcttcctggacgccaccactgccagccgcttctacaggatcgaccgagcccaggagcaccctcaactatgtgactgagatcgcacaggatgagatttatatcctggacccctgagctgctggggggcatcggcccggcctgacctcccaacccccacttcccctctccccacctcaccctgctcacccacgccccggtcactgcaaggggatgctgcaccccctca

SEQ ID NO: 64870 - DNA, 594 bp, Homo Sapiens
  misc_feature (93)..(143): n is a, c, g, or t
gcgaccgcggcgtccccggagcctgcgcaaacccagccccagccccagccccagcctgcgcgcacggagggccggagacagccccggcatccnnnnnnnnnnnnnnnnnnnnnnnnnnnnnnnnnnnnnnnnnnnnnnnnnnngtgggggccgctggacgacgtgcgcttcctcatcgcctgcacttcctggtactgacggcgtcctccgcaggatgtcgcccgtctgtccgccgtcccctgtggttcttgcctgccttgtctcctctccccacgtccctgcgtctcttacaccccctcccacccgaggctccccagagatagcagagaattcgaagaggtcgccggggactggaaagaagtcccggcagggccgccttcgcagtctacaccccagcctgcttcccagcctacacccagacccagctcagaccttcgtgaccaccccatccctttctccggctggctgggtcgggggcatccctctctgtcgctggcttccagaggcaggacaggcctcctggtaagcccgcaaagttgctgacctcctgacttcgtctgccttttattaatatctgtattgctgataaccgtg

SEQ ID NO: 64871 - DNA, 804 bp, Homo Sapiens
  misc_feature (581)..(643): n is a, c, g, or t
ctcaacgctttatacttccgagaactcatctggaagcatccctggcaaaaatgcagctgagtacaaggttatcactgtgatagaacctggactgctttttgagataatagagatgctgcagtctgaagagacttccagcacctctcagttgaatgaattaatgatggcttctgagtcaactttactggctcaggaaccacgagagatgactgcagatgtaatcgagcttaaagggaaattcctcatcaacttagaaggtggtgatattcgtgaagagtcttcctataaagtaattgtcatgccgactacgaaagaaaaatgcccccgttgttggaagtatacagcggagtcttcagatacactgtgtcctcgatgtgcagaagttgtcagtggaaaatagtattaacagctcactcgagcaagaaccctcctgacagtactggctagaagtttggatggattatttacaatataggaaagaaagccaagatttaggtaatgagtggatgagtaaatggtggaggatgggagtccaaatcagaattatagaagaagtatttcctgtaactatagaaagaatnnnnnnnnnnnnnnnnnnnnnnnnnnnnnnnnnnnnnnnnnnnnnnnnnnnnnnnnnnnnnnnctcttcctatatatatccatagtggacttattcagaacatagatatgtattcagcttgtcttcaaatacggccaagcagaaaatgttttatattttataaatcatcttttgactctgtatttaaattctatgatactgaaaataaaggcattctggaaaaa

SEQ ID NO: 64872 - DNA, 732 bp, Homo Sapiens
cccacgattataggggagggcgctcatgcccgagtgctgacctgcatcaacctgatcaccagccaggagtacgccgtcaagatcattgagaagcagccaggccacattcggagcagggttttcagggaggtggagatgctgtaccagtgccagggacacaggaacgtcctagagctgattgagttcttcgaggaggaggaccgcttctacctggtgtttgagaagatgcggggaggctccatcctgagccacatccacaagcgccggcacttcaacgagctggaggccagcgtggtggtgcaggacgtggccagcgccttggactttctgcataacaaaggcatcgcccacagggacctaaagccggaaaacatcctctgtgagcaccccaaccaggtctcccccgtgaagatctgtgacttcgacctgggcagcggcatcaaactcaacggggactgctcccctatctccaccccggagctgctcactccgtgcggctcggcggagtacatggccccggaggtagtggaggccttcagcgaggaggctagcatctacgacaagcgctgcgacctgtggagcctgggcgtcatcttgtatatcctactcagcggctacccgcccttcgtgggccgctgtggcagcgactgcggctgggaccgcggcgaggcctgccctgcctgcagaacatgctgtttgagagcatccaggagggcaagtacgagttccccg

SEQ ID NO: 64873 - DNA, 998 bp, Homo Sapiens
cgtccgggagcccgaccttgagatggcctgatatgaaggagtcacgcctcccgcctcccggagctgcccagtggctgccttgtccttcaagtgcaggagctggttcaaatgtcaggaatggaagccactgtgaccatcccaatctggcaaaacaagccacatggggctgctcgaagtgtagtaagaagaattgggaccaacctacccttgaagccgtgtgcccgggcgtcctttgagaccctgcccaacatctctgacctgtgtttgagagatgtgcccccagtccctaccctggctgacatcgcctggattgctgcggatgaagaggagacatatgcccgggtcaggagtgatacgcgccccctgaggcacacctggaaacccagccctctgattgtcatgcagcgcaatgcctctgttcccaacctgcgtgggtccgaggagaggcttctggccctgaagaagccagctctgccagccctaagccgcactactgagctgcaggacgagctgagccacttgcgcagccagattgcaaagatagtggcagctgatgcagtgacatcatcgaggagacagaggtggaggtccctgagcttccatcagtccccctgctttgttctgccagccctgaatgttgcaaaccagaacacaaagctgcctgcagttcgtctgaagaggatgactgcgtctctttgtccaagggcagcagctttgcagacatgatgggtatcctgaaggactttcaccgaatgaaaacagagtcaagatctgaaccggagtttattgaaggaggaagaccctgctgtgcttatctctgaggtcctaaggaggaagtttgctctaaaggaagaagatatcagtagaaaaggaaattgacaaccctcagctctgcaaactcagtctcatgctcctgggataccttcaatagctgccttcctcaccgcagatgtttctgcctcttaaggatagatcttctgcaacagtcttgctgacaa

SEQ ID NO: 64874 - DNA, 805 bp, Homo Sapiens
gggattcacttctggaagatgtgatgaaagcattggaccttgtttcagatcctgaatatataaatctcatgaggaataaattagatccagaaggattaggaatcatattattgggcccatttcttcaagaattttttcctgatcagggctccagtggtccagaatcttttactgtctaccactacaatggattgaagcagtcaaattataatgaacaggtcatgtacgtagaagggactgcagttgtgatgggttttgaagatcccatgctacagacagatgacactcctattaaacgctgtctgcaaaccaaatggccatacattgagttactctggaccacagatcgctctccttcactaaattaatttgtctaagtatttataaggaagatcttaataacagatgttgaaagaaggagtcaagactggcaattggctggattaagctaaacactggtatcactgattaactgtaaataacaattaaaaacacattttcagtgtttatgatatgtttaaattatttgtcctaaagctttatgttaaagattatcctattttaccccttcgtgtgaaatttactagcaaaattaagctttcatcaaagttcatcacttttgcattcagatacttggtcatttacttaccaaattacaaacacaatactacagcatttgtatattaagtatcacagttactattgataaactacttttgggttttatttcattgaggcactttttatattgtttgaatgattccggcttgtaatatatcagcctctacaatgacatgccaggtaa

SEQ ID NO: 64875 - DNA, 455 bp, Homo Sapiens
gcgctcgggtaaggatcccagttttctctggatgacgtggaagtctgacggccacgctggatctggaggacgtccggaggctacagtgtcggaggatttcacctcgaaacctggcggccagcagggcgagcccctaccccagagtgaaggtggactttgccctctcgtgccacgaggacttgctggcacccatctctgagcccatcgagtggaaataccacagccctgaggaggagataagccttggacctgcctgctggctctgggattttttaagacgaagtcaacaggcagggtttttgctgcccttgagtggcggggtggacagcgcagccaccgcctgcctcatctactccatgtgctgccaggtctgcgaggccgtgaggagtggacatgaggaagtgctggctgatgtccgcaccatcgttaacccgagcgctaccaggggatcctct

SEQ ID NO: 64876 - DNA, 761 bp, Homo Sapiens
gatcttagctgtggggttcctttactattgggtgaatcattaggtataaaaaataatcatcaaccaggcaaattactttgcttcctagctgatgtcatcccacattggtacaggtgttattcagtactgggtggttcagcagggaagccaggtgggaccagtgtgtctgtcatgaaaccactaactgcattcctgactgaagagccatctgtcatttattggggaaggtcttcagttgagctctcagccttagtaaggaagcacgtggaggagggacggaggaggttcccttgctgggcatgcttcgtagagggccaggagcagcaggtcatgtgcacatgccgttgcagcacaagcttatgcttcccgtagccgtggcttttcattctgcacagtcccaggtcccagctcccctcttatggtttctgtcataatgtgctttatctgattgactccaaacatcccgaaatgtcacctgcagatttctcgtgggaaccaatatgtacatgtttgcaattatgctgtgagaatttaaatgtgttagatggaaaatgctattggcagggaataatattaaccacaaggaacaaaacaccccccctgtcgggcccgcctcggcccctcaagaaacttttctaaaacctttccctttgggcgccccgggccccaataagggtaaagggaacatgggtccatagactgatttccctaggaaaaatccctgggcccatggactaagggcctggggatttcctcacccc

SEQ ID NO: 64877 - DNA, 677 bp, Homo Sapiens
ctctagagatccccccaacttggcctcgacagagtggaccacagtggaaaggccccaaaccagcttttggacagcagcatcagcagcaacctaagtcacaagcagaacctctttcaggaaacaaagaaccattagcagacaccagtagtaaccagcagaagaattttaaaatgcaatcagctgcattttccattgctgcagatgtaaaggatgtcaaggcggctcagtcaaatgagaatctaagcgactctcaacaagagccacctaaaagtgaagtctcggaagggcccgtagagccctctaattgggaccagaatgttcaaagtatggagactcaaatcgacaaagcccaagctgttactcagcctgtaccccttgcgaataagcctgtacctgctcaatctacttttccttcaaaaacaggggggatggagggaggaacagcagtagcaacatcatcattaacagcagataatgattttaaacctgtgggtattggtctaccccattcagaaaacaaccaagataaaggcctgcctcggccagataatagagataatagattagaaggcaatagaggcaacagctcatcttacagaggtcctgggcaaagcagaatggaagacacacgggataagtctagtaaacagagtcgcgccaggcaatcatcgagccat

SEQ ID NO: 64878 - DNA, 910 bp, Homo Sapiens
  misc_feature (55)..(65): n is a, c, g, or t
  misc_feature (825)..(850): n is a, c, g, or t
tccacgctttatacttcttttagttcatggttttatagtagaggtttctatgtgnnnnnnnnnnngggaacattatatgtcggatacatatagggcttgggagacaatcaagtaacaacggaaaaggtgaaagtaaccatatctgacaaaattcccttgaatttttatcctttgcttgcaacatttaagactcaaagtcactggtatatggattaagttttttcctgttaatgcaattatagaaatacatcggagacacaacaaatgtggccattacaggtttcataaaattacactgacttggctgttacttgatcttaggaaacagcacagtttaagatattgtgaattctgacttatactttattaaatgctgtaaatctaaatagatcctgttggatgtgatgggtctagtccagtttatttaagttcatgtttcactgtttgcactttgcattgaacaatgggtttattcgctgatgtaaacggttcgagtgaagaattaatgcagtaagtatgacaacacatacacacttgcctctccccatctccagaagaggggagcagagtccgagcttatctaaatatgaatgtggccacaaagctgtggaaggtgacaaagcttaaacacctttggcctggctctgcattgtcacctagagagcacgaggtctatagaaacatcatgtcacatgaaacgattctctgctttttggttctgaacttgaagttcactaaactgcaaaatctaagagttgggtggttattaaaatgcttttaaagtcaactgtggcaccaattctaatgtaatccaacttgtgactnnnnnnnnnnnnnnnnnnnnnnnnnngggggtgtgtgtgtggcactgggaaaagtggaaacaaacatgtattgaaatacatattgg

SEQ ID NO: 64879 - DNA, 720 bp, Homo Sapiens
gggtaaagactagtgtaacacaggatttatggagccaaaaagggacctttgagataatcccagtggaatatgttttacaagtgggaaatcatgcccagaaatggcttgaggttacacagtcaggggcagaagtgggactttacccaccctagccccattcctgggatcccttatagcctactgcttccgcagttacttcccaccctttgagtgctatgagtacaccacctcccaccactgctatactcagccacatgccttccttacagtaaaaccaggggcagatgtgaggtggtgatcatggaagacgctcctgactattatgcagtggaagacattttcagcgagatctcagacattgatgagacaattcatgacatcaagatctctgacttcatggagaccaccgactacttcgagaccactgacaatgagataactgacatcaatgagaacatctgcgacagcgagaatcctgaccacaatgaggtccccaacaacgagaccactgataacaacgagagtgctgatgaccacgaaaccactgacaacaatgagagtgcagatgacaacaacgagaatcctgaagacaataacaagtacactgatgacaacgaagagaaccctaacaacaacgagaacacttacggctacaacttcttcaaaggtggctctggggcagtacatggcaacaaccaggacagtcagcgattaaatggg

SEQ ID NO: 64880 - DNA, 835 bp, Homo Sapiens
gggggcggaggcccgggcaactcttttgaatggaatcgggctgattcatcgccggtttgcagactgagccgcgtcgggtgtgcgccgctgctgctgttgcctctgtcttcgcgtcaccacagaggcaagacaagggtccatatcgcggcatccggctcccgcccgtcttcaggagagaaagaaaaaataaaatatacttggggaagttgtacctgccagaattagcaagagctttctttaagaagacatttgtcaaactcaacaaattgaaggttaacaccttaagagttgtagttactgaccagaaatatggacagacttcttagacttggaggaggtatgcctggactgggccaggggccacctacagatgctcctgcagtggacacagcagaacaagtctatatctcttccctggcactgttaaaaatgttaaaacatggccgtgctggagttccaatggaagttatgggtttgatgcttggagaatttgttgatgattataccgtcagagtgattgatgtgtttgctatgccacagtcaggaacaggtgtcagtgtggaggcagttgatccagtgttccaagctaaaatgttggatatgttgaagcagacaggaaggccggagatggttgttggttggtatcacagtcaccctggctttggttgttggctttctggtgtggatatcaacactcagcagagctttgaagccttgtcggagagagctgtgggcagtgggttgtgggatccccattcagagtgtaaaaaggaaagggttgttaattgatgcccttccgattgatccatggctaattatgatgggtcttagggaa

SEQ ID NO: 64881 - DNA, 1368 bp, Homo Sapiens
  misc_feature (1334)..(1334): n is a, c, g, or t
tggaccggtccggaattcccgggataagatggcggcggcggcggcagcgacagcagcagcagcagccagtattcgggaaaggcagacagtggctttgaagcgtatgttgaatttcaatgtgcctcatattaaaaacagcacaggagaaccagtatggaaggtactcatttatgacagatttggccaagatataatctctcctctgctatctgtgaaggagctaagagacatgggaatcactctgcatctgcttttacactctgatcgagatcctattccagatgttcctgcagtatactttgtaatgccaactgaagaaaatattgacagaatgtgccaggatcttcgaaatcaactatatgaatcatattatttaaattttatttctgctatttcaagaagtaaactggaagatattgcaaatgcagcgttagcagctagtgcagtaacacaagtagccaaggtttttgaccaatatctcaattttattactttggaagatgatatgtttgtattatgtaatcaaaataaggagcttgtttcatatcgtgccattaacaggccagatatcacagacacggaaatggaaactgttatggacactatagttgacagcctcttctgcttttttgttactctgggtgctgttcctataatcagatgttcaagaggaacagcagcagaaatggtagcagtgaaactagacaagaaacttcgagaaaatctaagagatgcaagaaacagtctttttacaggtgatacacttggagctggccaattcagcttccagaggcccttattagtccttgttgacagaaacatagatttggcaactcctttacatcatacttggacatatcaagcattggtgcacgatgtactggatttccatttaaacagggttaatttggaagaatcttcaggagtggaaaactctccagctggtgctagaccaaagagaaaaaaccagaagtcttatgatttaactccggttgataaattttggcaaaaacataaaggacgtccattcccagaagttgcagaatcagttcagcaagaactagaatcttacagagcacaggaagatgaggtcaaacgacttaaaagcattatgggactagaaggggaagatgaaggagccataagtatgctttctgacgataccgctaagctaacatcagctgttagttctttgccagaactccttgagaaaaaaagacttattgatctccataccaatgttgccactgctgttttagaacatataaaggcaagaaaattggatgtatattttgaatatgaagaaaaaataatgagcataactactctggatnatctcattctagatataatatcagacctgatgcc

SEQ ID NO: 64882 - DNA, 955 bp, Homo Sapiens
  misc_feature (225)..(243): n is a, c, g, or t
  misc_feature (743)..(750): n is a, c, g, or t
  misc_feature (753)..(754): n is a, c, g, or t
  misc_feature (761)..(761): n is a, c, g, or t
  misc_feature (819)..(819): n is a, c, g, or t
gggatacagataggggcttgatagctgtggtcccctctcccctctgactacctaaaatcaatacctaaatacagaagccttggtctaacacgggacttttagtttgcgaagggcctagatagggagagaggtaacatgaatctggacagggagggagatactatagaaaggagaacactgcctactttgcaagccagtgacctgccttttgaggggacattggannnnnnnnnnnnnnnnnnnttgggtttgagctacagtcatgaacttttggcgtctactgattcctccaactctccaccccacaaaataacggggaccaatatttttaactttgcctatttgtttttgggtgagtttcccccctccttattctgtcctgagaccacgggcaaagctcttcattttgagagagaagaaaaactgtttggaaccacaccaatgatatttttctttgtaatacttgaaatttatttttttattattttgatagcagatgtgctatttatttatttaatatgtataaggagcctaaacaatagaaagctgtagagattgggtttcattgttaattggtttgggagcctcctatgtgtgacttatgacttctctgtgttctgtgtatttgtctgaattaatgacctgggatataaagctatgctagctttcaaacaggagatgcctttcagaaatttgtatattttgcagttgccagaccaataaaatacctggttgaaataccnnnnnnnnganngggaagnaaacgaaccgcaaaacaacccggcggggggaaaaaaacacacgggacgagaaaaaaanctttggtggccggccccggccccccaaaagctttctaaaaccttcgtttggggccggggcccccgggggaaagggaaacgggggcttagctgtttcccaggaaaacctgggcctgaccagggcttggattcccccc

SEQ ID NO: 64883 - DNA, 944 bp, Homo Sapiens
tcccggggctacccgaaagtagttactcagatcactgttcacagtgctgaggacctggagaagaagtatgccaatgaaactgtaaacccatatttggtcatcaaatgtggaaaggaggaagtccgttctcctgtccagaagaatacagttcatgccatttttgacacccaggccattttctacagaaggaccactgacattcctattatagtacaggtctggaacagccgaaaattctgtgatcagttcttggggcaggttactctggatgctgaccccagcgactgccgtgatctgaagtctctgtacctgcgtaagaagggtggtccaactgccaaagtcaagcaaggccacatcagcttcaaggttatttccagcgatgatctcactgagctctaaatctgcaatcccagagaatcctgacaaagcgtgccacccttttattttccgtcaggtgccaggtcttagttaagattcacaatctttagaaagaatgagattcacaataattaactcttcctctcttctgataaattccccatacctcccaatccaagtagcatctgtagctacataacctatatacctccagcagctggacatggggaggcgacagtcctatctagacatcatacacatttgccaagaaaggatctctggggcttccgggggtgagattcaagcaggacaataacaagaggctggacaccctacagatgtctttgatgttttcagttgtttgatatatctcccctgtagggcatgttgaggaaggaggagggctgatcaaggccaagctggtctagcctgacatcctagctcctgactgaacactatagacttcccagcagcatttcacccagcagccagagccggctttaagtccccaacccttacagacaccactgccaccaccaccaaccacgagcaccctcctctttcga

SEQ ID NO: 64884 - DNA, 1555 bp, Homo Sapiens
ccacgcgtccgaacacagaggacctggaggacgggacgtgcagggtcacctactgccccacagagccaggcaactacatcatcaacatcaagtttgccgaccagcacgtgcctggcagccccttctctgtgaaggtgacaggcgagggccgggtgaaagagagcatcacccgcaggcgtcgggctccttcagtggccaacgttggtagtcattgtgacctcagcctgaaaatccctgaaattagcatccaggatatgacagcccaggtgaccagcccatcgggcaagacccatgaggccgagatcgtggaaggggagaaccacacctactgcatccgctttgttcccgctgagatgggcacacacacagtcagcgtgaagtacaagggccagcacgtgcctgggagccccttccagttcaccgtggggcccctaggggaagggggagcccacaaggtccgagctgggggccctggcctggagagagctgaagctggagtgccagccgaattcagtatctggacccgggaagctggtgctggaggcctggccattgctgtcgagggccccagcaaggctgagatctcttttgaggaccgcaaggacggctcctgtggtgtggcttatgtggtccaggagccaggtgactacgaagtctcagtcaagttcaacgaggaacacattcccgacagccccttcgtggtgcctgtggcttctccgtctggcgacgcccgccgcctcactgtttctagccttcaggagtcagggctaaaggtcaaccagccagcctcttttgcagtcagcctgaacggggccaagggggcgatcgatgccaaggtgcacagcccctcaggagccctggaggagtgctatgtcacagaaattgaccaagataagtatgctgtgcgcttcatccctcgggagaatggcgtttacctgattgacgtcaagttcaacggcacccacatccctggaagccccttcaagatccgagttggggagcctgggcatggaggggacccaggcttggtgtctgcttacggagcaggtctggaaggcggtgtcacagggaacccagctgagttcgtcgtgaacacgagcaatgcgggagctggtgccctgtcggtgaccattgacggcccctccaaggtgaagatggattgccaggagtgccctgagggctaccgcgtcacctatacccccatggcacctggcagctacctcatctccatcaagtacggcggcccctaccacattgggggcagccccttcaaggccaaagtcacaggcccccgtctcgtcagcaaccacagcctccacgagacatcatcagtgtttgtagactctctgaccaaggccacctgtgccccacagcatggggccccgggtcctgggcctgctgacgccagcaaggtggtggccaagggcctggggctgagcaaggcctacgtaggccagaagagcagcttcacagtagactgcagcaaagcagcaacaacatgctgctggtggggtcatgcccaagaccccgcgaggagagaacagcaggaccagta

SEQ ID NO: 64885 - DNA, 608 bp, Homo Sapiens
ttccggtttgtgcatcctgagatccactacaagtggggaaatggcacccgagagtgaccgcaacttcttcctgcgtctgtgctccgaggtgcccattcttgaggtcaacgctgatgcgcatcccttggtcatcgggcatgtcccgggagcttcccgctcgggcctgcgagacgccatggagcttgttgaccacctggtgaagcgggcggctgccgtgcaggcggatgatgtggaggtgctgaaggtggggaggacccagctgatcgacgccgttctgaatctgtgcacctaccatcaccctgaaaacatccagctcccaccggggtaccagcctccgaacctcgccatctctaccctctactggaaggcctggcccctcctgctggtcgtcgccgcattcaacccagagaacatcggcctggctgcgtgggaggagtacccgaccctgaagatgctcatggagatggtgatgaccaacaactactcctacccatccgtgcatcctgacggatgaggagacccggacggagatgctgaaccgtgagctgcagaccgcccagcgggagaagcaggagatcctggccttcgaggggcacctggcggccgct

SEQ ID NO: 64886 - DNA, 817 bp, Homo Sapiens
ttcaaattaacaaactgtaattgttttcccaaagatacatttttttcatacacatccatcatacactgtaaccaaaaaaagcagtgtacatgaaataagagaaaataaattaaaaatccatagcataggtaaggaggctctagtctggagcacagctgagtttccagcaatataaggaggctcgaaagtttcttttataagaatgcctgctagcaagggttccagcaaggtggttggttggtctgtaagtcagtcttgagtacttgaaacagttctgtgtttgttttttttccttagcgtttagaatagccatcattgtcctgcaataggcagagctatcacgtccaggaaaaatgagggagggaaccacagaggcagcgtgagatccaaatacagcattcaaaggtaattggtccagtggtgcctggggagggaggaagggtgatactccagggttagccgtcttcttttgggggtgtgtaccagccgtttttttcgtggatctgcaccaaggacttgtaggactgctgtgctcttgtcagactgtattgagatttgttggctccaaactgcactcgtgctttccccttcaccagtgtggcactgatctgcatgatcactgactctatggagtaggcactgctccagccctgtttggtgagaagttccatgcagatggcccctccgcccagaacataccctccagagaggactggagacacaaccctgacaaatggtgggtcaaagggaaagttatctttaaaggaaaagttaagtagaatgaagtcggctcccccacgcgtccgcggacgcgtgg

SEQ ID NO: 64887 - DNA, 1000 bp, Homo Sapiens
tgcggcgttctagatggatcccgtgcatgcacaaaggatgcctcttaacagttgtttattctgtctaccaggaaaaggcatatggcccctccctgtgtaggccctctagttctgagagatttgggaaacttcacaggttcaggaatgttcacagcatccccaggatgtgggcttgtggtgggtggcaaatactgaaatagttctctagatcaaggacctgagtgagcagagatgacattaccagctgaacctcccaaagagaatcatgagcagaggcagaaacagcacaggggaccccagctcctgctcacgttcctacccagcagccttcagagccagtgctgcagtgaatacaggctgtctctgagcccgtctgtatacttcatctcacttcatattttattctgtgatcagataccaccttagaaactattatttacccccttctagataattctgttctgcaggaaaaataatgtggctcccacaagagatttctgagcagtccaagcctgcatagcatggtgtgtggcagcgatagaggcagatcaggtgtctccttctgaaatgctgacctgggtgagggacgaggttctcctggagcaatcctctgaacaaggacctgctccagggagaggccaggcttcctctgcacagaggttggagatgggcattgcactggacgctcgtcatttttttcatagttgggatgggtaggatttggtgggtgattaatccacagtgatggtagggctggtgctgtagacaggctgtgaagttgaaccctcagtcctgcacgtccagctagccgacctagaggattttcctcacctgtttactaataatgccctgtgtttggtgaggggttggcttaacaattttgtaacctgacagggacttggcccctctgggcaggctctcacttcgctggccccacagctgtggctgaggggtgcccgtagaagagagttccagcatcctttgtgcagccgggatccct

SEQ ID NO: 64888 - DNA, 1086 bp, Homo Sapiens
  misc_feature (161)..(179): n is a, c, g, or t
  misc_feature (795)..(826): n is a, c, g, or t
ccccggcggctcaggcggagcggccgtggcgctgtttttctgagtccggggtggcctggcagccggccgaggacgagggtcggcgggggctgcccccgtggtggtggccgccatgctgggagcctgggcggttgagggaaccgctgtggcgctcctgcgannnnnnnnnnnnnnnnnnncgccggcgatccggggacccgggctcggcgtggccggcgtggccggcgcggcgggggccgggctgcccgagagcgtcatttgggcggtcaacgcgggtggagaggcgcatgtggacgtgcacgggatccacttccgcaaggaccctttggaaggccgggtgggccgagcctcagactatggcatgaaactgccaatcctgcgttccaaccctgaggaccagatcctgtatcaaactgagcggtacaatgaggagacctttggctacgaagtgcccatcaaagaggagggggactacgtgctggtcttgaaatttgcagaggtctactttgcacagtcccagcaaaaggtatttgatgtacgattgaatggccacgtcgtggtgaaggacttggatatctttgatcgtgttgggcatagcacagctcacgatgaaattatacctatgagcatcagaaaggggaagctgagtgtccagggggaggtgtccaccttcacagggaaactctacattgagtttgtcaaggggtactatgacaatcccaaggtctgtgcactctacatcatggctgggacagtggatgatgtaccaaagcttcagcctcatccgggattggnnnnnnnnnnnnnnnnnnnnnnnnnnnnnnnntatgatgaagggtctaatctcaaaaaacagaccaataagaaccgggtgcagtcaggcccccgcacacccaacccctatgcctcggacaacagcagcctcatgtttcccatcctggtggcttcggagtcttcattccaaccctcttctgcctctgccggttgtgagaacaaatgactatcctgaacagggtggaggggtgtgggaaagaaaccagccatattggttttggtttctgtatttttcacaatgattaatgaaca

SEQ ID NO: 64889 - DNA, 335 bp, Homo Sapiens
tagaggttccccatcaaccctaaatttattatgctgttgaatatgatacttttgaggagagagtgtgctcagaacttagacgggatttggtaggccaagtatgctaagtgtacaatatattttttaattttacacctgaaacaaagaaatgtggtcactaaaaataaaagtatatatgtaggaattaatgtactcttgctttgtcagctgtttgctatagtttccaaggtattatgttactctaactctgaaaagtgatgtaatctggtagcatgtagtagttcaaataaaggcatttacataataaatttagggttgatggggatcctctgagc

SEQ ID NO: 64890 - DNA, 394 bp, Homo Sapiens
cctagttttagaagtttcaatagcactgtgatggacacacagccagcacctgcctttacacacaatggcccaaaagggaggtggcaaagtaaccaggcatttgcaacacagtgcaatcactgcaggcccctctctacaagccccatacccaaagggaccctggattccctattagagtaaaagccacattgccagcatgagaggaaggaaatggctttctttagctctagaagagtgagacttgcacagtgccccgaagaaagatgataaaacacaatgcccttccagcacccagggtagaccctcctcaggtggtgtcaaccctttgactttcacatgttttcatcttaggctatggagcatgatttctgctattgaaacttctaaaactagg

SEQ ID NO: 64891 - DNA, 1528 bp, Homo Sapiens
gtcggcggcgccggcactgcagctggggctgagaagccatgacggccgagaactgacagacggagtgacagacggactgaccatggtccgaccagccaaaacccatcagtcccgctcaatgaacctgctggccggcggctttggcggcgtgtgcctggtgttcgtcggtcaccctctggacacggtcaaggtccgactgcagacacagccaccgagtttgcctggacaacctcccatgtactctgggacctttgactgtttccggaagactctttattagagagggcatcacggtggctatatcggggaatggctgcccctatcatcggggtcactcccatgtttgccgtgtgcttctttgggtttggtttggggaagaaactacaacagaaacacccagaagatgtgctcagctatccccagctttttgcagctgggatgttatctggcgtattcaccacaggaatcatgactcctggagaacggatcgcagtgcttattacagattcaggcttcttcaaggagaaagcaagtacacctggtaccttggactgtgcaaagaagcttgtaccaggagtttgggatccgaggcatctacaatgggactgtgcttacccttatgcgagatgtcccagactagtggaatgtatttcatgacatatgaatggctgacaaatactcttcactccggaggaaagagggtcagtgagctcagtgcccctcggatcttggtggctgggggcattgcagggatcttcaactgggctgtggcaatccccccagatgtgctcaagtctcgattccagactgcacctcctgggaaatatcctaatggtttcagagatgtgctgagggagctgatccgggatgaaggagtcacatccttgtacaaagggttcaatgcagtgatgatccgagccttcccagccaatgcggcctgtttccttggctttgaagttgccatgaagttccttaattgggccacccccaacttgtgaggctgaaggctgctcaagttcacttctggatgctggaagctgtcgttgaggagaaggagtagtaagcagaactaagcagtcttggagggcaaggggaggggaatggtgagatccgagccctgtgcatggacttggtgagactgttgccttaatgacatcctgcaccgtgtattacttagtggggcctttttggaacttggaattcatttcttatccattttaaagggaatctttacaaggattttggaaaatggaaacaagtaaccttccagtaccagaaaactaccctgtgggaaagaaaatgctgccttaccaggttaacctggcgggtccctaccacgaagttcagaggaattccctcagttagaaggaagtaattttcgaggtttcccccctggaaaggcactgtgggcccttattcttccaaacccataaatatccgcgcgaaagatcgagcgatcgcttgcattccgagtcacactagccgcacagagagaaacgcccaattactcacattgcacacgggccgc

SEQ ID NO: 64892 - DNA, 312 bp, Homo Sapiens
atgcgcgacgcttccatcaaacctttgccaactcaggttcacagcagctttgggcagttatggcagtatggcattagctgagaggtgtctgccacttctgggtcaatggaataataaattaagtacaggcaggaatttggttgggagcatcttgtatgatctccgtatgatgtgatattgatggagatagtggtcctcattcttgggggttgccattcccacattcccccttcaacaaacagcgtaacaggtcccttccagatctaggtacgttttattgatgaactcgcgcaaggatcgtctagacgaccc

SEQ ID NO: 64893 - DNA, 1052 bp, Homo Sapiens
  misc_feature (154)..(221): n is a, c, g, or t
ctctggcgtgatggcccattaaacgatagagtcaagaggtctctaatgcaaaaggccattgagtctcactcacctccttgcttgcttcattctcctcagctacactggctttgagggccagtttttacattgggacctggtagcccacaccacnnnnnnnnnnnnnnnnnnnnnnnnnnnnnnnnnnnnnnnnnnnnnnnnnnnnnnnnnnnnnnnnnnnnacgagccaccatgcccggcctaatctttgtatttttagtagagacagggtttcaccatgttgtccaggctggtactttgagccttcacaggctgtgggccatggctgtggttatgtgatggttgggaggctgtgtggtgtttgggggtgtgtggtctcccataccctctcagcgtacccttgtccccaggaagcatacgtgatggctggtgtgggctccccatatgtctcccgccttctgggcatctgcctgacatccacggtgcagctggtgacacagcttatgccctatggctgcctcttagaccatgtccgggaaaaccgcggacgcctgggctcccaggacctgctgaactggtgtatgcagattgccaaggggatgagctacctggaggatgtgcggctcgtacacagggacttggccgctcggaacgtgctggtcaagagtcccaaccatgtcaaaattacagacttcgggctggctcggctgctggacattgacgagacagagtaccatgcagatgggggcaaggtgcccatcaagtggatggcgctggagtccattctccgccggcggttcacccaccagagtgatgtgtggagttatggtgtgactgtgtgggagctgatgacttttggggccaaaccttacgatgggatcccagcccgggagatccctgacctgctggaaaagggggagcggctgccccagccccccatctgcaccattgatgtctacatgatcatggtcaaatgttggatgattgactctgaatgtcggcgagattccgggagttggtgtctgattctcccacatggcaggagccggcga

SEQ ID NO: 64894 - DNA, 763 bp, Homo Sapiens
  misc_feature (71)..(86): n is a, c, g, or t
  misc_feature (692)..(717): n is a, c, g, or t
ggggtgttctgtttatttaataagtgggcaggttgcaagcgttgcacagaaattctgagattttactgccnnnnnnnnnnnnnnnnaagaaagttgtttgttggactccataagtgaatttcaagcagtgaggattttgtggtgcctgagatggccgagggcacagggagtgagctgtatgtgtgaggaatttggtgagcgagataaaagtccacggtgtcaacccctaaaacatgggtgaccgtacatttttatacatctccactctacggccttttacaggctttccgattttacaggcctttccaagtttccattctccttagagagagaactgtgcttccaaacagaaatcaggagtgaccacaaagcctgaaaacactttgccacccagcaaagaactggcacaattggtttgggtctgcattgccatagtgcccgagttaaaactgcaggccactctgccttgcagtggcctctgatttcattgtgggtgcttccacaggggggcccgagctgttctttcagctgctccaaagattgagacccaagtcatcatgaaaaaggccccagtacagtcttaatgcgaaaattccactaactaaaacgtcgagtgccaagaacacccttccagccgaggtttggaaacaagcctcccgtttcccgtgactccggggaaaaggtgcttgggnnnnnnnnnnnnnnnnnnnnnnnnnnattacttttggcccaaaccgaaacctttcttcccccccggcataca

SEQ ID NO: 64895 - DNA, 880 bp, Homo Sapiens
gtaccctgccaccagtgctcacaccctcttggccagtgcctggctatggcccgactgctcaggtctgcaacctgggagctgttcccctggaggggctactgctcccagaaggcaaagggagagctctgcagggacttcgtagaggctctgaaggccgtggtgggcggctcccacgtgtccactgccgcggtggtccgagagcagcacgggcgcgatgagtcggtgcacaggtgcgaacctcctgatgctgtggtgtggccccagaacgtggagcaggtcagccggctggcagccctgtgctatcgccaaggtgtgcccatcatcccattcggcaccggcaccgggcttgagggtggcgtctgtgctgtgcagggcggcgtctgcgttaacctgacgcatatggaccgaatcctggagctgaaccaggaggacttctctgtggtggtggagccaggtgtcacccgcaaagccctcaacgcccacctgcgggacagcggcctctggtttcccgtggacccaggcgcggacgcctctctctgtggcatggcggccaccggggcgtcggggaccaacgcggtccgctacggcaccatgcgggacaacgtgctcaacctggaggtggtgctgcccgacgggtcggttgctgcacacggcgggccgaggccggcatttccgcttccggcttctggccagaaatccctcatcacacaggcctggtactcaccttgtgtgtccctgggacgtaggaagagtgccgccggctacaacctcacggggctcttcgtgggctccgaggggacgctgggcctcatcacagcaccaccctggcctgcccctgccctgaggccccagtggccgccacgtgtgcgttcccagtgtc

SEQ ID NO: 64896 - DNA, 888 bp, Homo Sapiens
  misc_feature (875)..(875): n is a, c, g, or t
gctggtaccggtccggaattcctgggatagcccttgagcgcgaggcgcggagcccccggagcccccaaaccgcagacacatccccgcgccccagagccccggcctgcgcgcccagccgggcccgcgcgatgccctcagaccggcctttcaagcagcggcggagcttcgccgaccgctgtaaggaggtacagcagatccgcgaccagcaccccagcaaaatcccggtgatcatcgagcgctacaagggtgagaagcagctgcccgtcctggacaagaccaagtttttggtcccggaccatgtcaacatgagcgagttggtcaagatcatccggcgccgcctgcagctgaaccccacgcaggccttcttcctgctggtgaaccagcacagcatggtgagtgtgtccacgcccatcgcggacatctacgagcaggagaaagacgaggacggcttcctctatatggtctacgcctcccaggaaaccttcggcttctgagccagcagtaggggggctcggcctgggagtcggggggccccggtcaggccctgcccagagagctcctggttcctgaactgagctgcctctaccgtggtgggctgggcaggcatgtgcccccctagtcagagggcaccaacccacctactctgcccctgggtggatcctgggccggtcgtgttagggttgtccctctgggtgctggactggtgggatgggttgagggtggggagcagctcccagcactcctgctgtgtggttcatcttttttttaggcacctgcccatctgcccctcacccacccgaggctcatgcccacacgccatggaccatgcccacctctgaaagactggcgcctggctccccgcccctatatctcanggggtgtatggat

SEQ ID NO: 64897 - DNA, 441 bp, Homo Sapiens
tagttgactctagaggataaactgattattcgcaattcctttagtgttcctttctatgcggcccagccggccatggcccaggtgaagctgcagcagtaaggaactgaagtggtaaagcctggggcttcagtgaagttgtcctgcaaggcttctggctacatcttcacaagttatgatatagactgggtgaggcagacgcctgaacagggacttgagtggattggatggatttttcctggagaggggagtactgaatacaatgagaagttcaagggcagggccacactgagtgtagacaagtcctccagcacagcctatatggagctcactaggctgacatctgaggactctgctgtctatttctgtgctagaggggactactataggcgctactttgacttgtggggccaagggaccacgggtcacggtctcctcatgtga

SEQ ID NO: 64898 - DNA, 693 bp, Homo Sapiens
gaaacggcaagccagctaagcagccccagcctagctcgggcgcagcagagcccatgccactcaccagccgcgccccgaggggcagactccgcaagatattcccctggatgaggaagcttcacatcagccatgatatgaccgggccggacgggaaaagggcccggaccgcgtatacccgctaccagaccctggagctggaaaaggagttccacttcaaccgctacctgacccggcgacggcgcatcgagatcgcccacgcactctgcctgtccgagcgccagatcaagatctggttccagaaccggcgcatgaagtggaagaaggacaacaaattgaaaagtatgagcctggctacagctggcagcgccttccagccctgagcccgcccagaggagcccagcggcccaagagcccgtgccacccccagccctggcccctccaatcctccccgctctgccgcccgccggctggggaccggttcccacaagcctgcctcgccttgtgttacgatatttcgtttgatcttaggtcttcctgtggctccctctctcctggactggttatcttgttattattgttaataataataattattattattttccttccatgctcccaactcccttctgcttgtcccaaatccgccagtgtttctgaatgtttgtgtctgtggttgcagtctttcccccagga

SEQ ID NO: 64899 - DNA, 1195 bp, Homo Sapiens
  misc_feature (1159)..(1159): n is a, c, g, or t
  misc_feature (1161)..(1162): n is a, c, g, or t
tcccgctgcgcggcaagtttggaaagggtgggccatgcagcagcggaagacccagtccagatccaggactgagatcccagaaccatgagcctggccatcagcatcgctctcctgctaacagtcttgcaggtctcccgagggcagaaggtgaccagcctaacggcctgcctagtggaccagagccttcgtctggactgccgccatgagaataccagcagttcacccatccagtacgagttcagcctgacccgtgagacaaagaagcacgtgctctttggcactgtgggggtgcctgagcacacataccgctcccgaaccaacttcaccagcaaatacaacatgaaggtcctctacttatccgccttcactagcaaggacgagggcacctacacgtgtgcactccaccactctggccattccccacccatctcctcccagaacgtcacagtgctcagagacaaactggtcaagtgtgagggcatcagcctgctggctcagaacacctcgtggctgctgctgctcctgctctccctctccctcctccaggccacggatttcatgtccctgtgactggtggggcccatggaggagacaggaagcctcaagttccagtgcagagatcctacttctctgagtcagctgaccccctccccgcaatccctcaaaccttgaggagaagtggggaccccacccctcatcaggagttccagtgctgcatgcgattatctacccacgtccacgcggccacctcaccctctccgcacacctctggctgtctttttgtactttttgttccagagctgcttctgtctggtttatttaggttttatccttccttttctttgagagttcgtgaagagggaagccaggattggggacctgatggagagtgagagcatgtgaggggtagtgggatggtggggtaccagccactggaggggtcatccttgcccatcgggaccagaaacctgggagagacttggatgaggagtggttgggctgtgcctgggcctagcacggacatggtctgtcctgacagcactcctcggcaggcatggctggtgcctgaagaccccagatgtgagggcaccaccaagaatttgtggcctaccttgtgagggagagaactgagcatctccagcattctcagccacaaccngnngtgccatcatcttaaacctctagtttaccatgt

SEQ ID NO: 64900 - DNA, 458 bp, Homo Sapiens
tgctttttaaatttatttttaactgtttctcatatgtagcaacccctcctcccctcctgggcatgtttacacaggctctgctctgggggctggcctggctgtgaggtttctggggaggcagagaggcagggactttggggccttagtcaccatccatggtatcacctcatctcacttcctgtgagggacagggcctggctgatgtgatcccagctccccccagttcaggactgtctttcagctcctttgcccctggaggtgggggctgctggctgaggaggggtcaaggtgagttcaagaaagctagctgtggaaaatggaccaggttgggggggtgattgcaaagtctccccaaagcctggctcctcatgctcagtgccaggggcagaacactggggagccaggtatagagagccttcctgtcataactgccagtcctcttcctccaaggcctctgc

SEQ ID NO: 64901 - DNA, 1059 bp, Homo Sapiens
  misc_feature (991)..(999): n is a, c, g, or t
agctggagatcaaggcctactatgcaggccacgtgctgggggcagccatgttccagattaagagtgggctcagagtctgtggtctacacgagctgtctggattgacaagtgccgccccaacctgctcatcacagagtccacgtacgccacgaccatccgtgactccaagcgctgccgggagcgagacttcctgaagaaagtccacgagaccgtggagcgtggtgggaaggtgctgatacctgtgttcgcgctgggccgcgcccaggagctctgcatcctcctggagaccttctgggagcgcatgaacctgaaggtgcccatctacttctccacggggctgaccgagaaggccaaccactactacaagctgttcatcccctggaccaaccagaagatccgcaagactttcgtgcagaggaacatgtttgagttcaagcacatcaaggccttcgaccgggcttttgctgacaacccaggaccgatggttgtgtttgccacgccaggaatgctgcacgctgggcagtccctgcagatcttccggaaatgggccggaaaccgaaaagaacatggtcatcatgcccggctactgcgtgcagggcaccgtcggccacaagatcctcagcgggcagcggaagctcgagatggaggggcggcaggtgctggaggtcaagatgcggtggagtacatgtcattcagcgcacacgcggacgccagggcatcatgcagctggtgggccaggcagagccggagagcgtgctgctggtgcatggcgaggccagaagatggagtcctgaagcagaagatcgagccggagctccgggtcactgtactgcggccatggcgagacggtgacgctgcccagcccgctcccgtagctctcgttgggtgtgacgggtggccggtggtctgggcgagctcgtctggcggcctgttttggcgtccgggggttccagggccgagtgttgggggcctgggtccgccggctctaacnnnnnnnnntgttcccatgctgtcccgggtggcccccccacggaagggttatccctccctggcgactga

SEQ ID NO: 64902 - DNA, 665 bp, Homo Sapiens
agaggaccccaccattctgaagccaacaccagtggtgcatgaaacagaaccagaatcagggtctcaacctcggccggctgtattatctggctatttcaaacagtttcagaagtctttacctccacgattccagcggcagcaggaacagatgaaacagcagcagtggcagcagcagcaacagcaaggtgtacttcctcagactgttccttcacaaccgtccagtagtactgtccctcctccaccacacagacctctttatcagcctatgcagcctcatcctcagcatttggcttctatgggttttgatccaaggtggctcatgatgcagtcctacatggatcctcgaatgatgtcaggaagacctgctatggatattccacccattcatcctggaatgattcctcctaaaccattaatgagaagagaccagatggaagggtcaccgaacagttctgagtcatttgagcatatagctcgatctgcaagagatcacgcaatttccctttctgagcctcgtatgctgtgggggtcagatccctatcctcatgctgagcctcaacaagcaactactcccaaagcaacagaagagcctgaggatgtaaggtctgaagctgcgttggaccgggacagattactgctgctactgctgtactgggggatcctct

SEQ ID NO: 64903 - DNA, 1072 bp, Homo Sapiens
gggagacagttttgaagttttcaaagactggctctgctgttaagaagttgtacttaaagcggaggagctaagccacctgccaaaatgtgcaaaggacttgcagctttgccccactcatgcctggaaagggccaaggagattaagatcaagttgggaattctcctccagaagccagactcagttggtgaccttgtcattccgtacaatgagaagccagagaaaccagccaagacccagaaaacctcgctggacgaggccctgcagtggcgtgattccctggacaaactcctgcagaacaactatggacttgccagtttcaaaagtttcctgaagtctgaattcagtgaggaaaaccttgagttctggattgcctgtgaggattacaagaagatcaagtcccctgccaagatggctgagaaggcaaagcaaatttatgaagaattcattcaaacggaggctcctaaagaggtgaatattgaccacttcactaaggacatcacaatgaagaacctggtggaaccttccctgagcagctttgacatggcccagaaaagaatccatgccctgatggaaaaggattctctgcctcgctttgtgcgctctgagttttatcaggagttaatcaagtagtaatttagccaggctatgaaatcatcctgtgagttatttcctccataataaccctgcatttcccattaatctacatatcttcccacagcagctttgctcagtgatacccacatgggaaaaatcccaaggggatgttggcttactctttttgcccacactgctttggatacttatctactgtccgaaggccttctttccccactcaattcttcctgccctgttattaattaaggatatcttcaggcttgtagtcagacccaatccagaatcacagaaaaatcctgcctagggcaaagaaatataagacaagactatgatatcaatgaatgtgggttaagtaatagatttccagctaaattggtctaaaaaagaatattaagtgtgggcattcgcgtgtgagatcacaatggagaagttgttgcgtatgtcgctcgcgtgtgca

SEQ ID NO: 64904 - DNA, 776 bp, Homo Sapiens
gtgggccaaatgtcagtttttaccccgttttttgacatcagttatattccatctactgtctttttcttcaatgggcagcatatgaaagtgggttttggatctccagatcacactaagtttttgggaagcttcaaaaccaaacaagacttcatagatttgattgaagtaatctatcgaggagcaatgagggggaagcttattgtccaaagtcctattgatcccaagaatattcccaaatatgaccttctctatcaagacatttagtacattaattgctgtcaaagatgaagaagaaggcacatcttgacacagtacctgaatccagctgtgctgtgtttctggagtcctttggaaacatgtgtcccagaggagaagaggtttgacttgcgtgtagaaaacccggcccctgaggaaaagaccccactggttctctgatgacctgggatgcctaactgtctactccctgcaagcctcagagcagccaagtcattggtgttcattttccccacagtgatttttgtaacttctctttctaatgtttttctttatccctttaatacagaaccctcccaaacattggctagtacaacttgatttcatcatgttcatttgatacacaagtgaactggaaagtcacttcccatagtagcaccacgcgcttattttctacccaagctgggtgcatgtgtgtgcgctctttcacactcaggaaacagctctgcccactatgccggtctcgacttaccttggtttatcctctagagtcagctagaaga

SEQ ID NO: 64905 - DNA, 1149 bp, Homo Sapiens
tggtctcgcgtcggaattccgggatatcgtcgaccacgcgtcgcggaagcgagaccgtccatccagaggaaggcaagttttaaggctcgggcggctgagaagaccgcgcggggctggagacaggtagcagtacgggggcggggcttcatgccggatgtgatagtctgcagtcgtttcggttggcagcctggcgggtgggagatgcggcgtgcacctgctgcaaagaaccgaagggaaggttagaagtacgaaggcagtttggagctggggctaagcagctgtcgcacggtcagatcatgggctccaccaagcactggggcgaatggctcctgaacttgaaggtggctccagccggcgtctttggtgtggcctttctagccagagtcgccctggttttctatggcagtcttccaggacctggaccctgcacgatgaggtatacggacatcgactaccaggtcttcaccgacgccgcgcgcttcgtcacggaggggcgctcgccttacctgagagccacgtaccgtatacaccccgactgctgggttggctcctcactcccaacatctacctcagcgagctctttggcaaagtttctcttcatcagctgcgacctcctcaccgacttatccatcttataccgcctgctgctgctgaaggggctggggcgccgccaggcattgtggctactgtgtcttttggcttcttaacccccatgcctatggcagtatccagccgcggtaatgcggactctattgtcgcctccctggtcctgatggtcctctacttgataaagacaagactcgtcgcgtgtgcgctgtatactatggtttcgcggtgcatatgacgatatttccagttgacttaccatccttcgcataaccctccacctgcttcccagagtcggcggactaattgaacaagaagcccttcccggccaaattccgggtacccaatttctcagggccttggtttgggtacgagcctccctgacaaagggctggtgtaatccgtggcctgtgcagtatgtggtatgagaagcaacttggcggggagactccacacgttatattgggccctgaacattgtggttataaccaatgaagatacggttgggaaatattttggaagaccacactaccttttgtcaac

SEQ ID NO: 64906 - DNA, 1622 bp, Homo Sapiens
  misc_feature (1208)..(1210): n is a, c, g, or t
atttccgggattttgcgggaagaggaggcgctgtacctgcagtgctgcttttcttgcctagactctaggaactatccgagctccactccccacaacatactcaaaggaacggagagaaccgggacccccctgcggggacccggaactgatctgacaggatggcatctgatgactttgacatagtgattgaggccatgctggaagctccctataaaaaagaagaggatgagcaacaaaggaaagaagttaaaaaggattatcctagcaataccaccagcagcaccagcaacagtggcaatgagaccagtggaagcagcaccatcggggagacaagcaatcgtagtcgagatcgggatcggtatagacggagaaatagtcggagccgaagtccaggtcggcagtgtcgtcaccgtagccgtagctgggatcgtcgacatggtagtgagtcgcgaagtcgggaccatcgtcgtgaggatcgtgtgcattacaggagtcctccacttgccactggggagccagttgataatctgagtcctgaggagcgtgatgcccgcacagttttctgtatgcagttagctgcccgaattcggcctcgagatctggaggactttttctctgctgtaggcaaggttcgcgatgtacgtatcatttcagatcggaactcacgtcgttctaagggcattgcctacgtggaattctgtgaaatccagtctgtgccactggccattgggctgactgggcagcggttgctgggagtgcctatcattgtacaggcttcacaggcagagaaaaaccgactggcagccatggccaacaacctgcaaaagggcaatggtggaccaatgcgcctctatgtgggttccctgcacttcaatatcactgaagacatgctccggggcatctttgagccctttggtaaaattgataatattgtcctgatgaaggactcagatacaggccgctctaaaggttatggtttcatcacgttctctgattctgaagtgtgcccggcgggccctggaacagttgaatgggtttgagcttgctggtcgacctatgagggttggccatgtgactgagcgactggatggtggcacagacatcacttttcctgatggggaccaggagctggatctgggatcagcaggtggacgttttcagctcatggcaaaactggcagaaggcgctggaatccaactgccaagcannnctgctgctgctgctgccgcccgccgccgcccaggctgctgccttgcaactgaatggagcagttccccttggggggccctgaaatccagcagctctgactgctctgagtccagccctgaacccttgcctcccagtggtttgcagctctccagccctctttacccccccagacgatggtaaatccaggggcacaggaatacctgcctcccttgtggcctctgggatcctgccaccttcacatctacctctttcaagggccccattttctcccattttgggggaaccaagccatccctgaagggcatggaacattgtcctcctgaggaaaattgggggcccccccttaaaaatccccagaaaacgcttcctgccccatggtccccaccgggaaaaaggaattccggctgagccaa

SEQ ID NO: 64907 - DNA, 422 bp, Homo Sapiens
agctgctactcagagtagtttcttgtcctcctaaagtttagagtggaaatactttgcaaaagaggtccccaaccctaagtttgagggctaagctcctgggcttagtaggcatatacaaatgcccccaggtgggtgacatcaagatgttttggtcctaggtttgctgagagcctctcctgggaatgttgtaggtactgcctttcccttttaggaaacaccatattcctcctaccactaacccccatccttgccctaaccagcaatttgtaacatcctgggcctcagggacgtgggtggagggtgactttgagctccagatagtgtctaggaggctcaaattagcctgctttttggtcctcaccctagccgtgggccaccctactttgcactccagcctgggcgacagagcaagactccgtctc

SEQ ID NO: 64908 - DNA, 2095 bp, Homo Sapiens
  misc_feature (1605)..(1605): n is a, c, g, or t
  misc_feature (1741)..(1741): n is a, c, g, or t
  misc_feature (1969)..(1969): n is a, c, g, or t
tgcgcgcatcttccgtcccatcagtaacactggcaatcttcctgttaaccactctccttagggatggtatctgatacaacaatggtcaccctcttgagattcgttttaagtgtaattccataatgagcagaggtgtacgcgaaattgtgttatgactgatagccttcagctacaaaaagataggactgacctggtttaaagtgttctattttgtaaatcattccatttgagtctttctgatgaacttggctatactgaaatctgttattttagtgaggctccaaaatgagcaaagctaggcctgattagagtagagtgactattaaaaaacataactttctaggagctataaatcaaagttttaaaaagatgtttggatatatttgagtattccgatcatgaaaacagaaattgccctgcctactacaaggacagactgatgggaaattatgcacctggtcaacttagcttttaagcagacgatgctgtaaaaactaacggcttctctgatatttattgtaagttttagtactgatctccttttccagtgctgcacactcctggtttggaactttaatagcattgcaacgaaatcctatatccagtttcctgtaatttaattgaagaaaaatacatccaaataaagactttattattaacagaccagatagcatcagaaatcatgtgactgttatgattatcagaatatgtcttaactttttagggcaaagttaacactgaaagttctagcttaagtgttgaaacttttgtgggaaaaaaaaatcacttttgaaactcagacttcagtgtatacccaataatttaaaattatgtgaaatgttttaaatttgtgaactcgtaattactgttttaatgattcagtttcttcagagtggtaattgtataaaattgctattgcagctttatattcaatatgatgtgcctgtaaaccaaggagttttccccgtttgtaaaaagacattgtagataattgaatgtttgattttagaaaggtcattagtttcttgttacacattttgttagtctggtttttgttgcttatcgggtttaatattgttcttgaaaatagttgatgctatgttatgtataacttttctaataaaagttgtgttataagctgtaccaccgacaaccaccttctaaatcaagaacaacgcgcccacgctccccacgaccccctcacgcatcaccccgtcgcccccttcacctcacatttcctccctctcataccctccccttaccgctccccccctgccatccgtctcactctctaccgcatcacaccaacataaccttacccaacctacccacccatcctccccagcctcacgccccccgccccgaccacccctctggtccactcaaaatgaactccgaccagcgaacacgttcccacaccgcgccctcgcacctcttcgtccccgctaagcccgttgcacgccaccgactgatgctaataccataacgccactcgtcgattctcatcctacacgccgcctcctaaccgtagcgcgaacgaactcgaagtgtaatgaggcgcgttcgatcgctaccacaatccccacactcgtacacgcttaactncccgttacccgccaactacatagcaaccgcacgctcaccagcatattccgatgctacgcccctcgtacggcattaacgcatacacgtctatagtcgctgatcgttcatgtagatagataccgtcgccggcccacgncgtcgctctgcacgtggcaaaacatgacgaccgggacatcccaactccactctacctgcacgcgccgaatcagtgctaatcgcgcttcgtacttgatagtcatcacaccctgtagcacatgagcccgttactgtttaccgacatacaatcgcccgcgacaagcgatgcgaacgactcccgtaatagtacatcaaccgcgctcaaggtactgattggaacatttgtaangacttctataacgccggacgtcctacctcacacaccaccgttattaccacaactccacgcttcttattacgccataatcacacaattcgctgttacaccacatcggtttatcacgcctacacgtcg

SEQ ID NO: 64909 - DNA, 539 bp, Homo Sapiens
tccctctgccgcccccagggcttcttcatgtcagatgcacccaagtccttagcccagctgtgcgacctgcaggacttcgctcttgcgtttcttcccctccccaagaagggagggggctacttcaggccattctgtgtgttgcctggcaggataccttgtccaaccagctacccacctcaactcccctgtagtttaggacacaaaacagctaccagcggtacagagcggtgatcaaagccgagtacttacaactctggtaagcctatgcttctccgcgctcagcccttctgcttactggaagggctatcactgggggtgaacttgaaactcatcatcagtcttctgcaaaagctcttcttcctgaagacagacccagcctcttgtgctctcaccctccactctggtaaagctgcgcctctgggggaatgaggggctgcaggaatctctggagagcctggtgcttcacgatgctgctctggtgattcttgtacctaatctggtgtgctcaccaatgagtgaaagggatcgcagattccgcc

SEQ ID NO: 64910 - DNA, 741 bp, Homo Sapiens
gggagagctggcgctctagcccacggagttggttaactcctctcaccggcccctggaaagggttccaagtcctttagtacccgacgctgtctgggaattccgggcgtttcggctccttggtcgcagaggcaggaggcacccgaccgcatgtctgtcatggacctcgccaatacttgctccagctttcagtcggacctggatttctgttcagattgcggctcggtcctgcctctgcccggggctcaggatacggtcacctgtattcgctgtggcttcaacatcaacgttcgggactttgaggggaaggttgtgaagacttcggttgtgttccagcaactggggacggcgatgcctatgtcggtggaggaagggcctgagtgccagggacctgtggttgacaggcgctgccctcgatgtggtcatgaaggaatggcataccacagcggacagatgcgttccgccgatgaagggcagagtgtcttctacacctgtaccaactgcaagttccaggagaaggaagactcttgacctttttcctgggcaactctacagtcccctccctcctttcggaaggtgaaggatactgggtttttagatgccttgtccatcctgtctggttgcaatgttttgctccccgaagagaatcagatcctcctgtgggggattaccattgttcctggagtactcctacccttagttgaatttccttataaaagttatattttttctataagacccaaa

SEQ ID NO: 64911 - DNA, 945 bp, Homo Sapiens
ggggagctccggggtgtgtggacgccgctttgttgcctgagatgaagttggagcccttgtttttgacattggatcctatactgtgagagctggttatgctggtgaggactgccccaaggtggattttcctacagctattggtatggtggtagaaagagatgacggaagcacattaatggaaatagatggcgataaaggcaaacaaggcggtcccacctactacatagatactaatgctctgcgtgttccgagggagaatatggaggccatttcacctctaaaaaatgggatggttgaagactgggatagtttccaagctattttggatcatacctacaaaatgcatgtcaaatcagaagccagtctccatcctgttctcatgtcagaggcaccgtggaatactagagcaaagagagagaaactgacagagttaatgtttgaacactacaacatccctgccttcttcctttgcaaaactgcagttttgacagcatttgctaatggtcgttctactgggctgattttggacagtggagccactcataccactgcaattccagtccacgatggctatgtccttcaacaaggcattgtgaaatcccctcttgctggagactttattactatgcagtgcagagaactcttccaagaaatgaatattgaattggttcctccatatatgattgcatcaaaagaagctgttcgtgaaggatctccagcaaactggaaaagaaaagagaagttgcctcaggttacgaggtcttggcacaattatatgtgtaattgtgttatccagggttttcaagcttcggtacttcaagtgtcagattcaacttatgatgaacaagtggctgcacagatgccaactgttcattatgaattccccaatggctacaattgtgatttttgtgcagagcggctaaagattccagaagggttatttga

SEQ ID NO: 64912 - DNA, 1467 bp, Homo Sapiens
aattccgggatgaggcatccagtttagcaattttacagatgacgactctgcgattctgagagtccctggcgagcccgggctagcgaaaagtgggggcagaacgaactacatctcccatcgtgccaggaggcggtcccgcccggttccccctgggagttgtagtctaaccccctcggatccaacagcaacctcagtgcgtgaactctgttatccagaaggcctcgccctgccgccgccgaagctggaattcgtcggctagtagttctcgccggcaactagaggaacctgttggcgtggcccagaaggcttagcgggattgcacgagccctcagattcatcgctaccccgaggctaagcgccatgcctcatattgacaacgatgtgaaactggacttcaaggatgtccttttgaggcccaaacgcagtacccttaagtctcgaagtgaggtggatctcacaagatccttttcatttcggaactcaaagcagacatactctggggttcccatcattgctgccaatatggatactgtgggcacctttgagatggccaaggttctctgtaagttctctctcttcactgctgtccataagcactatagcctcgttcagtggcaagagtttgctggccagaatcctgactgtcttgagcatctggctgccagctcaggcacaggctcttctgactttgagcagctggaacagatcctggaagctattccccaggtgaagtatatatgcctggggatgtggcaaatgggctactctgaacacttttgttgaatttgttaaagatgtacggaaagcgctttcccccagcacaccatcatggcagggaatgtggtaacaggagagatggtaagaagagctcatcctttctggggctgacatcatcaaagttgggaattgggccaggctctgtgtgtactactcggaagaaaactggagtggggtatccacagctcagcgcagtgatggagtgtgcagatgctgtcatggcctcaaaggccccatcatttcagcatgggaggttggcagctgtcccggggatgttggccaacgcttttgggcgccaggagctgacttcgtgatgctggggtggcatgcctgggctgggccccaggaagtcccggtggtgagccactcgaaaggttggcagacagtccaagcgcctccatggacaggagtcttgaaatggcgcggaagacagattgcgggggggcgtggctgagtacagagcccccacaggcgaagccaggggaagacccctctaacgagaagtgtgaacataccacccagaaatcccagaggggagcacgcccacagcgccatcgggggagcggcaaaccacagagaaagacgagaaaacccccacggcgacgcacacaggaacacccatatcgagcggggcaaacacgcgaggcaacccagaggcacaacaccaacgaggcaccgagggacacacca

SEQ ID NO: 64913 - DNA, 1542 bp, Homo Sapiens
  misc_feature (1160)..(1215): n is a, c, g, or t
  misc_feature (1316)..(1317): n is a, c, g, or t
  misc_feature (1319)..(1319): n is a, c, g, or t
  misc_feature (1321)..(1321): n is a, c, g, or t
  misc_feature (1324)..(1326): n is a, c, g, or t
  misc_feature (1329)..(1330): n is a, c, g, or t
  misc_feature (1332)..(1333): n is a, c, g, or t
  misc_feature (1336)..(1337): n is a, c, g, or t
  misc_feature (1339)..(1339): n is a, c, g, or t
  misc_feature (1341)..(1341): n is a, c, g, or t
cagtcttcatcccatcagacaaagtggtgaagaaagggaagaaggacaagaagatcaaaaaacgttctttgaagagctggcagtagaagataaacaggctgatgggagaagatgcgcatcttctcccatcagctgtagccagtgtatgaagcccttcaccaacaaagatgcctatacttgtgcaaattgcagtgcttttgtccacaaaggctgccgagaaagtctagcctcctgtgcaaaggtcaaaatgaagcagcccaaagggagccttcaggcacatgacacatcatcactgcccacggtcattatgagaaacaagccctcacagcccaaggagcgtcctcggtccgcagtcctcctggtggatgaaaccgctaccaccccaatatttgccaatagacgatcccagcagagtgtctcgctctccaaaagtgtctccatacagaacattactggagttggcaatgatgagaacatgtcaaacacctggaaattcctgtctcattcaacagactcactaaataaaatcagcaaggtcaatgagtcaacagaatcacttactgatgagggtacagacatgaatgaaggacaactactgggagactttgagattgagtccaaacagctggaagcagagtcttggagtcggataatagacagcaagtatctaaaacagcaaaagaaagatgtggtcaaacggcaagaagtactatactgagttgatgcagacagagtttcatcatgtccgcactctcaagatcaatgagtggtgtgtacagccaggggatgatggcggatctgctttttgagcagcagaatgggtagaaaagctgttcaccttgtttggaatgagctgatcaagtatccatagccaattcttccagaggattctggagcggaagaaggagtctctggtggataaaagtgaaaataactttctcatcaagaggataggggatgtgcttgtaaaccccctctcacgcgagaatgccgaccggctccagaataccgtcgagaacagctgggggcgcccagtgctaccaatgacagaccgcctccaagcccttccctgctccggaaacatccacccccccacgcctgccataccgcgcccgcccctacgtcaccacttctctcgcccggtctgcctccctccctgnnnnnnnnnnnnnnnnnnnnnnnnnnnnnnnnnnnnnnnnnnnnnnnnnnnnnnnnacgtcgccgactttttcatatgcgacccggtctcgccgatctccccgttgaaaccccatcgtatcgtgtctcacaccgcctgccctctctcaccactccanncncnccnnnttnncnnccnnancnccacccctcttttcctccccttctaccagcatcgtctcccacctcaatatacccgatctccgcgtccccttcgcgcactcgcacgacctccgatctagccagcatgtagcgtcggcgccccccacgaccgcggacccataccttcgtcctgcgttgtagtggtgtatttacgccacgcccatcttctcttctagcccataa

SEQ ID NO: 64914 - DNA, 950 bp, Homo Sapiens
  misc_feature (36)..(37): n is a, c, g, or t
  misc_feature (118)..(118): n is a, c, g, or t
  misc_feature (608)..(627): n is a, c, g, or t
tgatgaaaatgctcttcggcaggtgtttgcacacanncaaagaggtggtgcactaagaaaggaccaaatccaaagcatgcaagtcatgagcagacattaccctatagtgggcagaccngaatgggatgcaggtcataaaaccaatgtccagcagtgttactgctattgtggaggccctggagactggtatttgaagatgctacagtgctgcaaatgtaagcagtggtttcatgaggcttgtgtgcaatgccttcaaaagccaatgctatttggagacagattttatacgtttatatgctctgtctgcagttctggaccagaatacctcaaacgtctaccattacagtgctggcagacacaccaaaatctgaaagatatgagcatgttctggaggcattaaatgattacaagaccatgtttatgtctgggaaagaaataaagaagaagaagcatttgtttgggttgcgaattcgtgttcctcctgttccaccaaatgtggctttcaaagcagagaaagaacctgaaggaacatctcatgaatttaaaattaaaggcagaaaggcatccaaacctatatctgattcaagggaagtaagcaatggcatagnnnnnnnnnnnnnnnnnnnntctgtaggtcgtccacctggcccatatacaagaaaaatgattcaaaaaactgctgagccacttttggataaggaatcaatttcagagaatcctactttggatttaccttgttctatagggagaactgagggaactgcacattcatccaatacctcagatgtggatttcacgggtgcttccagtgcaaaagaaactacctcgtctagcatttccaggcattatggattatctgactccagaaaaagaacgcgtacaggaagatcttggcctgctgcaataccacatttgcggagaagaagaggtcgtcttcccagaagagcact

SEQ ID NO: 64915 - DNA, 789 bp, Homo Sapiens
aggatgagaacatcctgatagacctacgccgtggctgtgccaaactcattgattttggttctggtgccctgcttcatgatgaaccctacactgactttgatgggacaagggtgtacagccccccagagtggatctctcgacaccagtaccatgcactcccggccactgtctggtcactgggcatcctcctctatgacatggtgtgtggggacattccctttgagagggaccaggagattctggaagctgagctccacttcccagcccatgtctccccagactgctgtgccctaatccgccggtgcctggcccccaaaccttcttcccgaccctcactggaagagatcctgctggacccctggatgcaaacaccagccgaggatgtacccctcaacccctccaaaggaggccctgcccctttggcctggtccttgctaccctaagcctggcctggcccccaatggtcagaagagccatcccatggccatgtcacagggatagatagacatttgttgacttggttttacgggtcattaccagtcattaaagtccagtattactaaggtaagggattgaggatcaggggttagaagacataaaccaagtctgcccagttcccttcccaatcctacaaaggagccttcctcccagaacctgtggtccctgattctggagggggaacttcttgcttctcattttgctaaggaagtttattttggtgaagttgttcccattctgagccccgggactcttattctgatgatgtgtcaccccacattgacaactccg

SEQ ID NO: 64916 - DNA, 772 bp, Homo Sapiens
ctctgcaggactcggagctcttcgacagcagtgtggaggccattgtgaatgccatctcacaggctgatgcccagaggtacgtgaacacactcctgaaactcatcccgctggtgctgggtctgcaggaacaactgcggcaggcagtgcagaatggggacatggagacctcccatggcatctgtcgcatcgctgtggccctgggcgagaaccactcccgggccttgctggaccaagtagagcactggcagagtttcctggcactcgtcaacatgattatgttctgcacaggcatccctggccactatcctgtcaatgagaccaccagctccctaaccctcaccttctggtacacactgcaggatgatattctatcctttgaggcagagaagcaggctgtataccctcaggtgtaccggccagtctacttccagctggtggatgtgcttctgcacaaggcccagttcccttctgatgaggaatatggattctggtcctcagacgagaaggagcagttccgaatttacagggtggacatctcagacacgctcatgtatgtctatgagatgttgggggccgagctgctcagcaacctctatgacaagctgggtcgtttgctcaccagctcagaggagccctactcctggcagcacacagaggccctcctctacggcttccaatccatcgcagagaccattgacgtcaactattctgatgtggtgcctgggctcattggcctcatcccacggatcagcatcagccttgtataaggacg

SEQ ID NO: 64917 - DNA, 719 bp, Homo Sapiens
tggtggtcagaaggatccctttgcgatagaattgaccttccaaggttacccacctgtcccagctgagaagaggaagcccatccgggtgctgtctctctttgatggaatcgctacagggctcctggtgctgaaggacttgggcattcaggtggaccgctacattgcctcggaggtgtgtgaggactccatcacggtgggcatggtgcggcaccaggggaagatcatgtacgtcggggacgtccgcagcgtcacacagaagcatatccaggagtggggcccattcgatctggtgattgggggcagtccctgcaatgacctctccatcgtcaaccctgctcgcaagggcctctacgagggcactggccggctcttctttgagttctaccgcctcctgcatgatgcgcggcccaaggagggagatgatcgccccttcttctggctctttgagaatgtggtggccatgggcgttagtgacaagagggacatctcgcgatttctcgagtccaaccctgtgatgattgatgccaaagaagtgtcagctgcacacagggcccgctacttctggggtaaccttcccggtatgaacaggccgttggcatccactgtgaatgataagctggagctgcaggagtgtctggagcatggcaggatagccaagttcaagcaaagtgaggacatactacaattcaattcatcgcaaaggtacgagtcgattctac

SEQ ID NO: 64918 - DNA, 933 bp, Homo Sapiens
gcttttaaacagaatgcagtcgatattgtaccgagctgtttatcagccgcgtgtacgcttgcatgtgggacaggatattgcgatacagatcgcctgcccaacggatgcgtatgttaccaatagagccttactttaaatcctttccttctggtctccctttgaattcattatgtgaaattaggggaaagccgagatcctgactcagaccaattgtaaattcacatccttgtacagaactctagcaactgtctgcccaactcgtgcacaacacaagtacctaactcatagtttatctcacagacagcctgagacagtttcttacggatacaccccgggacacaatttggattaaacacgattgaatttaggatctgtccaagttcaaagtactccttggataacagattcctcagtgtcttaatattgattcagcgtgtaatttcacctgatactgtcccactgggaacaggaacttccatattatctaaacaggttccaaataaacccaaaactggtcgaagatttattaggaggaccagcagcttttagtcccattaacccccagattttgggattttgcccattaggaacccccagtcctggagatggatcctatttaccaaactacactatatacacctcctgtaattgatgtgccatcctcaccggaggccccttcaaaaaagacttttctgtgttttacagtctgttgccagaatcggcccaactgggacaaagtctgtcttctgcacagagtgggaatagccgagaggtaactcccaatttttgcaccaaacacacaagttttggtccaccaacaagtacaacacctcaggtattgagccccactattacatttccccccaaacgcactgccttgaagaagttcacgactttttaatagtgacagctccacaaccaaggagaatagcc

SEQ ID NO: 64919 - DNA, 1025 bp, Homo Sapiens
acttgagaaatgtctttcctccaggacccaagtttcttcaccatggggatgtggtccattggtgcaggagccctgggggctgctgccttggcattgctgcttgccaacacagacgtgtttctgtccaagccccagaaagcggccctggagtacctggaggatatagacctgaaaacactggagaaggaaccaaggactttcaaagcaaaggagctatgggaaaaaaatggagctgtgattatggccgtgcggaggccaggctgtttcctctgtcgagaggaagctgcggatctgtcctccctgaaaagcatgttggaccagctgggcgtccccctctatgcagtggtaaaggagcacatcaggactgaagtgaaggatttccagccttatttcaaaggagaaatcttccttgggatgaaaagaaaaagttctaatggtccacaaaggcggaagatgatgtttatgggatttatccgtctgggagtgtggtacaacttcttccgagcctggaacggaggcttctctggaaacctggaaggagaaggcttcatccttgggggagttttcgtggtgggatcaggaaagcagggcattcttcttgagcaccgagaaaaagaatttggagacaaagtaaacctactttctgttctggaagctgctaagatgatcaaaccacagactttggcctcagagaaaaaatgattgtgtgaaactgcccagctcagggataaccagggacattcacctgtgttcatgggatgtattgtttccactcgtgtccctaaggagtgagaaacccatttatactctactctcagtatggattattaatgtattttaatattctgtttaggcccactaaggcaaaatagccccaaaacaagactgacaaaaatctgaaaaactaatgaggattattaagctaaaacctgggaaataggaggcttaaaattgactgccaggctgggtgcagtggctcacacctgtaatcccagcactttgggagctcaagttgacaagtcact

SEQ ID NO: 64920 - DNA, 288 bp, Homo Sapiens
gtttttttctttcgcgggccgggaccccacacccttcaccctctgtgtcctggtccttctgagggccactgcagatgactctcctttgaaatgagaaaaagaaaagaaagcaagaacagaaaacgaagccacaggaagggaagtagacattgtatgcttatggtttctcattatgaaggtgcagcttgtaggaggtttgtacggatgtgctttgaagttatgtatattacatataacaggaaaaaatattaaaataaacagtgctggtaagtatgaagctgacattct

SEQ ID NO: 64921 - DNA, 1411 bp, Homo Sapiens
  misc_feature (1116)..(1142): n is a, c, g, or t
agcggccgccagcctgggctccgcgcacccaccgatctgggcgcccacaagcggccggcatccgtgtcgagcagcgctgccgtggagcacgagcagcgtgaggcggcagccaaggagaaacaaccgccgccgcctgcgcaccggggcccggccgacagcctgtccaccgcggccggggccgccgagctgagcgcggaaggtgcgggcaagagccgcgggtctggagagcaggactgggtcaacaggcccaagaccgtgcgcgacacgctgctggcgctgcaccagcacggccactcggggcccttcgagagcaagtttaagaaggagccggccctgactgcagttgcaagaacagcaaggaaaaggaagccctctccagaaccagaaggtgaagtcgggccccctaagatcaacggagaggcccagccgtggctgtccacatccacagaggggctcaagatccccatgactcctacatcctcttttgtgtctccgccaccacccactgcctcacctcattccaaccggaccacaccgcctgaagcggcccagaatggccagtcccccatggcagccctgatcttagtagcagacaatgcagggggcagtcatgcctcaaaagatgccaaccaggttcactccactaccaggaggaatagcaacagtccgccctctccgtcctctatgaaccaaagaaggctgggccccagagaggtggggggccagggagcaggcaacacaggaggactggagccagtgcaccctgccagcctcccggactcctctctggcaaccagtgccccgctgtgctgcaccctctgccacgagcggctggaggacacccattttgtgcagtgcccgtccgtcccttcgcacaagttctgcttcccttgctccagacaaagcatcaaacagcagggagctagtggagaggtctattgtcccagtggggaaaaatgccctcttgtgggctccaatgtcccctgggcctttatgcaaggggaaattgcaaccatccttgctggagatgtgaaagtgaaaaaagagagagactcgtgacttttccggtttcagaaaaacccaatgattacccttaattaaaactgcttgaattgnnnnnnnnnnnnnnnnnnnnnnnnnnnccaagacaagggaaatgtagacttcataaacatggctgtataatttccgattctcccttgaatacattgtgtttctatattttcttttgacgacaaaaggtatgtacttatcaagacatttttttcttttgttaacgttattagcatatctttgtgctttattatcctggtgacagttaccgttctatgtaggctgtgacttgcgctgcttttttagagcacttggcaaatcagaaatgcttctagctgtatttgtatgcacttatttt

SEQ ID NO: 64922 - DNA, 402 bp, Homo Sapiens
ccagttcctgcttcttgaaaccttatgattttcccaaggggagatgggacagtgtcatctaaatattccgaatgtttggccttctgagaaaagagcttctagtaattgaaccatgggaaacccagcttctggagggttggccgtggggctgtgtacatgtgtgtgcccaggggtgagtgtttctcaggattcctaacgattcaaattaccgttgagtatatataaagaatgagtctctgtatggaagaacaaatgtgtgcattcacccccagtcacaatggtctccattgcatttcaagaagcaggaactgggcagttcctgcttcttgaaattaagaacttgatggcaaaaataattttaattatttttgttttcagttcttttggtggttacattcataa

SEQ ID NO: 64923 - DNA, 879 bp, Homo Sapiens
tgggatttgtgaataattaatgttcgtctctaataagttacctcagttgattgaagccagtgaagttgtgctgtgccgtcaacttctacttcctctccgcgaccttctttctgccccagtgtaaggtgttattctaaattcagacaggggaagattctttcacatatcactcagttacgtcccaatctgggtgagtttttcttacaacttgataccagataccattaattttacattcctgaataaaggcctagtacccacgcatatttcaaccatgcatatatcaagttcaaccgagttttaataggggattaaaaaaacaagctgttaggtttccatgggcactggttctcataggttctattggtgataactgctttaacatggagcaagagtttgtgaatcaggaaatagaataaattaaaatttataaatatatagaggaatcctcttgattgctcagcatgatgttagataaatgagtttgtcagaaaatatcagtatacgctgtttaccaatgttatttactttacattcttctaaagccattatggatattgtattatgagagctaaacctaaataagttatcctgttccctaggaccttgctctgtaagatagctgaattgtgtagtacgagtagtctagtcgctaaatctttaaataggaaccaaactaaagcgatttgctaagccattgtacatctatacaagagctcgttcttgttttgctttgcttagctttgtttatgtttttcttaaagctgcattcagagccacaaaggaatacgcgaaagtagggtagtgatgattctggctttatgtaactataaaataaatgtatctctttaatatctcaactgtagggatttgcaatac

SEQ ID NO: 64924 - DNA, 992 bp, Homo Sapiens
  misc_feature (717)..(717): n is a, c, g, or t
  misc_feature (825)..(825): n is a, c, g, or t
  misc_feature (892)..(899): n is a, c, g, or t
  misc_feature (906)..(909): n is a, c, g, or t
  misc_feature (911)..(912): n is a, c, g, or t
  misc_feature (914)..(914): n is a, c, g, or t
  misc_feature (917)..(917): n is a, c, g, or t
caaactttcagatcaatcagctaataataataatgtcttcacaaagaaaacggggaatcagcagaaagtgaatgatgcttcagtaaacacagacccagccacttctgcctctactgtagatgtaaagccatcaccttctgcagcagaggcagattttgacatagtaacaaaggggcaagtctgtgaaatgaccaaagaaattgctgacaaaacagaaaagtataataaatgtaaacaactcttgcaggatgagaaagcaaaatgcaataaatatgctgatgaacttgcaaaaatggagctgaaatggaaagaacaagtgaaaattgctgaaaatgtaaaacttgaactagctgaagtacaggacaattataaagaacttaaaaggagtctagaaaatccagcagaaaggaaaatggaagatggagcagatggtgctttttacccagatgaaatacaaaggccacctgtcggagtcccctcttggggactggaagacaatgttgtctgcagccagcctgctcgaaactttagtcggcctgatggcttagaggactctgaggatagcaaagaagatgagaatgtgcctactgctcctgatcctccaagtcaacatttacgtgggcatgggacaggcttttgctttgattccagctttgatgttcacaagaagtgtcccctctgtgagttaatgtttcctcctaactatgatcagagcanatttgaagaacatgttgaaagtcactggaaggtgtgcccgatgtgcagcgagcagttccctcctgactatgaccagcaggtgttttgaaagcatgtgcagacccattnttgatcagaatgttctaaattttgactaggtactttttaatatgagttaatatagtttagcaggcannnnnnnnaaaacannnnannanaanccttgtcgggccgcctcggcccttcgaaaaactttctaaaaccatccgtttggcccgcgggccccattagttaaa

SEQ ID NO: 64925 - DNA, 1063 bp, Homo Sapiens
  misc_feature (363)..(374): n is a, c, g, or t
  misc_feature (441)..(455): n is a, c, g, or t
  misc_feature (491)..(503): n is a, c, g, or t
  misc_feature (532)..(540): n is a, c, g, or t
  misc_feature (561)..(573): n is a, c, g, or t
  misc_feature (617)..(617): n is a, c, g, or t
  misc_feature (625)..(642): n is a, c, g, or t
  misc_feature (709)..(719): n is a, c, g, or t
  misc_feature (947)..(957): n is a, c, g, or t
  misc_feature (991)..(1009): n is a, c, g, or t
ggcaacaaaaaagaatgttttggtattggagaagggatggtcagttagcctgtctgtcacacgacggaatggatactgggcccggggaccactttcatactcacgtcctcatccttggatacccaggggagggcgaaccgttttcgctcgtgtgtctgtacgcagcatgttgggatcgggagtttcggcacagactatcccatcaagccgttggctcctttctgctattctactttaccacgtttctaaaacgcaagctctccggaccagacggacacagggagaagctagtttttttcctgtgattgaaatgatgactctactcccaaaaggggaaaaacattatccttggtttaagaaagnnnnnnnnnnnngcccccctttcatgttctttccgggggagaaaacccgaaaaggttttagggattcttgatctcctgnnnnnnnnnnnnnnncctttattttttggtgttggggggtccttaaaaaannnnnnnnnnnnnacccttttgtccaaaagaatgtttggtgnnnnnnnnnggaaagagagggtcccccaannnnnnnnnnnnnccccccaaaggagaattttttgaattttggggggggaagccaantaaccccnnnnnnnnnnnnnnnnnngggaggggcgggcccttcccccgtttttatatggtaaaggcctgaaaaaccaccgggcagatatggnnnnnnnnnnncgaagggccccgccaatggtgttgccccgaaacccaaaaatataatgggtgtaaaagacccatttttttgattttgtgtgtgtgggaacccccaaaaacctttttgggaggacaaatatttataaaaagagggttgctctggtgtgtgaatataaaaaaatattttttttggtgagaaaatattattttttcccgagcgggttttgttgttggagagaatttttgttnnnnnnnnnnnatatgttttctccccccgctctgtgtgcgcactnnnnnnnnnnnnnnnnnnnacgcgagagggagaggacaccagcttctttagaacccccccctcctttaatttc

SEQ ID NO: 64926 - DNA, 833 bp, Homo Sapiens
  misc_feature (49)..(49): n is a, c, g, or t
gtggttcctcccctccaggacccagggatctgctatagcttcgggattnttcccgggcccaaaccatacagtcttcatttgacaataggcctgccagagtcatagtcatcatggctatctccctttttcatcatccacatctttcccactcgcggtcatcttcattctcagatttctgtatatccatttccctcttccttctccttgttgccttattggcctgaagaataaagtcatcctcaagcagattatctggatcatcaaagtcaaaatcatcatcaagagctgcaacaatgtcaggatcaaaaatccagtcgagttcctgaaactggagctgctttatttaacaatccaacatcttcctcaaactctgaagcaaacactgatgaaggcaacttaattccagtgcttggaattactagcgtttcttctttctcctctctcctgttgtgtgcactgaaggtacttgagggaataagctctgaaggcccagatggttccttcaggtgctgcaggtagtcatagtcgtcatcaaagaacactccatacttcctctgttctgctcgcctttcttcattgtctattttttgtgtgggcaatagaaccctctggggtgcactctcatctgctgctaaaggatctcgttggctccggtggaccaagtgaaaagacacagctttcttcttctctataaagggctttttcttcctgtgaggcatgctgcagccgcgcggcgctcacccccaacaggggcggcgatgacaccctcgaagtccggcggggagaccaaggtccagctgaaggccgcttctgtaggcctcaccacacgtccc

SEQ ID NO: 64927 - DNA, 669 bp, Homo Sapiens
  misc_feature (361)..(393): n is a, c, g, or t
gctagccagaggagtccaccgggaggagctgaaggagtgtggctgcgagagtggcttcaaaggacaagtccgacggcgactttgggaagggcctggagccgtgggaacggcaccactcagcacgagagaaggagaagaaggatggccccgataaggaaaggaaggagaagacaaaaccagaaagaccgttcgaataaagcagaaaaggagagatcgctgaaggaaaagtctccgaaagaagaaaaactgagactgtacaaagaggagagaaagaagaaatcaaaagaccggccctcaaaattagagaagaagaatgatttaaaagaggacacaatttcacaagagaaggagaagatttttnnnnnnnnnnnnnnnnnnnnnnnnnnnnnnnnngtttatagggaagattctgcttttgacgaatattgtaacacaaatccgtttctggagaatgaagacaccaaactttagcctttctgacgatcagcgagatcggtggttttctgacattgtccgattcaccctttgatttcaaaggcggagcacacgctgggactcgccagtgacagactactgggacatgaagagcgactctgtgccaagctcatcttggagacggtgaaggaggacaagcaaggagtctgaaggccgtctggaggttagacctcg

SEQ ID NO: 64928 - DNA, 607 bp, Homo Sapiens
  misc_feature (511)..(566): n is a, c, g, or t
ggtctgtatccggataagaacaccattttctgttgaggattgtgacttcctataggaaacagtcttgcatctatgtatttacaaatgaactttaaagtattcttaaagctttggcttaaatactgcttgcttactgatttacttaatgctaagcatggcaggagttataaatttaaatactataagacctggctgaatcccagatgtatcaataaattgttatagtagcttatggaaaatgctattaaagataaattttcatacattgtatttttagtcaagtaaaatatggatgaaaattaataaagtactgtcaagggaaaaaatatgtataaccttgtaagtgatttttctcccctttattaaaaaaagattatacaatttgggctcatattaaaaaattcaaacagtagaacagtgtgtacgtagaaggcattccccactcccactccaggagtttgggtatcattctagaagtgttctgtcaatacataagcatttttcattcaannnnnnnnnnnnnnnnnnnnnnnnnnnnnnnnnnnnnnnnnnnnnnnnnnnnnnnngggatcccatattctataatttttgtgttttaaaaaacccc

SEQ ID NO: 64929 - DNA, 570 bp, Homo Sapiens
  misc_feature (106)..(141): n is a, c, g, or t
gccagtcccttagcatatctttcttggttttgtctcaggtctgcctcagccacctccctgacgctgtcccactgtgtggatgtggtgaaggggcttctggagtaannnnnnnnnnnnnnnnnnnnnnnnnnnnnnnnnnnncgggctccccagcccaggcttggtctgtgtctgtgcctcgacctgtccatccctgtgatgtgcagctgtctgcctgtgagtctgttgggccttggagacaggagccaggtgaatggcctcagccccggccccggttcagctgtcttccaggttctgtcctcacaagggtctgtcttcatccaaggtcgtcacaggggaccaagagctccagcctcaggcagggcaggagctcctactcaattgggaaaaatgctctgaaatgtcagggactcattcagagtcacagagccaagcagtggcaagactgggattgaaaccccggccctgaggtttctttgcacccaccaaccctaccctgctcctgtgtctgcctctgtgtgctccccaccccgtctccacaccaacccctggggtcgaagccaatgttgg

SEQ ID NO: 64930 - DNA, 738 bp, Homo Sapiens
  misc_feature (711)..(711): n is a, c, g, or t
gggatggcaggcagggtggctgccttagctgccggaggttccgcactctctaaggccccgggtgaagccccacctctgctgcgcgcagcctgcggtgcgggtcatggcgcggctaccgaagctggcagtctttgatttggattacactctctggcctttctgggtcgacacgcacgtagaccctccgttccataagagcagtgatggaactgtacgagataggcggggccaagacgtccgactgtacccagaggtgcctgaggtcctaaaacgattgcagagccttggggtgcccggtgcggctgcttcaaggacaagtgagatagaaggggccaaccagctactggagctctttgacctcttcaggtactttgttcatcgggaaatctatccaggcagcaagatcacacactttgagaggttgcagcagaagactggaattcctttctcccagatgatcttctttgatgatgagaggcggaatattgtagacgtcagcaaactgggtgttacctgcattcacatccagaatggaatgaatcttcaaactctaagtcaagggttagagacatttgcgaaggcccaaactgggcctttgaggtccagccttgaggagagcccatttgaggcctaaactgaaaggaaatcaagaaggcattttcaggtgcatttgtaatttattaaagttcatctgtgtgtgacagaagaccnccgagagaggaacacaacgaacctggc

SEQ ID NO: 64931 - DNA, 1188 bp, Homo Sapiens
tgggaagcagtgatatatctgtacgctagaacagtgccctcttcagctgaataaccctttaacgagtattccaaatttgatggcaagggtcatgtaggtacaacagcaaccaagaagatcggatgtctacctccctctgcactcgagccaggacagactgctgccaatgaccgtggtgacaatggccagcgccagggtgcaggacctgatcgggctcatctgctggcagtatacaagcgaaggacgggagccgaagctcaatgacaatgtcagtgcctactgccatgcatattgctgaggatgatggggaggtggacaccgatttccccccgctggattccaatgagcccattcataagtttggcttcagtactttggccctggttgaaaagtactcatctcctggtctgacatccaaagagtcactctttgttcgaataaatgctgctcatggattctcccttattcaggtggacaacacaaaggttaccatgaaggaaatcttactgaaggcagtgaagcgaagaaaaggatcccagaaagtttcaggccctcagtaccgcctggagaagcagagcgagcccaatgtcgccgttgacctggacagcactttggagagccagagcgcatgggagttctgcctggtccgcgagaacagttcaagggcagacggggtttttgaggaggattcgcaaattgacatagccacagtacaggatatgcttagcagccaccattacaagtcattcaaagtcagcatgatccacagactgcgattcacaaccgacgtacagctaggtatctctggagacaaagtagagatagaccctgttacgaatcagaaagccagcactaagttttggattaagcagaaacccatctcaatcgattccgacctgctctgtgcctgtgaccttgctgaagagaaaagccccagtcacgcaatatttaaactcacgtatctaagcaatcacgactataaacacctctactttgaatcggacgctgctaccgtcaatgaaattgtgctcaaggttaactacatcctggaatcgcgagctagcactgcccgggctgactactttgctcaaaaacaaagaaaactgaacagacgtacgagcttcagcttccagaaggagaagaaatccgggcagcagtgacactggcctccagcatcagcctgttaag

SEQ ID NO: 64932 - DNA, 727 bp, Homo Sapiens
gactctagaggagcttatgggctgctcatcccccagggagactccgtctgtgacagaggtgatgtggcaaccagctcttaggcgtgggagaggctacaggcccaaggatatggtgtccgaatccaggatgctggagtttatctgctgtatagccaggtcctgtttcaagacgtgactttcaccatgggtcaggtggtgtctcgagaaggccaaggaaggcaggagactctattccgatgtataagaagtatgccctcccacccggaccgggcctacaacagctgctatagcgcaggtgtcttccatttacaccaaggggatattctgagtgtcataattccccgggcaagggcgaaacttaacctctctccacatggaaccttcctggggtttgtgaaactgtgattgtgttataaaaagtggctcccagcttggaagaccagggtgggtacatactggagacagccaagagctgagtatataaaggagagggaatgtgcaggaacagaggcgtcttcctgggtttggctccccgttcctcacttttcccttttcattcccaccccctagactttgattttacggatatcttgcttctgttccccatggagctccgaattcttgcgtgtgtgtagatgaggggcgggggacgggcgccaggcattgtccagacctggtcggggcccactggaagcatccagaacagcaccaccatctagcggccgct

SEQ ID NO: 64933 - DNA, 393 bp, Homo Sapiens
  misc_feature (156)..(197): n is a, c, g, or t
aaaagaccctggccagacctgactccactcttaaacctgggtcttctccttggcggtgctgtcagcgcacagacccatgcgcatccccacccacaaccctttaccctgatgatctgtattatattttaatgtatatgtgaatatattgaaaataannnnnnnnnnnnnnnnnnnnnnnnnnnnnnnnnnnnnnnnnnagcctctacatgctaggatcacaggaagactttgtaaggacagtttaagttctcctgcaaggtttaatttgttatcatgtaaatattccaaagcaggctgccttgtggttttggccagccttgtgctatgttgataagattgatttactgcttaaaatcactttactttatccaatttttactgaactttttatgt

SEQ ID NO: 64934 - DNA, 684 bp, Homo Sapiens
tgaactgtttactatgtggggtgaccaccaacctccagtttgtgtaagttctccccggaattttctttctcttctatactttaggcacttactatactactgatgtaataaaagagcagggttaaaaatattgtatctgtattcattgtgaatcctgtagcttttctagttaacaaaaaatcgctttctaaaatactcttaatcccattgttttggttaacatcttacccatttgttgtatttcaaatgccattaatcattttagtacaacacctatgtttataaaaatttgaaaacattacatattgtatttaaaactaattagtgaagagtaagaaaaaaactagccaacagaattgtaggtgatgcattagttaaatttcaaaactcataataaagggactttcagagattggttgaaacccagtggtatccctgtaaattagctcctgtgactggaaaagaccccaaaaaggcagtagaggagattagtgtttacttgctgtggttgtggtgtgctgctacttaattataggtagtgacacactgaaattcttatttgtccaataatctgaagtagtttcctatatttatctgtactaaattgactataaattgagtctgcaaagaggaaactttttgactgtactgtatttaggagcctttgtacagccttggtcaaat

SEQ ID NO: 64935 - DNA, 528 bp, Homo Sapiens
ctacagtgctcgacaagagtaccaaagaaggaagcagagtgttagtgagtttgatgagcatgctctggttgtatgggatcatttaagaagagtgcattctacaaaagcatcagtgttggaatagggcagttaaagcccaaaggaatcctgaatcatcttgggagaagtaacttactgtatggttattcccacagtgtgagtgtcgtcatctaactgccctcatgcttctttttaggccagaaaattagtccagaaggaaaagctataattcagcttcagctggtcctacatgcaggggacacaactaacttccattctttccaatgaaagcacagcagtgaaagagcgagatgcagtaaaagaccttctgcagcagctgctgccctaattcaagaggtaagcaaataaagaactggaagagaagtacaggtgggaggaaaagaatagcctgtgtgaaagagatactgggttctctatagtctccatagtatgctaatacgcttgttagctatccccacacatgtttcg

SEQ ID NO: 64936 - DNA, 829 bp, Homo Sapiens
  misc_feature (770)..(780): n is a, c, g, or t
cggaatgagaaaagcctggtgcatcttcaaaatgagtcctaaagaacatactgagtacttagaagtagaagaacataagatgtatttctgactaaaacaaatggctctttcacatgtgctttattagactctgggagagaaaattaaccaagtgcttcagaacaggtttttagtatttaattcttcacggtaagaaaatgaagttctaatgaactgtttctcccaaggttttaaaattgtcaagagttattctgtttgtttaaaaaataagaaacctctttaagcaatagattttgcttgggttttcttttttaaaaacataatactgtgcaggcaaggcactgtaaaagttttaattccttccagaagaaccagtggaagaatttaaatttggcgctacgatcaaaactactgaattagtagaaataatgatgtctaaagcttaccaacaaaagaaccctcagcagaataacaaaaactttgctcaggacatttgaggtcaaattgaagacggaaaccggaaaccgttttcttgtaagcccctagaggcagatcaggtaaagcatacatagtagagggaaaggagagaatggaaataaaactcaatattatgcagatttatgccttattttttagcattttttaaggttgggtctttcaggctggttttggtttgtattagatctgtatagtttaattaactggtgatttagttttatatttaagctaccattaatcttttttctttggtgatatttatttctttgccnnnnnnnnnnnaactactttctatcttcagaatgtttcgttgtatcctatatagagctga

SEQ ID NO: 64937 - DNA, 429 bp, Homo Sapiens
agcgacaatgaagtttctaagctcaggtaaagaacagaagcctaagcctaaagaaaagatgaagatgaagccagagaagcccagtcttccgaaatgcggtgctcaggtgagtggaccaggaccagccgcccaggcagtggacgcacaggcgtgagagcgtttgtcgcagaactgttggtttgtagaccgtgtgggggtggcaggtgtaggggggcgcacacgtggtgtcgccttgacctttgtcttccaccttcccaccagttttcccttctctgcccgttagctgaggggttaattaacacaagtgcccgtaaagcaagtgctgacccctggcagtgtacggggggcataagacttcacggacacaccctgctgtcttgtgagaagagtttgtatccacccggtggagtttgtcgagcgtaaccctgc

SEQ ID NO: 64938 - DNA, 1955 bp, Homo Sapiens
  misc_feature (1861)..(1861): n is a, c, g, or t
  misc_feature (1907)..(1907): n is a, c, g, or t
tcactgtacaactggctaagctactgtactttgtaattctccaagaggggagccacggtgtggtgttgtacctcatttgaaatggtcggattggcgaccatttcaacaatgccaaagccactatcctgtgggacaatgccttctctgagatggaccgcgtgccctttgtggtggctgagcgtgtgccctgggagaagatgtgtgaaactctgaacctgaagttcatggctgaggtggggaccaaccgggggctgctcccagagcacttcctcttcctggcccagaagatcttcaatgacaacagcctcagtatggaggccttccagcaccgttctgtgtcctggtcgcagttcaacaaggagatcctgctgggccgtggcttcaccttttggcagtggtttgatggtgtcctggacctcaccaaacgctgtctccggagctactggtctgaccggctgatcattggcttcatcagcaaacagtacgttactagccttcttctcaatgagcccgacggaacctttctcctccgcttcagcgactcagagattgggggcatcaccattgcccatgtcatccggggccaggatggctctccacagatagagaacatccagccattctctgccaaagacctgtccattcgctcactgggggaccgaatccgggatcttgctcagctcaaaaatctctatcccaagaagcccaaggatgaggctttccggagccactacaagcctgaacagatgggtaaggatggcaggggttatgtcccagctaccatcaagatgaccgtggaaagggaccaaccacttcctaccccagagctccagatgcctaccatggtgccttcttatgaccttggaatggcccctgattcctccatgagcatgcagcttggcccagatatggtgccccaggtgtacccaccacactccagcacagcaaacctgccgggatcaaagtgtaccagtcggcagcatggctacgaaatgtgggaattgtggacccggctactccacccctctggaggccatgaaaggacccagggaagagatcgtctacctgccctgcatttaccgaaacacaggcatctgaggccccagattatctggccactgtggatgttgaccccaatgtctccccagtattgccaggtcatccaccggctgcccatgcccaacctgaaggacgagctgcatcactcaggatggaacacctgcagcagctgcttcggtgatagcaccaagtcgcgcaccaagctggtgctgcccagtctcatctcctctcgcatctatgtggtggacgtgggctctgagccccgggccccaaagctgcacaaggtcattgagcccaattgacatccatgccaagtgcgaactggcctttctccacaccagccactgcctggccagcggggaagtgatgatcagctccctgggagacgtcaagggcaattggcaaagggggtcagtgctgctggatggggagacgatcgagcgtgaaggggacattgcgagagacctgggggtgctgcaccgtttgggctatgacttctggtaccagcctcgacacaatgtcatgatcagcactgagtgggcagctcccaatgtcttacgagatggcttcaaccccgctgactgtggaggctggactgtaacggcgagccacttatatgtactgggactggcagcgccttgaagattgttgcagaccctgtctctcacagatgggcttattcccttggacgatccgcttcctgcacaacccagaccgctgcccaaggcttttgtggggctgcgcacttcaagctccaccatccagcgcttctacaagaacgaagggaggtacatggtcagtnggagaaaggttgattccaggttgcccccaagaaagttgaagggctnggcttgctgcccgaaatgccaggcctgattcaccgacatcctggctct

SEQ ID NO: 64939 - DNA, 766 bp, Homo Sapiens
  misc_feature (593)..(593): n is a, c, g, or t
  misc_feature (736)..(737): n is a, c, g, or t
tgcaacgggaacatgatattgcaattaaattcttccagagagctatcccagttgatccgaattacgcttatgcctatactctattagggcatgagtttgtcttaactgaagaattggaccaagcattagcttgttttcgaaatgctatcagagtcaatcctagacattataatgcatggtatggtttaggaatgatttattaccagccagagaaattcagccttgcagaaatgcatttcccaaaagcgcttgatatcaaccctccaagttcagttttactttgccacattggagtagttcaacatgcactgaaaaaatcagagaaggctttggataccctaaaccaagccattgtcattgatcccaagaaccctctatgcaaatttcacagagcctcagttttatttgcaaatgaaaaatataagtctgctttacaagaacttgaagaattgaaacaaattgttcccaaagaatccctcgtttacttcttaataggaaaggtttacgagaagcttaggtctgacgcacctcgccctgatgaatttctcttgggctatggatttagatcctaaaggagccaataaccagattanagaggcaattgataagcgttatcttccagatgatgaggagccaataacccaagaagaacagatcatgggaacagatgaatcccaggagagcagcatgacagatgcggatgacacacaacttcatgcagctgaaagtgatgaanntttaaacttctggaaatcagaacttttac

SEQ ID NO: 64940 - DNA, 415 bp, Homo Sapiens
gctcgcgatctagatcagaaccaagggagagccggccccgccgcccgggaaagcaggagagaagtcagtgaagaagccggccccgcctccagccccaccacaggccaccaaaaccactgctcctgtccccgagcccaccaagccaggagaccctcgggaagccaggaggaaggagcggccagccaggaccccccccaggaggcggacgctaagcggcagcggcagtggcagtggtagcagctatagtggttccagctcccgatccaggtccctgagcgtgagcagcgtctcctcagtgtccagtgctacgtcgagcagcagctctgcacacagcgtggactcggaggacatgtacgcagacctggctagccccgtgtcctcagccagctctcggtccccggccccagcccagacc

SEQ ID NO: 64941 - DNA, 1198 bp, Homo Sapiens
gcagcagtgagcagcacttcaacctcaggcggacacgggcgagcagccctacgagcacctgaccgcagagtcttttcctgacatctctctgaacaacgagaaggtgctggtggagaccagttaccccagccaaaccactcgactgccccccatcacctatactggccgcttttccctggagcctgcacccaacagtggcaacaccttgtggcccgagcccctcttcagcttggtcagtggcctagtgagcatgaccaacccaccggcctcctcgtcctcagcaccatctccagcggcctcctccgcctccgcctcccagagcccacccctgagctgcgcagtgccatccaacgacagcagtcccatttactcagcggcacccaccttccccacgccgaacactgacattttccctgagccacaaagccaggccttcccgggctcggcagggacagcgctccagtacccgcctcctgcctaccctgccgccaagggtggcttccaggttcccatgatccccgactacctgtttccacagcagcagggggatctgggcctgggcaccccagaccagaagcccttccagggcctggagagccgcacccagcagccttcgctaacccctctgtctactattaaggcctttgccactcagtcgggctcccaggacctgaaggccctcaataccagctaccagtcccagctcatcaaacccagccgcatgcgcaagtaccccaaccggcccagcaagacgcccccccacgaacgcccttacgcttgcccagtggagtcctgtgatcgccgcttctcccgctccgacgagctcacccgccacatccgcatccacacaggccagaagcccttccagtgccgcatctgcatgcgcaacttcagccgcagcgaccacctcaccacccacatccgcacccacacaggcgaaaagcccttcgcctgcgacatctgtggaagaaagtttgccaggagcgatgaacgcaagaggcataccaagatccacttgcggcagaaggacaagaaagcagacaaaagtgttgtggcctcttcggccacctcctctctctcttcctacccgtccccggttgctacctcttacccgtccccggttactacctcttatccatccccggccatgacctcatacccatcccctgtgcccacctccttctcctctcccggctcc

SEQ ID NO: 64942 - DNA, 1376 bp, Homo Sapiens
tcaggtttttaaaaggctttattggggaaacgtagaggggtggggaccgtccttggaggcctcaggacaccatcctccatgttgctgggcagttgaagtccccaggggcccctgctcagaagcgtgtcaccagtctctgcgggggcctcatctgtgactcctggaggggcccagcccggggtaaccactacccccccatccctcgttgctgttgctcctgctccaggttccgctgcaggacctgctgctggttggcaatgacacgccggatgccgttgacaaagttgccctggtcatgggggatgaggccaatgaagattttcttctctgaagagtacaggagcataagcacgcggatctcacacgatgctttgtaggaaaagtgcacgcagccggcgaagccattgtccatgatccggcacaggctcttcagtgtctccaggtccttggtgaagtggaactggaccaggcgcgagttccggaacagcggcactagggtggtcagcagctgctgcgggatgagctgcatgtacagcttccttggccactgctcggtcctcaggatctccccctggttcacgtagacgtgggatggcagccacctcttggaccgactgttgggctcaggcctgggctcctgccactccatgacaccactccatgccagaaacttgttgttgacgatctggactgggcctgagttgacaccaccaggtcccactgcctgcttgcgggtggtgatgacctgccggatggcactgacgaagccgctctggtcgtaggggatgaggcccatgaagatcttcttcttggacgagtacaggagcatgagcacgcgcacctcacagggggagatgtgggggaacagcatgcagcccgcgaagccgttgcccatgatgcggcagagccccttgagcgagtcgcagtctctgttggtgaagtggaactgtgccaactgggagttccggaacagggggcccagggtggtcagcagctgctgcgggatcagctgcatgatcagcttctgcggccactggtcggtctccaggttctcgccttggttcacgtaggcttggcagggcagggtccgcttcagctttgcagtggagtcagagtagggtctgcgcttctcctgccactcgaggacgccgctccaagccagcagcttgttgctgagccggtgctcgctcacggccagacccccgagggtgagcccaggtgaggagggaccgatgggacccagtgccccgaagacccgagcaccttccatgggagggccgagcgggcccggatccgcggaggctgcgggcctcgggggctggcaggccaggagccgagcggacggcgcgcaccacgaggacgcggagggcggccgc

SEQ ID NO: 64943 - DNA, 1275 bp, Homo Sapiens
  misc_feature (979)..(1020): n is a, c, g, or t
  misc_feature (1121)..(1121): n is a, c, g, or t
aagttagtcgggacggagggatgaggaggaagagtggctctatggcggcccatgggacgtgcatgtgcacagtgatttggcaaaggacctagatgaaaatgaagttgaaaggccagaagaagaaaatgccagtgctaatcctccatctggaattgaagatgaaactgctgaaaatggtgtaccaaaaccgaaagtgactgagaccgaagatgatagtgatagtgacagcgatgatgatgaagatgatgttcatgtcactataggagacattaaaacgggagcaccacagtatgggagttatggtacagcacctgtaaatcttaacatcaagacagggggaagagtttatggaactacagggacaaaagtcaaaggagtagaccttgatgcacctggaagcattaatggagttccactcttagaggtagatttggattcttttgaagataaaccatggcgtaaacctggtgctgatctttctgattattttaattatgggtttaatgaagatacctggaaagcttactgtgaaaaacaaaagaggatacgaatgggacttgaagttataccagtaacctctactacaaataaaattacggagggaagaactggaaactcagagaaagaaactgcccttccatctacaaaagctgagtttacttctcctccttctttgttcaagactgggcttccaccgagcagaaacagcacttcttctcagtctcagacaagtactgcctccagaaaagccaattcaagcgttgggaagtggcaggatcgatatgggagggccgaatcacctgatctaaggagattacctggggcaattgatgttatcggtcagactataactatcagccgagtagaaggcaggcgacgggcaaatgagaacagcaacatacaggtcctttctgaaagatctgctactgaagtagacaacaattttagcaaaccacctccgtttttcccctcccagagnnnnnnnnnnnnnnnnnnnnnnnnnnnnnnnnnnnnnnnnnnctccgactgtcagcactgctccccctctgattccaccaccggggttttccttcctcccaccaggcgcctcaacctcccatctccttataccaaccaataangaaagtgggaccttccttcctggttattgatagtccccttctggcacgtggcttttcccttatgggcaaatggttggccttttccccccatcctttccggggttccctgcctcctttcccgtgggcccttaggccctttgttggggacaacccc

SEQ ID NO: 64944 - DNA, 673 bp, Homo Sapiens
  misc_feature (344)..(463): n is a, c, g, or t
gtgttcactagcaacctcaaacagacaccatggtgcatctgactcctgaggagaagtctgccgttactgccctgtggggcaaggtgaacgtggatgaagttggtggtgaggccctgggcaggctgctggtggtctacccttggacccagaggttctttgagtcctttggggatctgtccactcctgatgctgttatgggcaaccctaaggtgaaggctcatggcaagaaagtgctcggtgcctttagtgatggcctggctcacctggacaacctcaagggcacctttgccacactgagtgagctgcactgtgacaagctgcacgtggatcctgagaacttcagnnnnnnnnnnnnnnnnnnnnnnnnnnnnnnnnnnnnnnnnnnnnnnnnnnnnnnnnnnnnnnnnnnnnnnnnnnnnnnnnnnnnnnnnnnnnnnnnnnnnnnnnnnnnnnnnnnnnnnnngtatcactaagctcgctttcttgctgtccaatttctattaaaggttcctttgtttccctaagtccaactactaaactgggggatattatgaagggccttgaagaccattctgcgcagttctggccctaagtaggagaaaaccaatgtgattttcaattgtccgaggaagaagaacagcacaaacacagagacagaagagagcacaaaagg

SEQ ID NO: 64945 - DNA, 1083 bp, Homo Sapiens
gggggaaacggaaacctttttagggagtccaaggtacagtcgccgcgtgcggagcttgttactggttacttggcctcatggcggtccgagcttcgttcgagaacaactgtgagatcggctgctttgccaagctcaccaacacctactgtctggtagcgatcggaggctcagagaacttctacagtgtgttcgagggcgagctctccgataccatccccgtggtgcacgcgtctatcgccggctgccgcatcatcgggcgcatgtgtgtggggaacaggcacggtctcctggtacccaacaataccaccgaccaggagctgcaacacattcgcaacagcctcccagacacagtgcagattaggcgggtggaggagcggctctcagccttgggcaatgtcaccacctgcaatgactacgtggccttggtccacccagacttggacagggagacagaagaaattctggcagatgtgctcaaggtggaagtcttcagacagacagtggccgaccaggtgctagtaggaagctactgtgtcttcagcaatcagggagggctggtgcatcccaagacttcaattgaagaccaggatgagctgtcctctcttcttcaagtcccccttgtggcggggactgtgaaccgaggcagtgaggtgattgctgctgggatggtggtgaatgactggtgtgccttctgtggcctggacacaaccagcacagagctgtcagtggtggagagtgtcttcaagctgaatgaagcccagcctagcaccattgccaccagcatgcgggattccctcattgacagcctcacctgagtcaccttccaagttgttccatgggctcctggctctggactgtggccaaccttctccacattccgccccatctgtaccggatgctggcagggaggtggcacagagctcactgggactgagggggctgggcacccaaccccttttcccacctgtgccttatccgcctggaatctattcattactggcaaaaacccggcttctgtttgtgcctgggctgggcaaggccccttgtgggctgctttggcttgaaggggttcttggcctggta

SEQ ID NO: 64946 - DNA, 1373 bp, Homo Sapiens
  misc_feature (129)..(137): n is a, c, g, or t
caggactcccaggacagagagtgcacaaactacccagcacagccccctccgccccctctggaggctgaagagggattccagcccctgccacccacagacacgggctgactggggtgtctgccccccttnnnnnnnnncagcacagggcctcaggcctgggtgccacctggcacctagaagatgcctgtgccctggttcttgctgtccttggcactgggccgaagcccagtggtcctttctctggagaggcttgtggggcctcaggacgctacccactgctctccgggcctctcctgccgcctctgggacagtgacatactctgcctgcctggggacatcgtgcctgctccgggccccgtgctggcgcctacgcacctgcagacagagctggtgctgaggtgccagaaggagaccgactgtgacctctgtctgcgtgtggctgtccacttggccgtgcatgcctctctccaggcccaagtcgtgctctccttccaggcctaccctactgcccgctgcgtcctgctggaggtgcaagtgcctgctgcccttgtgcagtttggtcagtctgtgggctctgtggtatatgactgcttcgaggctgccctagggagtgaggtacgaatctggtcctatactcagcccaggtacgagaaggaactcaacgacacacagcagctgcctgccctgcctggctcaacgtgtcagcagatggtgacaacgtgcatctggttctgaatgtctctgaggagcagcacttcggcctctccctgtactggaatcagactggaccgcagatcattaccttgaaccacacagacctggttcccctgcctctgtattcaggtgtggcctctggaacctgactccgttaggacgaacatctgccccttcagggaggacccccgcgcacaccagaacctctggcaagccgccgactgcgactgctgaccctgcagagctggctgctggacgcaccgttgctcgctgcccgcagaagcggcactgtgctggcgggctccgggtggggacccctgccagccactggtcccaccgctttcctgggagaatgtcactgtggacgtgaacagctcggagaagctgcagctgcaggagtgcttgtgggctgactccctggggcctctcaaagacgatgtgctactgttggagacacgaggcccccaggacaacagatccctctgtgccttggaacccagtggctgtacttcactacccagcaaagcctccacgctatgggacgatgacttgggagcgctatgggcctgccccatggacaaatacatccacaagcgctgggccctcgtgtggctggcctgcctactctttgccgctgcgctttccctcatcctccttct

SEQ ID NO: 64947 - DNA, 914 bp, Homo Sapiens
tggtgcccctgccccagtggtagaagctgtctccacccctagtgcggcctttccctcagatgccactgccgagaacgtaaaacagcaggggccgatcctgacaaagcacggcaagaacccagtcatggagctgaacgagaagaggcgtgggctcaagtacgagctcatctccgagaccgggggcagccacgacaagcgcttcgtcatggaggtcgaagtggatggacagaagttccaaggtgctggttccaacaaaaaggtggcgaaggcctacgctgctcttgctgccctagaaaagcttttccctgacacccctctcgcccttgatgccaacaaagaagaagagagccccagtacccgtcagagggggaccgagatttgctgctaagccacataaccctggcttcggcatgggaggccccatgcacaacgaagtgcccccaccccccaaccttcgagggcggggaagaggcgggagcatccggggacgagggcgcgggcgaggatttggtggcgccaaccatggaggctacatgaatgccggtgctgggtatggaagctatgggtacggaggcaactcggcgacagcaggctacagtgactttttcacagactgctacggctatcatgattttgggtcttcctagagcgtctaaaagtattgcacacaaaatcaactttttactccaatttcctccaactccaaaacccaaagtgtccgtgctgtgtccctgtgcctcactgggtttctcaaccgtggcttttcaccgcagcttgtctgaaactcttagcctgcagaatttaagacaatggcagtttttatcgtgatttgcctttgaacttggtcctattgaagttcacaataagtggaaaccatcttttcaagaactaatcgagacagctgggatctctag

SEQ ID NO: 64948 - DNA, 502 bp, Homo Sapiens
ttagtcttgtaatttcaggccagaaattctcaacactattttgcatctgttttctttttctaagtcatgataatatagatgttctggtctatcataaaagaatgtttatgtacatttcagtcattcggtatgtggctttgtaaattaaagtataggcaaaacatttgtgttatacatgatatataatttcattttgtaaatgttgattgcacatgtggtcacattattattgagactgcttttatgtgacctgtagtctcccacagaacctaaagtaataagctggcttttctgtgatagccacgtttgcgtatttctttccctatttcccttgcctgctaatgttgaacagcatgaacttgctttctgatgctgttttagactgtccctgttgtatctcaataatatctttgttttccttcagcctttattactataattgttcattctacatgaaagctaggaaactgaaattagaagagcacttatctgctacttgccg

SEQ ID NO: 64949 - DNA, 1067 bp, Homo Sapiens
gagcggtccgctcttctcaagtctattggctcaagtccatgcgtctcatggcactgccgggtgagaggcggaaaaaggccttcccaggcgcgagaagatgacgtcacagtagcccggccgggcgccgaggttgccttagggctctctgcccagtaacaggcatcgaacggtgcagactgaagacgccctccgtcagcgacgccgtcgcaatggccatttgtcaattcttccttcaaggccggtgccgctttggagatcggtgctggaacgaacatcccggtgctaggggtgcaggaggaggacggcagcaaccgcagcagcagccttcaggtaataatagacgtggatggaatacaactagccagagatattccaatgtcatccagccatccagtttctccaaatccacaccatgggggggcagcagagatcaagaaaagccatatttcagttcttttgattctggagcttcaactaacaggaaggaaggctttggattgtctgagaacccatttgcttcacttagtcctgatgagcagaaagatgaaaagaaacttctggaaggaattgtaaaagatatggaggtttgggaatcatcagggcagtggatgttttctgtttattcaccagtgaaaaagaaacctaatatttcaggttttacagacatttcaccagaggaattgaggcttgaataccataacttcttaaccagcaataacttacagagttatctaaattctgtccaacgtttaataaatcaatggaggaacagggtaaatgaactgaaaagtctaaatatatcaactaaagtagctttgctctctgatgtaacaggatggagtaaatcaagcagcacctgcatttggatttggcagcagtcaagcagcaacatttatgtcgccaggctttcccagtcaataacagcagcagtgataatgctcagaactttagttttcaaacaaactctggatttgctgctgcctcttctggaagccttggtggtttgggagtcccccagcattgggagctgcagcctctaccagttcaaggtatctctaattctggtc

SEQ ID NO: 64950 - DNA, 657 bp, Homo Sapiens
ttttcaccctgtacccgctgtacttttatatagtttatctattgggaagtgcatgcaacacttgaaagaaagtgttccactggctttaccaaactgaatagccccttatatcatggaaagagccctggactaggagtgggaaaacctttggttcaaggcccaggtctggcccttaggcaggtcacttcacctcttttagtctgtttctgcatctggcaaatgggaatattaataatccctatcctgtaccttatactcctgtgagaataaaatgtggcagcatatttgaaagcacattagaagatgcgatataaaggtgtaattattattttctctgcagaatcagaaggaccctggtgtccttgaccgcatgatgaagaaactggacaccaacagtgatggtcagctagatttctcagaatttcttaatctgattggtggcctagctatggcttgccatgactccttcctcaaggctgtcccttcccagaagcggacctgaggaccccttggccctggccttcaaacccaccccctttccttccagcctttctgtcatcatctccacagcccacccatcccctgagcacactaaccacctcatgcaggccccacctgccaatagtaataaagcaatgtcacttttttaaaacaaaa

SEQ ID NO: 64951 - DNA, 751 bp, Homo Sapiens
taagcaaagcctttttcatatttgaaaatgtggaaagaaaagatgttcctaaaaggttagatattttgagctaataattgcaaaaattagaagactgaaaatggacccatgagagtatatttttatgagggagcaaaagttagactgagaacaaacgttagaaaatcacttcagattgtgtttgaaaattatatactgagcatactaatttaaaaagagaacttgttgaaatttaaaacgtgtttctaggttgaccttgtgttttagaaatttgcacttaatggaatttgcatttcagagatgtgttagtgttgtgctttgccttcttcggggatgaatgtcagaaattgaatgccacatgctttcaaccagatggaccgcatttaaatgcatgcattttatcttgaaactgggatattctaatggggatttcttctttgtatttcagctagcttctaggttagttggtctatctacttttatttgaatgaggaaaccctgtgtatcagttagaatcttcgtgctttttctgaggagattgtgtttaatggattattagccagtttaggctcagtgaacaaactgatctagctctgaatgtatgtttcctgacgttttacatttccactttcctattccattcattaagctagccaacaatccaccatcctttaaagattgttctcataactgaacaaaaaccacataatctaaacagagcaaagctacaagaaataaatttatttaaacg

SEQ ID NO: 64952 - DNA, 497 bp, Homo Sapiens
agtgtgcaggccctgaagcgctcagcccgagaactcatagaaggcagtcgggatgactcctcctgggtcaaggtccagatgcaggaattaagcacacgctgggagaccgtgtgtgcactttctttatcagagcaaacacggttagaagcagccctgcgtcaggcagaggaattccactcggtggtacatgccctcttggagtggctggctgaggcggagcaaaccctgcgtttccatggtgtcctcccagatgatgaggatgctctccggactctcattgatcagcataaagaattcatgaagaaactggaagaaaagagagctgaactaaataaagccaccactatgggcgacaccgttttggctatctgccaccccgactccatcactaccattaagcactggataacaatcatccgggcgaggtttgaggaggtgctggcctgggcaaagcaacatcagcagagattagcaagtgctctggctgggcttattgc

SEQ ID NO: 64953 - DNA, 385 bp, Homo Sapiens
cccggaacggccaatttcaggaagttggttgcctgctctcagacccgatgaatttctcttgctggggccagaggttacctgaaaacaagcctttgtgtgctggggcctggggacgaagcgcctctggagagaaaagacccctctgaagacaaggaggacattgaaagcaacctgctccggcccacaggcgtagccctgcgaggagcccacttctgcctgaaggtcttacacgggccgaggacttgccgcagagtgcgtgggtggacgatgccgtgatggacaacgtgaaacagatctttggcttcgagagtaacaagaagaacttggtggacccctttgtggaggtcagcttgcgggtttacatcctgggcagcaagatcgagga

SEQ ID NO: 64954 - DNA, 683 bp, Homo Sapiens
tgcaaccttgggcttactcctctacccttctcctgcagtggagcggaaggagtggatgcaggccctgcagcaggccatggctgagcagcgtgcccgggcccggctctctagcgcttatctgctgggagttccaggctcagagcagcctgaccgcgctggcagcctggagcttcgtggcttcaagaataagctgtacgtggccgtggtcggggacaaagtgcagctctacaagaatctagaggtgctaaggggtcatggaacctctcccctgcccatgtccacctaccctgccccaggctgacctagggccttagccctgccttttctgttccctcttttcctgtactgggcccagccctttgcctggatatgtcctcgctcccccaagttctgaccacttcccccaggctctgagcactgccctccagtccctgccctggcccttgctcccccgcacctctgttcattgctgtgtgggccctgaacctgcagccccttaccctgcccagcctcccatgtcccctgctgtctccctcctgggcaccccccccagtccctgagttgcaccaccttcccttcctctccctgtcccaagcctcacgcactgaccacaaagccttgccctcatcccgtcccatctgccctccaggagtaccagctgggcattggcatcaccttcatcg

SEQ ID NO: 64955 - DNA, 439 bp, Homo Sapiens
cccgctggcccaatggcaaatgctttgctagtttccttccagttaatttcacctatgaatagatgtgtgaaaactgttcaaagccatacctgcacatgtttgaacttcaaatcctgtgggtgattcagtggcatctttctctaacccccagcgctcccttcccacagaggccaccgtcatggccagttgctgcagtttctttccagagaacctgtgtatgtgtaaagctgtacaggcgtgggtacaccacacagcctgtcttgcactgtggactgttgagttactagtacatctgggtaagcaccgcatatctgtagttcatgtctgccttggtcttttcaacatctgtgtggtagccgtgtttgaattacccatgtcccttgtttggggaaccattatagttgtttcagcaatttgttactgtagatataggatatac

SEQ ID NO: 64956 - DNA, 296 bp, Homo Sapiens
gacttggttgtaactgagtttagttaaaactgaagtctttcagagtcttcctacagatgtacaattaacagcttctctcatttttctgactcggtgatcccaagaaggcctatactgggtcagttcataccatagtgcacacctcagttgtatagaatccaaggactattctcccatcagcatcggtattcagcatctatgtctttagatcccctgatggcgtattattgactcttttttctagagaccatttgaggcacacctgtaaacggataatgacatggcaggaaggacca

SEQ ID NO: 64957 - DNA, 310 bp, Homo Sapiens
gctctgccatgtggcgacgaaggaggcgggacggcttttacccagccccggacttccgagtacagggaagctgaggacatggcaggagtgtttgacatagacctggaccagccagaggacgcgggctctgaggatgagctggaggaggggggtcagttaaatgaaagcatggaccatgggggagttggaccatatgaacttggcatggaacattgtgagaaactttgaaatctcagaaactagtgtgaacagagggccagaaaaaatcagaccagaatgttttgagctacttcgggtacatgggcaggag

SEQ ID NO: 64958 - DNA, 383 bp, Homo Sapiens
agcctcagtcctgggtctccccaagcagtcattagcatcaccttgactgattttccagggtacacttcaaccaccccttacctctgagctccagccccgagacactgccttctctctgcgtttgttgatctctgtgcagcaggtgcccacatcctcatcccagcttactgccgtctcaccaccttcaggttgtgaggtgcccataaactctgctgttaccattgccacttccctgtcttagcagctgtccctttcagtctgccctccatctagtggccatgaagggggctgtgaccgtggtccaggtgagaaaggaaggcctgaactaagatgggaggtgggtggccggaatggagaggggagaagtggatggccagaatgga

SEQ ID NO: 64959 - DNA, 393 bp, Homo Sapiens
gtgactctacaggatttgatcacgtgcattgtgaagaagcgggtagagttcactgtggagaccagaggtgctggccagggagaggtgctggtgtacgtggaggacccggccggacaccaggaggaggcaaaagtgaccgccaataacgacaagaaccgcaccttctccgtctggtacgtccccgagttgacggggactcataaggttactgtgctctttgctggccagcacatcgccaagagccccttcgaggtgtacgtggataagtcacagggtgacgccagcaaaagtgacagcccaaggtcccggcctggagcccagtggcaacatcgccaacaagaccacctactttgagatctccacggcaggagctggcacgcgcgagctcgaggc

SEQ ID NO: 64960 - DNA, 414 bp, Homo Sapiens
agcgaagtggcagggctgggtgtggacgaggaagaagatgctggcgcagcctgggctggctggggaggtgaggccagagggaggatggagcccagagagggaatgtgggtgatgaggttgggccaggcccctagaccccaagccccagaggcccactccagtgccccccacaggatctggagagctgctggagaacaccatggaggccatggagaagtgagtgtatctgccccttcccaggctgccatgtgagggtgtgcaggtcgtggactgcatcacagcaagggacgccattcacttcctagctgggtgactggcgcccctggaggtggcctgcacatcccgccacgaactccgctctcacattcccggccacctcgccaccatgcccctcatcccagtcccgcccgcgtc

SEQ ID NO: 64961 - DNA, 181 bp, Homo Sapiens
gtgccaggaaatcacggtgcccatgtgccgcggcatcgggtacaacctgacgcacatgcccaaccagttcaaccacgacacgcaggacgaggcgggcctggaggtgcaccagttctggccgctggtggagatccaatgctcgccggacctgcgcttcttcctatgctctatgtacacagcc

SEQ ID NO: 64962 - DNA, 452 bp, Homo Sapiens
gtcacgttcccatgaatccttgctgagcccatgcagcacagtggaatgtctggatcttggtagaggggaacctgtatcagtgaaaccacttcatagtagcatccttggacaagacttctgctttgaggttacctacttaagtggaagtaaatgcttcagctgtaattctgcttctgagagagacaagtggatggaaaaccttcgcaggacagttcaacctaataaggacaattgcaggctgagctgaaaatgttcttcgtttatggatcattgaagccaaggaccttgcccctaaaaagaaatatttctgcgaactgtgccttgatgataccctctttgctcgtacaaccagcaagaccaaagcagacaatattttctggggcgaacattttgaattcttcagccttccacctcttcatagtatcacagttcacatttacaagtgatgtgtg

SEQ ID NO: 64963 - DNA, 1005 bp, Homo Sapiens
tttattgatacaaagtagctaataaacttttttgtttttagggaatgtggtgagcaacttgggacattccttcttcagtcaaagtttccttggcagtaaagaacatggtggattcttatatgtgacatctacctaccagtcactgcaagacctagtactcccaaccccaccttacttgtttgggattcttatccagaaatgggaaactccttgggctaaagtatttcctatccgtctgatgttgagacttggagctgaatatcgacgtaagtagtaaaaacacgtttttcaaggcatgatgactaaaataatgcctgaaatattcagagccctctgtttggtgatataattcagcagaaatagtcttttgaaatagctaaactaaatttggccagtgtctgcgtgtattgggcataatgggaagcactgaaaataacgaatgaggaagttgattatgtattaccttgtaaacttactgcttttatagttcattgataaaaaacacgatcatctttagaaaagtgaatttgaacttaagtaactttattttttatagtttctgtatatgatgagcatattctttgtcacttggttggaaaacagttacgatcaattatattttacttaacatactggaagctagtggaatggaaaccactctcagttggtaagatacaggctacagaagaaggagcttccttgctcatggctttagcagcgtaactaagatgtgatttttaaaaagacattaatggttaaatgcaaactttattttaaattttatatctccatctaattaaaagtgccctgtgctaggaatccgaccacttgagtaagattctcaactctgccacttatgagctctgtaactttgggcaagtcacccaagttctctgattgtgtttcttttgtaaactggaaataataatgcttgccttctattttatattgggttgttaacaggatcaaatgagagaataaatgaaacataattttataaaccat

SEQ ID NO: 64964 - DNA, 460 bp, Homo Sapiens
  misc_feature (67)..(126): n is a, c, g, or t
cccccggcccctgccgccggctgtgcggtggacacagcggccctgaagcagcctccggcgccccctnnnnnnnnnnnnnnnnnnnnnnnnnnnnnnnnnnnnnnnnnnnnnnnnnnnnnnnnnnnnactatcgccgcggcggcggccaccgccgtcgtagccccaacctcgacggtcgccgtggccccggtcgcgtctgccttggagaagaagacaaagagcaaggggccctacatctgcgctctgtgcgccaaggagttcaagaacggctacaatctccggaggcacgaagccatccacacgggagccaaggccggccgggtcccctcgggtgctatgaagatgccgaccatggtgcccctgagcctcctgagcgtgccccagctgagcggagccggcgggggagggggagaggcgggtgccggcggcggcgctgccgcagtggccgccggtggcgtgg

SEQ ID NO: 64965 - DNA, 995 bp, Homo Sapiens
tgcggccgccagctagttgagcgcaccccccgcccgccccagcggcgccgcggcgggcggcgtccaggcggcatggagaaggacggcctgtgccgcgctgaccagcagtacgaatgcgtggcggagatccggggagggcgcctatgggaaggtgttcaaggccagcgacttgaagaacggaggccgtttcgtggcgttgaagcgcgtgcgggtgcagaccggcgaggagggcatgccgctctccaccatccgcgaggtggcggtgctgaggcacctggagaccttcgagcaccccaacgtggtcaggttgtttgatgtgtgcacagtgtcacgaacagacagagaaaccaaactaactttagtgtttgaacatgtcgatcaagacttgaccacttacttggataaagttccagagcctggagtgcccactgaaaccataaaggatatgatgtttcagcttctccgaggtctggactttcttcattcacaccgagtagtgcatcgcgatctaaaaccacagaacattctggtgaccagcagcggacaaataaaactcgctgacttcggccttgcccgcatctatagtttccagatggctctaacctcagtggtcgtcacgctgtggtacagagcacccgaagtcttgctccagtccagctacgccacccccgtggatctctggagtgttggctgcatatttgcagaaatgtttcgtagaaagtaagaaatacattttgtttcactctgctttccttgaaaagagactgtggatctttgtgaatttgagtggcagcatggcatttctatcattaggggtcatgatggccagatccatctaccccaggctaccacttgcaagcctgtcctgaaaccgccttctcagtgcttacagtgttgttttatatgactgtagcttgcagcttctggaaactctgcctgggaaggaataccccactgtttataggttacattgttttactggtgatgatagggta

SEQ ID NO: 64966 - DNA, 134 bp, Homo Sapiens
agaagactttggtggggtagtctcggggcagctcagcggcccgctgtgcccgtttctggcctcgctcgcagcttgcacgtcgagactcgtaggccgcaccgtagggcgagcgtgcgggtcgccgccgcggccgc

SEQ ID NO: 64967 - DNA, 278 bp, Homo Sapiens
gcagggaaagaaaagtgcaatgattctggactgagacgcgcttgggcagaggctatgtaatcgtgtctgtgttgaggacttcgcttcgaggagggaagaggagggatcggctcgctcctccggcggcgccggcggcggcgactctgcaggcgaagtttcgcggcggcggcaccagggttacgccagccccgcggggaggtctctccatccagcttctgcagcggcgaaagccccagcgcccgagcgcctgagccggcggggagcaagtaaagctagac

SEQ ID NO: 64968 - DNA, 444 bp, Homo Sapiens
cggggtgacaacaggagcccccggggccttttcccttcgccaggacccgacacaccaggcttcgctcgctcgcgcacccctccgccgcgtagccatccgccagcgcgggcgcccgccatccgccgcctacttacgcttcacctctgccgacccggcgcgctcggctgcgggcggcggcgcctccttcggctcctcctcggaatagctcgcggcctgtagcccctggcaggagggcccctcagccccccggtgtggacaggcagcggcggctggcgacgaacgccgggatttcggcggccccggcgctccctttcccggcctcgttttccggataaggaagcgcgggtcccgcatgagccccggcggtggcggcagcgaaagagaacgaggcggtggcgggcggaggcggcgggcgagggcgactacgaccagtgaggcggccgc

SEQ ID NO: 64969 - DNA, 497 bp, Homo Sapiens
ccaaagcgtcaggggcttggggcacagccccagtcagctcaacccagtcctgcttcagagccaagactaatcagtgggcacaccaagggccctgaggggcagggagatgccaccatgcttctctgtcaccgtaagaaggctgaccagccacgcccacctcctctgtctgactgagttccttcctgtggccacagggaggggctggtccttccccttggtgctggctctctgtcacaatgcctcaaaagacatggaacccaggcctacaaccgtcacaactgctaattcttttcctttcattttgctttctgaaagcagtttgttatactattcataacattgtagagtttaatttcatgtcattttggatcttatataaaaatgtgaggatttggatttttaaaaagaatgactccatatttaggtagccacttttgatgttaatatatagtgagtccaatgtatgctttagaagtaaagacattgaccgtcacaaa

SEQ ID NO: 64970 - DNA, 431 bp, Homo Sapiens
agtgtatttttcgtggttggatcaaaaagacttgagtttttaatttaatttattccctgccgttgtagcggggcggggtccctgtgccctggcctgggggaggggaacgcggaacatggggtcgggaacacagccgctcccctctgctctgcaccccactcgtgggggaacacagccgctcccctctgctctgcaccccactcgtgggggaacacagccgctcccctctgctctgcaccccactcgtgggggaacacagccgctcccctctgctctgcaccccactcgtgggggaacacatgctgcagcccacctgcggaccccccttggtgctccatggttggcgtgaagtctgagcctggaagggggtacgttggttgggcgccccctcaattgtaggctggggaggagggtaccgaagctcgaaattc

SEQ ID NO: 64971 - DNA, 485 bp, Homo Sapiens
ttttattttttgacagactgcgacctccttgaggatggaatcggtattttggttaaatttatttctgcatgggccttgcacataaaaaacgtttattgaacaaacgaatcctgtatgttcctccccccaggcaggaaacgctccctgggagggagggtagtctattggtgagctaggacgtttggactcagggttccgaggaaccaggagcgatccttagtgggccgagacttccgaatttgatcaaaggtaaagagggactggagagcggtccatctgacttctgtgggggatgggcaggagtcaggggcggacgcctgaatcttgtttctcagaagagccgagaggcctaggctcaagcttggggcgatccggtacttggaggttcgaagctcctagtttcgggttgagaccgatgtggagggcgatgacgcgcgggttccttgacatcgaggatcagtaacacccggagtgggtggggaaca

SEQ ID NO: 64972 - DNA, 514 bp, Homo Sapiens
  misc_feature (437)..(449): n is a, c, g, or t
aattgcttttgggatcactccacatctttgtttatttcttgactaatcagattttcaatagagtgaagttaaattgggggtcataaaagcattggattgacatatggtttgccagcctatgggtttacaggcattgcccaaacatttctttgagatctatatttataagcagccatggaattcctattatgggatgttggcaatcttacattttatagaggtcatatgcatagttttcataggtgttttgtaagaactgattgctctcctgtgagttaagctatgtttactactgggaccctcaagaggaataccacttatgttacactcctgcactaaaggcacgtactgcagtgtgaagaaatgttctgaaaaagggttatagaaatctggaaataagaaaggaagagctctctgtattctataattggaagagnnnnnnnnnnnnncttttaactggaaatgttagtttgtacttattgatcatgaatacaagtatatatttaattttgca

SEQ ID NO: 64973 - DNA, 723 bp, Homo Sapiens
gcggccgcactggccagcagcccctccgagggctggcttctgaccaaggccaagcaccagcgtggccgaggcgagcttgccagcgaggtgctggctgtgctaaaggtggacaaccgtgttgtggggcagacgggctgggggcaggtggccgaacagtcctgggaccagacctttgtcattccactggagcgagcccgtgagctggagattggggtacactggcgggactggcggcagctatgtggcgtggccttcctgagacttgaggacttcctggacaatgcctgtcaccaactgtccctcagcctggtaccgcagggactgctttttgcccaggtgaccttctgcgatcctgtcattgagaggcggccccggctgcagaggcaggaacgcatcttctctaaacgcagaggccaggacttcctgagggcttcgcagatgaacctcggcatggcggcctgggggcgcctcgtcatgaacctgctgtcctcctgcaggttcctgagcacaatcagctcccctaaatgatgcccttggaccccaacaacactgctagaggcctctgaccctgacactcccagtaatatgctgcccaagaagacccccttgggtgaagagatgacacctccacacaagccctcacgcatgtacctaccccaggagccaacatcctatgatactccgtgcaccaaatgtacacatattgagcctaggactcgacgt

SEQ ID NO: 64974 - DNA, 475 bp, Homo Sapiens
gcggccgcgtgggcgtcttccccagcaactacgtggcccccggcgcccccgctgcacccgcgggcctccagctgccccaggagatccccttccacgagctgcagctagaggagatcatcggtgtggggggctttggcaaggtctatcgggccctgtggcgtggcgaggaggtggcagtcaaggccgcccggctggaccctgagaaggacccggcagtgacagcggagcaggtgtgccaggaagcccggctctttggagccctgcagcaccccaacataattgcccttaggggcgcctgcctcaaccccccacacctctgcctagtgatggagtatgcccggggtggtgcactgagcagggtgctggcaggtcgccgggtgccacctcacgtgctggtcaactgggctgtgcatgtggcccggggcatgaactacctacacaatgatgggtacaggggggtgcactgttctctgct

SEQ ID NO: 64975 - DNA, 340 bp, Homo Sapiens
cagggctggcaggccaggctcgctgggctcctaatctttttttaatttccaatttttgattgggccgtgggtccccgctgagctccggctgcgcgcgggggcgggagggcgcgcgcaggggagggaccgagagacgcgccgactttttagagggagggatcgggtggacaactggtcccgcggcgctcgcagagccggaaagaagtgctgtaagggacgctcgggggacgctgttcctgaggtgtcgccgcctccctgtcctcgccctccgcggtgggggagaaacccaggagcgaagcccagagcccgcggcgcggccggcggacgaacgagcgcgcag

SEQ ID NO: 64976 - DNA, 439 bp, Homo Sapiens
  misc_feature (428)..(428): n is a, c, g, or t
acctgggaggcctcttcccaccctggcccctggtagaagagcgcaagctgaagcccaaggcctctcagcagtgccccatctgccacaaagtcatcatgggggccgggaagctgccgcggcacatgaggacccataccggggagaagccatacatgtgcaccatctgcgaggtccgcttcaccaggcaggacaagctgaaaatccacatgcggaagcacacaggggagcggccctacctgtgcatccactgcaacgccaagttcgtgcacaactacgacctcaagaaccacatgcgcatccacacgggcgtgcggccctaccagtgcgagttctgctacaagagcttcacgcgctctgaccacctgcaccgccacatcaagcgccagagctgccgcatggcacggccccgacgcggcccgcaagcttanttccgtttagt

SEQ ID NO: 64977 - DNA, 243 bp, Homo Sapiens
ttgaaggagaagtttaagattctgttgggactgggaacaccgaggccaaatcccaggtctgcagagggtaaacagacggagtttatcatcaccgcggaaatactgagagaactgagcatggaatgtggcctcaacaatcgcatccggatgatagggcagatttgtgaagtcgcaaaaaccaagaaatttgccgagcacgcagtggaagctctctgaccggcggtcgcggatctgttgcagccg

SEQ ID NO: 64978 - DNA, 606 bp, Homo Sapiens; identical to SEQ ID NO: 15428

SEQ ID NO: 64979 - DNA, 1319 bp, Homo Sapiens; identical to SEQ ID NO: 15433

SEQ ID NO: 64980 - DNA, 996 bp, Homo Sapiens; identical to SEQ ID NO: 15437

SEQ ID NO: 64981 - DNA, 358 bp, Homo Sapiens; identical to SEQ ID NO: 15444

SEQ ID NO: 64982 - DNA, 454 bp, Homo Sapiens; identical to SEQ ID NO: 15453

SEQ ID NO: 64983 - DNA, 917 bp, Homo Sapiens; identical to SEQ ID NO: 15454
  misc_feature (658)..(658): n is a, c, g, or t
  misc_feature (697)..(697): n is a, c, g, or t
  misc_feature (706)..(706): n is a, c, g, or t
  misc_feature (711)..(711): n is a, c, g, or t
  misc_feature (725)..(725): n is a, c, g, or t
  misc_feature (730)..(730): n is a, c, g, or t
  misc_feature (733)..(733): n is a, c, g, or t
  misc_feature (760)..(760): n is a, c, g, or t
  misc_feature (763)..(763): n is a, c, g, or t
  misc_feature (772)..(772): n is a, c, g, or t
  misc_feature (781)..(781): n is a, c, g, or t
  misc_feature (784)..(784): n is a, c, g, or t
  misc_feature (787)..(787): n is a, c, g, or t
  misc_feature (791)..(791): n is a, c, g, or t
  misc_feature (815)..(816): n is a, c, g, or t
  misc_feature (823)..(823): n is a, c, g, or t
  misc_feature (832)..(832): n is a, c, g, or t
  misc_feature (840)..(840): n is a, c, g, or t
  misc_feature (876)..(876): n is a, c, g, or t

SEQ ID NO: 64984 - DNA, 650 bp, Homo Sapiens; identical to SEQ ID NO: 15466

SEQ ID NO: 64985 - DNA, 389 bp, Homo Sapiens; identical to SEQ ID NO: 15469

SEQ ID NO: 64986 - DNA, 428 bp, Homo Sapiens; identical to SEQ ID NO: 15471

SEQ ID NO: 64987 - DNA, 844 bp, Homo Sapiens; identical to SEQ ID NO: 15472
  misc_feature (699)..(708): n is a, c, g, or t

SEQ ID NO: 64988 - DNA, 606 bp, Homo Sapiens; identical to SEQ ID NO: 15473

SEQ ID NO: 64989 - DNA, 490 bp, Homo Sapiens; identical to SEQ ID NO: 15477
  misc_feature (337)..(345): n is a, c, g, or t

SEQ ID NO: 64990 - DNA, 1341 bp, Homo Sapiens; identical to SEQ ID NO: 15488

SEQ ID NO: 64991 - DNA, 1192 bp, Homo Sapiens; identical to SEQ ID NO: 15493

SEQ ID NO: 64992 - DNA, 1862 bp, Homo Sapiens; identical to SEQ ID NO: 15501
  misc_feature (68)..(68): n is a, c, g, or t
  misc_feature (72)..(72): n is a, c, g, or t
  misc_feature (126)..(126): n is a, c, g, or t
  misc_feature (158)..(158): n is a, c, g, or t

SEQ ID NO: 64993 - DNA, 835 bp, Homo Sapiens; identical to SEQ ID NO: 15507
  misc_feature (91)..(91): n is a, c, g, or t

SEQ ID NO: 64994 - DNA, 1433 bp, Homo Sapiens; identical to SEQ ID NO: 15525
  misc_feature (45)..(45): n is a, c, g, or t
  misc_feature (58)..(58): n is a, c, g, or t
  misc_feature (109)..(109): n is a, c, g, or t
  misc_feature (135)..(135): n is a, c, g, or t
  misc_feature (178)..(178): n is a, c, g, or t
  misc_feature (185)..(185): n is a, c, g, or t
  misc_feature (201)..(201): n is a, c, g, or t
  misc_feature (253)..(253): n is a, c, g, or t
  misc_feature (263)..(263): n is a, c, g, or t

SEQ ID NO: 64995 - DNA, 933 bp, Homo Sapiens; identical to SEQ ID NO: 15527
  misc_feature (155)..(155): n is a, c, g, or t
  misc_feature (255)..(282): n is a, c, g, or t
  misc_feature (525)..(540): n is a, c, g, or t

SEQ ID NO: 64996 - DNA, 923 bp, Homo Sapiens; identical to SEQ ID NO: 15529
  misc_feature (111)..(111): n is a, c, g, or t
  misc_feature (114)..(115): n is a, c, g, or t
  misc_feature (121)..(121): n is a, c, g, or t
  misc_feature (125)..(125): n is a, c, g, or t
  misc_feature (138)..(139): n is a, c, g, or t
  misc_feature (145)..(146): n is a, c, g, or t
  misc_feature (155)..(155): n is a, c, g, or t
  misc_feature (217)..(264): n is a, c, g, or t

SEQ ID NO: 64997 - DNA, 1578 bp, Homo Sapiens; identical to SEQ ID NO: 15530

SEQ ID NO: 64998 - DNA, 459 bp, Homo Sapiens; identical to SEQ ID NO: 15538
  misc_feature (306)..(355): n is a, c, g, or t
  misc_feature (424)..(424): n is a, c, g, or t
  misc_feature (430)..(430): n is a, c, g, or t

SEQ ID NO: 64999 - DNA, 803 bp, Homo Sapiens; identical to SEQ ID NO: 15549
  misc_feature (87)..(87): n is a, c, g, or t

SEQ ID NO: 65000 - DNA, 1406 bp, Homo Sapiens; identical to SEQ ID NO: 15551

SEQ ID NO: 65001 - DNA, 1037 bp, Homo Sapiens; identical to SEQ ID NO: 15555

SEQ ID NO: 65002 - DNA, 625 bp, Homo Sapiens; identical to SEQ ID NO: 15559
  misc_feature (514)..(514): n is a, c, g, or t
  misc_feature (570)..(570): n is a, c, g, or t
  misc_feature (583)..(583): n is a, c, g, or t
  misc_feature (587)..(587): n is a, c, g, or t
  misc_feature (597)..(597): n is a, c, g, or t
  misc_feature (612)..(612): n is a, c, g, or t

SEQ ID NO: 65003 - DNA, 1307 bp, Homo Sapiens; identical to SEQ ID NO: 15562

SEQ ID NO: 65004 - DNA, 1110 bp, Homo Sapiens; identical to SEQ ID NO: 15581
  misc_feature (247)..(484): n is a, c, g, or t
  misc_feature (506)..(530): n is a, c, g, or t

SEQ ID NO: 65005 - DNA, 921 bp, Homo Sapiens; identical to SEQ ID NO: 15586

SEQ ID NO: 65006 - DNA, 660 bp, Homo Sapiens; identical to SEQ ID NO: 15590

SEQ ID NO: 65007 - DNA, 1241 bp, Homo Sapiens; identical to SEQ ID NO: 15591
  misc_feature (251)..(251): n is a, c, g, or t
  misc_feature (333)..(333): n is a, c, g, or t

SEQ ID NO: 65008 - DNA, 961 bp, Homo Sapiens; identical to SEQ ID NO: 15597

SEQ ID NO: 65009 - DNA, 1272 bp, Homo Sapiens; identical to SEQ ID NO: 15604
  misc_feature (458)..(458): n is a, c, g, or t
  misc_feature (509)..(534): n is a, c, g, or t
  misc_feature (536)..(536): n is a, c, g, or t
  misc_feature (837)..(851): n is a, c, g, or t
  misc_feature (1046)..(1087): n is a, c, g, or t

SEQ ID NO: 65010 - DNA, 912 bp, Homo Sapiens; identical to SEQ ID NO: 15605
  misc_feature (55)..(112): n is a, c, g, or t
  misc_feature (135)..(135): n is a, c, g, or t

SEQ ID NO: 65011 - DNA, 918 bp, Homo Sapiens; identical to SEQ ID NO: 15609

SEQ ID NO: 65012 - DNA, 419 bp, Homo Sapiens; identical to SEQ ID NO: 15620
  misc_feature (356)..(365): n is a, c, g, or t

SEQ ID NO: 65013 - DNA, 1571 bp, Homo Sapiens; identical to SEQ ID NO: 15633

SEQ ID NO: 65014 - DNA, 709 bp, Homo Sapiens; identical to SEQ ID NO: 15635

SEQ ID NO: 65015 - DNA, 502 bp, Homo Sapiens; identical to SEQ ID NO: 15643

SEQ ID NO: 65016 - DNA, 1182 bp, Homo Sapiens; identical to SEQ ID NO: 15644

SEQ ID NO: 65017 - DNA, 794 bp, Homo Sapiens; identical to SEQ ID NO: 15653

SEQ ID NO: 65018 - DNA, 492 bp, Homo Sapiens; identical to SEQ ID NO: 15654
  misc_feature (452)..(452): n is a, c, g, or t

SEQ ID NO: 65019 - DNA, 690 bp, Homo Sapiens; identical to SEQ ID NO: 15669
  misc_feature (13)..(13): n is a, c, g, or t
  misc_feature (71)..(71): n is a, c, g, or t

SEQ ID NO: 65020 - DNA, 458 bp, Homo Sapiens; identical to SEQ ID NO: 15683
  misc_feature (222)..(253): n is a, c, g, or t
  misc_feature (316)..(316): n is a, c, g, or t

SEQ ID NO: 65021 - DNA, 590 bp, Homo Sapiens; identical to SEQ ID NO: 15690
  misc_feature (552)..(552): n is a, c, g, or t

SEQ ID NO: 65022 - DNA, 1839 bp, Homo Sapiens; identical to SEQ ID NO: 15697
  misc_feature (577)..(589): n is a, c, g, or t

SEQ ID NO: 65023 - DNA, 581 bp, Homo Sapiens; identical to SEQ ID NO: 15731

SEQ ID NO: 65024 - DNA, 705 bp, Homo Sapiens; identical to SEQ ID NO: 15741

SEQ ID NO: 65025 - DNA, 441 bp, Homo Sapiens; identical to SEQ ID NO: 15749
  misc_feature (332)..(332): n is a, c, g, or t
  misc_feature (396)..(396): n is a, c, g, or t
  misc_feature (422)..(422): n is a, c, g, or t

SEQ ID NO: 65026 - DNA, 1089 bp, Homo Sapiens; identical to SEQ ID NO: 15751

SEQ ID NO: 65027 - DNA, 463 bp, Homo Sapiens; identical to SEQ ID NO: 15753
  misc_feature (220)..(270): n is a, c, g, or t

SEQ ID NO: 65028 - DNA, 1617 bp, Homo Sapiens; identical to SEQ ID NO: 15756
  misc_feature (1541)..(1541): n is a, c, g, or t
  misc_feature (1569)..(1569): n is a, c, g, or t
  misc_feature (1579)..(1579): n is a, c, g, or t

SEQ ID NO: 65029 - DNA, 1374 bp, Homo Sapiens; identical to SEQ ID NO: 15767

SEQ ID NO: 65030 - DNA, 530 bp, Homo Sapiens; identical to SEQ ID NO: 15781

SEQ ID NO: 65031 - DNA, 586 bp, Homo Sapiens; identical to SEQ ID NO: 15787

SEQ ID NO: 65032 - DNA, 1521 bp, Homo Sapiens; identical to SEQ ID NO: 15791
  misc_feature (54)..(54): n is a, c, g, or t
  misc_feature (61)..(61): n is a, c, g, or t

SEQ ID NO: 65033 - DNA, 373 bp, Homo Sapiens; identical to SEQ ID NO: 15798
  misc_feature (99)..(99): n is a, c, g, or t

SEQ ID NO: 65034 - DNA, 473 bp, Homo Sapiens; identical to SEQ ID NO: 15800

SEQ ID NO: 65035 - DNA, 1260 bp, Homo Sapiens; identical to SEQ ID NO: 15802
  misc_feature (710)..(860): n is a, c, g, or t
  misc_feature (869)..(882): n is a, c, g, or t
  misc_feature (896)..(1019): n is a, c, g, or t
  misc_feature (1024)..(1086): n is a, c, g, or t
  misc_feature (1103)..(1111): n is a, c, g, or t

SEQ ID NO: 65036 - DNA, 1089 bp, Homo Sapiens; identical to SEQ ID NO: 15813
  misc_feature (972)..(1027): n is a, c, g, or t

SEQ ID NO: 65037 - DNA, 563 bp, Homo Sapiens; identical to SEQ ID NO: 15815

SEQ ID NO: 65038 - DNA, 591 bp, Homo Sapiens; identical to SEQ ID NO: 15816

SEQ ID NO: 65039 - DNA, 873 bp, Homo Sapiens; identical to SEQ ID NO: 15819

SEQ ID NO: 65040 - DNA, 603 bp, Homo Sapiens; identical to SEQ ID NO: 15820

SEQ ID NO: 65041 - DNA, 363 bp, Homo Sapiens; identical to SEQ ID NO: 15822

SEQ ID NO: 65042 - DNA, 502 bp, Homo Sapiens; identical to SEQ ID NO: 15845

SEQ ID NO: 65043 - DNA, 857 bp, Homo Sapiens; identical to SEQ ID NO: 15852

SEQ ID NO: 65044 - DNA, 434 bp, Homo Sapiens; identical to SEQ ID NO: 15853

SEQ ID NO: 65045 - DNA, 457 bp, Homo Sapiens; identical to SEQ ID NO: 15857

SEQ ID NO: 65046 - DNA, 429 bp, Homo Sapiens; identical to SEQ ID NO: 15865
  misc_feature (46)..(89): n is a, c, g, or t

SEQ ID NO: 65047 - DNA, 772 bp, Homo Sapiens; identical to SEQ ID NO: 15866

SEQ ID NO: 65048 - DNA, 874 bp, Homo Sapiens; identical to SEQ ID NO: 15871
  misc_feature (789)..(805): n is a, c, g, or t

SEQ ID NO: 65049 - DNA, 587 bp, Homo Sapiens; identical to SEQ ID NO: 15886

SEQ ID NO: 65050 - DNA, 427 bp, Homo Sapiens; identical to SEQ ID NO: 15891

SEQ ID NO: 65051 - DNA, 842 bp, Homo Sapiens; identical to SEQ ID NO: 15909
  misc_feature (597)..(597): n is a, c, g, or t
  misc_feature (600)..(600): n is a, c, g, or t
  misc_feature (604)..(604): n is a, c, g, or t

SEQ ID NO: 65052 - DNA, 1135 bp, Homo Sapiens; identical to SEQ ID NO: 15912

SEQ ID NO: 65053 - DNA, 1198 bp, Homo Sapiens; identical to SEQ ID NO: 15933

SEQ ID NO: 65054 - DNA, 505 bp, Homo Sapiens; identical to SEQ ID NO: 15936
  misc_feature (402)..(402): n is a, c, g, or t
  misc_feature (426)..(426): n is a, c, g, or t
  misc_feature (445)..(445): n is a, c, g, or t

SEQ ID NO: 65055 - DNA, 441 bp, Homo Sapiens; identical to SEQ ID NO: 15940

SEQ ID NO: 65056 - DNA, 637 bp, Homo Sapiens; identical to SEQ ID NO: 15955
  misc_feature (170)..(186): n is a, c, g, or t

SEQ ID NO: 65057 - DNA, 813 bp, Homo Sapiens; identical to SEQ ID NO: 15959

SEQ ID NO: 65058 - DNA, 529 bp, Homo Sapiens; identical to SEQ ID NO: 15964

SEQ ID NO: 65059 - DNA, 905 bp, Homo Sapiens; identical to SEQ ID NO: 15972

SEQ ID NO: 65060 - DNA, 802 bp, Homo Sapiens; identical to SEQ ID NO: 15981
  misc_feature (73)..(73): n is a, c, g, or t
  misc_feature (78)..(78): n is a, c, g, or t

SEQ ID NO: 65061 - DNA, 475 bp, Homo Sapiens; identical to SEQ ID NO: 15992

SEQ ID NO: 65062 - DNA, 585 bp, Homo Sapiens; identical to SEQ ID NO: 15993
  misc_feature (152)..(220): n is a, c, g, or t

SEQ ID NO: 65063 - DNA, 824 bp, Homo Sapiens; identical to SEQ ID NO: 16009
  misc_feature (663)..(702): n is a, c, g, or t

SEQ ID NO: 65064 - DNA, 564 bp, Homo Sapiens; identical to SEQ ID NO: 16012

SEQ ID NO: 65065 - DNA, 1377 bp, Homo Sapiens; identical to SEQ ID NO: 16018
  misc_feature (257)..(481): n is a, c, g, or t

SEQ ID NO: 65066 - DNA, 789 bp, Homo Sapiens; identical to SEQ ID NO: 16020
  misc_feature (717)..(717): n is a, c, g, or t

SEQ ID NO: 65067 - DNA, 1442 bp, Homo Sapiens; identical to SEQ ID NO: 16021
  misc_feature (975)..(975): n is a, c, g, or t

SEQ ID NO: 65068 - DNA, 398 bp, Homo Sapiens; identical to SEQ ID NO: 16022

SEQ ID NO: 65069 - DNA, 550 bp, Homo Sapiens; identical to SEQ ID NO: 16042
  misc_feature (405)..(427): n is a, c, g, or t

SEQ ID NO: 65070 - DNA, 574 bp, Homo Sapiens; identical to SEQ ID NO: 16047

SEQ ID NO: 65071 - DNA, 802 bp, Homo Sapiens; identical to SEQ ID NO: 16048

SEQ ID NO: 65072 - DNA, 597 bp, Homo Sapiens; identical to SEQ ID NO: 16050
  misc_feature (36)..(36): n is a, c, g, or t

SEQ ID NO: 65073 - DNA, 1646 bp, Homo Sapiens; identical to SEQ ID NO: 16054
  misc_feature (1050)..(1050): n is a, c, g, or t

SEQ ID NO: 65074 - DNA, 792 bp, Homo Sapiens; identical to SEQ ID NO: 16056

SEQ ID NO: 65075 - DNA, 661 bp, Homo Sapiens; identical to SEQ ID NO: 16057

SEQ ID NO: 65076 - DNA, 908 bp, Homo Sapiens; identical to SEQ ID NO: 16059

SEQ ID NO: 65077 - DNA, 607 bp, Homo Sapiens; identical to SEQ ID NO: 16064

SEQ ID NO: 65078 - DNA, 595 bp, Homo Sapiens; identical to SEQ ID NO: 16074
  misc_feature (558)..(558): n is a, c, g, or t

SEQ ID NO: 65079 - DNA, 621 bp, Homo Sapiens; identical to SEQ ID NO: 16077
  misc_feature (52)..(52): n is a, c, g, or t
  misc_feature (133)..(133): n is a, c, g, or t

SEQ ID NO: 65080 - DNA, 519 bp, Homo Sapiens; identical to SEQ ID NO: 16078
  misc_feature (435)..(443): n is a, c, g, or t

SEQ ID NO: 65081 - DNA, 546 bp, Homo Sapiens; identical to SEQ ID NO: 16085

SEQ ID NO: 65082 - DNA, 637 bp, Homo Sapiens; identical to SEQ ID NO: 16088
  misc_feature (137)..(155): n is a, c, g, or t
  misc_feature (467)..(482): n is a, c, g, or t

SEQ ID NO: 65083 - DNA, 492 bp, Homo Sapiens; identical to SEQ ID NO: 16098

SEQ ID NO: 65084 - DNA, 505 bp, Homo Sapiens; identical to SEQ ID NO: 16104

SEQ ID NO: 65085 - DNA, 533 bp, Homo Sapiens; identical to SEQ ID NO: 16106
  misc_feature (100)..(160): n is a, c, g, or t
  misc_feature (421)..(481): n is a, c, g, or t

SEQ ID NO: 65086 - DNA, 224 bp, Homo Sapiens; identical to SEQ ID NO: 16116

SEQ ID NO: 65087 - DNA, 656 bp, Homo Sapiens; identical to SEQ ID NO: 16126

SEQ ID NO: 65088 - DNA, 1019 bp, Homo Sapiens; identical to SEQ ID NO: 16132

SEQ ID NO: 65089 - DNA, 770 bp, Homo Sapiens; identical to SEQ ID NO: 16135

SEQ ID NO: 65090 - DNA, 477 bp, Homo Sapiens; identical to SEQ ID NO: 16139
  misc_feature (414)..(414): n is a, c, g, or t

SEQ ID NO: 65091 - DNA, 1241 bp, Homo Sapiens; identical to SEQ ID NO: 16143

SEQ ID NO: 65092 - DNA, 2348 bp, Homo Sapiens; identical to SEQ ID NO: 16152

SEQ ID NO: 65093 - DNA, 652 bp, Homo Sapiens; identical to SEQ ID NO: 16153

SEQ ID NO: 65094 - DNA, 694 bp, Homo Sapiens; identical to SEQ ID NO: 16157

SEQ ID NO: 65095 - DNA, 561 bp, Homo Sapiens; identical to SEQ ID NO: 16167

SEQ ID NO: 65096 - DNA, 519 bp, Homo Sapiens; identical to SEQ ID NO: 16174

SEQ ID NO: 65097 - DNA, 706 bp, Homo Sapiens; identical to SEQ ID NO: 16175

SEQ ID NO: 65098 - DNA, 882 bp, Homo Sapiens; identical to SEQ ID NO: 16182

SEQ ID NO: 65099 - DNA, 449 bp, Homo Sapiens; identical to SEQ ID NO: 16183

SEQ ID NO: 65100 - DNA, 317 bp, Homo Sapiens; identical to SEQ ID NO: 16188

SEQ ID NO: 65101 - DNA, 831 bp, Homo Sapiens; identical to SEQ ID NO: 16194

SEQ ID NO: 65102 - DNA, 377 bp, Homo Sapiens; identical to SEQ ID NO: 16195

SEQ ID NO: 65103 - DNA, 553 bp, Homo Sapiens; identical to SEQ ID NO: 16199

SEQ ID NO: 65104 - DNA, 797 bp, Homo Sapiens; identical to SEQ ID NO: 16200

SEQ ID NO: 65105 - DNA, 814 bp, Homo Sapiens; identical to SEQ ID NO: 16201

SEQ ID NO: 65106 - DNA, 786 bp, Homo Sapiens; identical to SEQ ID NO: 16209

SEQ ID NO: 65107 - DNA, 687 bp, Homo Sapiens; identical to SEQ ID NO: 16227

SEQ ID NO: 65108 - DNA, 964 bp, Homo Sapiens; identical to SEQ ID NO: 16229
  misc_feature (840)..(898): n is a, c, g, or t

SEQ ID NO: 65109 - DNA, 812 bp, Homo Sapiens; identical to SEQ ID NO: 16230

SEQ ID NO: 65110 - DNA, 528 bp, Homo Sapiens; identical to SEQ ID NO: 16231
  misc_feature (517)..(517): n is a, c, g, or t

SEQ ID NO: 65111 - DNA, 604 bp, Homo Sapiens; identical to SEQ ID NO: 16240

SEQ ID NO: 65112 - DNA, 581 bp, Homo Sapiens; identical to SEQ ID NO: 16241
  misc_feature (496)..(509): n is a, c, g, or t

SEQ ID NO: 65113 - DNA, 516 bp, Homo Sapiens; identical to SEQ ID NO: 16242
  misc_feature (220)..(242): n is a, c, g, or t

SEQ ID NO: 65114 - DNA, 293 bp, Homo Sapiens; identical to SEQ ID NO: 16261

SEQ ID NO: 65115 - DNA, 903 bp, Homo Sapiens; identical to SEQ ID NO: 16264

SEQ ID NO: 65116 - DNA, 839 bp, Homo Sapiens; identical to SEQ ID NO: 16270
  misc_feature (637)..(731): n is a, c, g, or t

SEQ ID NO: 65117 - DNA, 495 bp, Homo Sapiens; identical to SEQ ID NO: 16280

SEQ ID NO: 65118 - DNA, 222 bp, Homo Sapiens; identical to SEQ ID NO: 16281

SEQ ID NO: 65119 - DNA, 577 bp, Homo Sapiens; identical to SEQ ID NO: 16285

SEQ ID NO: 65120 - DNA, 233 bp, Homo Sapiens; identical to SEQ ID NO: 16286

SEQ ID NO: 65121 - DNA, 271 bp, Homo Sapiens; identical to SEQ ID NO: 16296

SEQ ID NO: 65122 - DNA, 366 bp, Homo Sapiens; identical to SEQ ID NO: 16299

SEQ ID NO: 65123 - DNA, 933 bp, Homo Sapiens; identical to SEQ ID NO: 16302

SEQ ID NO: 65124 - DNA, 376 bp, Homo Sapiens; identical to SEQ ID NO: 16321

SEQ ID NO: 65125 - DNA, 495 bp, Homo Sapiens; identical to SEQ ID NO: 16322

SEQ ID NO: 65126 - DNA, 378 bp, Homo Sapiens; identical to SEQ ID NO: 16332

SEQ ID NO: 65127 - DNA, 779 bp, Homo Sapiens; identical to SEQ ID NO: 16339

SEQ ID NO: 65128 - DNA, 555 bp, Homo Sapiens; identical to SEQ ID NO: 16342
  misc_feature (420)..(436): n is a, c, g, or t

SEQ ID NO: 65129 - DNA, 1105 bp, Homo Sapiens; identical to SEQ ID NO: 15307

SEQ ID NO: 65130 - DNA, 510 bp, Homo Sapiens; identical to SEQ ID NO: 15308

SEQ ID NO: 65131 - DNA, 596 bp, Homo Sapiens; identical to SEQ ID NO: 15319

SEQ ID NO: 65132 - DNA, 1434 bp, Homo Sapiens; identical to SEQ ID NO: 15324

SEQ ID NO: 65133 - DNA, 689 bp, Homo Sapiens; identical to SEQ ID NO: 15326

SEQ ID NO: 65134 - DNA, 621 bp, Homo Sapiens; identical to SEQ ID NO: 15330

SEQ ID NO: 65135 - DNA, 606 bp, Homo Sapiens; identical to SEQ ID NO: 15337

SEQ ID NO: 65136 - DNA, 1037 bp, Homo Sapiens; identical to SEQ ID NO: 15287
  misc_feature (191)..(257): n is a, c, g, or t
  misc_feature (289)..(289): n is a, c, g, or t
  misc_feature (295)..(295): n is a, c, g, or t
  misc_feature (863)..(927): n is a, c, g, or t

SEQ ID NO: 65137 - DNA, 1045 bp, Homo Sapiens; identical to SEQ ID NO: 15362
  misc_feature (341)..(392): n is a, c, g, or t
  misc_feature (531)..(554): n is a, c, g, or t

SEQ ID NO: 65138 - DNA, 987 bp, Homo Sapiens; identical to SEQ ID NO: 15380

SEQ ID NO: 65139 - DNA, 815 bp, Homo Sapiens; identical to SEQ ID NO: 15382
  misc_feature (648)..(660): n is a, c, g, or t
  misc_feature (663)..(708): n is a, c, g, or t

SEQ ID NO: 65140 - DNA, 1418 bp, Homo Sapiens; identical to SEQ ID NO: 15384
  misc_feature (196)..(326): n is a, c, g, or t
  misc_feature (800)..(821): n is a, c, g, or t
  misc_feature (957)..(1019): n is a, c, g, or t

SEQ ID NO: 65141 - DNA, 1159 bp, Homo Sapiens; identical to SEQ ID NO: 15387
  misc_feature (609)..(623): n is a, c, g, or t

SEQ ID NO: 65142 - DNA, 489 bp, Homo Sapiens; identical to SEQ ID NO: 15390

SEQ ID NO: 65143 - DNA, 517 bp, Homo Sapiens; identical to SEQ ID NO: 15391

SEQ ID NO: 65144 - DNA, 501 bp, Homo Sapiens; identical to SEQ ID NO: 15296

SEQ ID NO: 65145 - DNA, 576 bp, Homo Sapiens; identical to SEQ ID NO: 15395

SEQ ID NO: 65146 - DNA, 404 bp, Homo Sapiens; identical to SEQ ID NO: 15402

SEQ ID NO: 65147 - DNA, 775 bp, Homo Sapiens; identical to SEQ ID NO: 15405

SEQ ID NO: 65148 - DNA, 1034 bp, Homo Sapiens; identical to SEQ ID NO: 15414

SEQ ID NO: 65149 - DNA, 843 bp, Homo Sapiens; identical to SEQ ID NO: 20905

SEQ ID NO: 65150 - DNA, 1009 bp, Homo Sapiens; identical to SEQ ID NO: 20907

SEQ ID NO: 65151 - DNA, 855 bp, Homo Sapiens
gcacgaggctgggattctgtgtgttttgtgcacctccactttaggtaatcatagggagcacatttacaggatggtctaataacatgaaaacaggctagtttcaagcaacagcaatgtcggttggaaagcaggcgtcatttgccttgaaaaaagccttttgacaacatacaggcattcttttaaaaccaggctgaaacattttatttccgagacttaacgttgtgtttcctgtttcttaaacctagcacctctgtgtatttgaaaataatgagacatctttcattggattttggaaaattgttccccatgggattctaacctcactaccaaatgagtgaaagcttgattaagagttcttccatatactagcctccttggaagaagtgatcagaaggtgataagaaggacagaaaggactattttaaagttggactgaaggagaaaaaagcaaaattcttgtttcatcccaattctagttagaacaaagttaaacccccgtaatcttaaagagaaaatctttggaggttttaattaaacattttatacatttaaagtcttgttaatggtgctttaagtgtcaatgtagcatgtaaaaggctttgtacagacaggtaaaagttccatttctgagtgatgaaatgtaacacttcttcatctttaacttgaaatcaaactatcagattttatttttgtataatttaaggaaggtaaagttaggggactagaagactctaattggcttctacagatcaatatttaaatgtaactagttgggattttatagttaaaattatatttgtgtatataacataactaatctgtaattgtaataaatatatttgcaattataaatgt

SEQ ID NO: 65152 - DNA, 612 bp, Homo Sapiens
gcagggacaggtcttccgcgccggctggtattggcccagtcaaagagcttgtgcatggcggtcacgccttcccgccccatgggggccacgtccccgcctgtcatgatggcgtagtccatgcctgagtgcagggcgagtttcttggcaaacagcgtcttcccggtgcctggtggcccgtacatcaggatgttcctgtacaggctgcggttcttcttggtgttccttgttgctatggcgatgtcgcgcacccgtgcttccaggctgggactgagcacaacaccctccagcgcgtcctggggtcgactgaggagccgccggctgacctggatggggtgccgcagcgcctcaagcaccgtgatgcgggacgtctccctcactagggacggcttccccagccgagcctcgatgaagcggccggcgacaagcgtggcattcttggctgagtagaccccaacagccagcagcgtcagcccagccaccgtggctgtcactttgtcccagtctgtcacaaaggcacggaatccttccccaaacaaggtgccagccgtcctgatggactccaagacggtctgacggtgctcggccgccttcaggcggatctgctcctcgtgc

SEQ ID NO: 65153 - DNA, 1413 bp, Homo Sapiens; identical to SEQ ID NO: 19287
  misc_feature (115)..(127): n is a, c, g, or t

SEQ ID NO: 65154 - DNA, 947 bp, Homo Sapiens; identical to SEQ ID NO: 19288

SEQ ID NO: 65155 - DNA, 631 bp, Homo Sapiens
gtgattcacagtgcactgattttatttacagatcaaaagccacttaaataatctgcagacacaagtgctgtccagggcaaaagcctggggtccaaatcagccttatccctcctcatgcccacagtcagcccaatgctgtctccgttccatgggccagcacaggcaggcgccactctgctgacatgaggacctggggtagctcagacatttgactacccaagcccagaaaggagctgggtccagcccttacggggaattcctttaattcccccaggccaggtgagtgctgactcagtgatgacaacagctgtaaaagtaggggtttggcttctggcccagatccacgcccttgtcctctgtcatcacctggaagggagccacactgacgtaatcctctgccactttctggaagaactcgtccacactctggcctgtcttgctggatgtttcaaaaaactgaactttgatattgtctgcatagtcctggacgtcgtggaagtccacacgtcgaagcctccggtcttcttccagcaggtcactcttggtgccacataaagtagatttggcagccctcctctaggctgcgcagttccttcacccagaactttgctcgctcaaagctgctgctgtc

SEQ ID NO: 65156 - DNA, 1067 bp, Homo Sapiens; identical to SEQ ID NO: 19304

SEQ ID NO: 65157 - DNA, 827 bp, Homo Sapiens; identical to SEQ ID NO: 19320

SEQ ID NO: 65158 - DNA, 1310 bp, Homo Sapiens; identical to SEQ ID NO: 19324
  misc_feature (190)..(198): n is a, c, g, or t
  misc_feature (1177)..(1185): n is a, c, g, or t

SEQ ID NO: 65159 - DNA, 810 bp, Homo Sapiens; identical to SEQ ID NO: 19325

SEQ ID NO: 65160 - DNA, 852 bp, Homo Sapiens; identical to SEQ ID NO: 19329

SEQ ID NO: 65161 - DNA, 891 bp, Homo Sapiens; identical to SEQ ID NO: 19330

SEQ ID NO: 65162 - DNA, 896 bp, Homo Sapiens; identical to SEQ ID NO: 19332

SEQ ID NO: 65163 - DNA, 816 bp, Homo Sapiens
acaaaaataaacaatttaaccaacaagaagtacaaaagattctggatattcaaactcgaggaagggggaaagcctggttttggctgctttgaggctttcattgaaagcaaatgaggcagaaaggccccggccccacccccgccccaggtcctggctcaaaccacacctgctccctgaccccagtcttggctcatgctgaggtgtgcacctctgcccctgacccctgggctggcctgggagtgtcccctgtcgggaggtcagagatagcctccccaggtacagaatcacccacatcctggagcatctcccgccaagtctcctgtccagacctaagctgaaagaacactccacgatggattgtccccacgcagcccccaccgcctgctgtggcatgtgcagcagcagcagcaggggctttagctacattctcacactattgaacacagtgatggggctgcccacggaaccgtcccagggaggggcacagcccccagtggggagactagcctgagcttgcttacagcccacagggttggagaggcagtcatacccccatgattcctggactaggagccagcagtcccatagctaggctggtaaactcacattttaacatttggcattattgcacgtttgtcctggtcacatctgtctgtctgggatgttagctttgtctgcaggggttcccaggtgacatgcagtgctgccagtgcaagtcactccctccacaggcaagcccagctgctgaggatagcagctgggcaaccgagccttcagataggtcaccaaaggccctcacatatgtggtcttgttgg

SEQ ID NO: 65164 - DNA, 1513 bp, Homo Sapiens; identical to SEQ ID NO: 19345
  misc_feature (64)..(74): n is a, c, g, or t
  misc_feature (1248)..(1301): n is a, c, g, or t

SEQ ID NO: 65165 - DNA, 822 bp, Homo Sapiens
gcacgagggtttactcccccttgttccaagctctaagcctcagcttactccacctccatagcctgcacagtttcctccactagctccagggttagtggcttcactgtctgggtcaggacagctgtggttccaggcacaaagtggtagcggccagacctcttcacgggctctgtgggtgagctcagtgtccgcagcagcttggcgccagtctttgtgatcacacatgcgtccacattgcccccggagcccaggtcacccaagatcccggcggtgacggcttccaccagcagcccctgagcagcctccagcgtcatgttcggctggaaccggtcttctagcaccgccagggccgcgtcctgaccagagcccagggctgtgaagggcagacggctgtaggagccatggggatgcacaccgtagagctgcggtccagtcaggtctacgccgcccacgatcagcgatgcacccacgtggccctggtacctgaagagcgtctggcgcaggatgcgagtgaccgtggccacgcggggctcgcggcccgtagataacgcgtgtagctccatcttggacgccaccatccgtgtggtcatctcggcgtccgcggctactccagccccacagcagtagattttgggggcgatgaagtggatcttctcgcagctcttgtccgccacgaccgaatcgttagtggctcgcgtatcggcgcccagaatgacccccgtcttggaacaccaagcccgcgatggtggtcccggtcttgcgtgcgtgaagggaccttgagccccgggaggacgcgttccaatgatgcattttctggggggg

SEQ ID NO: 65166 - DNA, 887 bp, Homo Sapiens; identical to SEQ ID NO: 19349
  misc_feature (97)..(114): n is a, c, g, or t

SEQ ID NO: 65167 - DNA, 888 bp, Homo Sapiens; identical to SEQ ID NO: 19357

SEQ ID NO: 65168 - DNA, 786 bp, Homo Sapiens
gcataaaacaagtttaatttccaaccagggtcacagtcatcgcgttatcccacattttgagcaaggatagagaaggtgagttattaaacatatacagtctacattccagaggaggaactgcagttaccactataacaccacagacaaactttggggtggggggagcgggagtcctcaggaagcagaaagctggaatcagggaaagcataaaattaaacctaccagagaggagaggagagggagtgggcagaaatggaatgaaacacccaatcccaaaagagctgttaagtgaatgggaatgtagaaaggaccacccctgccaagggcttagcagccagggatactaccaagatcacttactgccccctgctggacagatctggggcagcaccaaggcaacctcctaacatttccagccccagattggtccctggagcccccaaaaaaacaaggtgaggggtgaggcctgaagtgaggaaaacctatttaggactgacatctaactagagaaagtcagggaatgaggcaggagaagaggcaaagtcctcatgaaccacaaagatagagtggaaaatcctaagtaggaaaaaatacatggaaaagggcaaatgagcaacagcagtgaatgagttgagattgaaaaggaaagagttcaaggaaggagaggcaatggggcaagacaaaataaatctgaggaaacagagcaaataaaaagtatggagggaagcatctgtggggccagggaaatgaatacatttttaaatgaaatagaacctcccctcgtgc

SEQ ID NO: 65169 - DNA, 418 bp, Homo Sapiens; identical to SEQ ID NO: 19369

SEQ ID NO: 65170 - DNA, 1602 bp, Homo Sapiens; identical to SEQ ID NO: 19370
  misc_feature (1279)..(1298): n is a, c, g, or t

SEQ ID NO: 65171 - DNA, 1585 bp, Homo Sapiens; identical to SEQ ID NO: 19374
  misc_feature (965)..(974): n is a, c, g, or t
  misc_feature (1114)..(1122): n is a, c, g, or t
  misc_feature (1144)..(1159): n is a, c, g, or t
  misc_feature (1232)..(1246): n is a, c, g, or t

SEQ ID NO: 65172 - DNA, 593 bp, Homo Sapiens; identical to SEQ ID NO: 19376
  misc_feature (416)..(432): n is a, c, g, or t
  misc_feature (484)..(504): n is a, c, g, or t

SEQ ID NO: 65173 - DNA, 700 bp, Homo Sapiens
aataaatttaagaacagctctaccttctctcctccccccagagcaactaaaaccaactaaaaggggctatggtctggggggcagaaggcgctaggagtcgtaatcttcttcgtcctcttcatcaggtgctgaggggcccgggggcgctgggggcaaaggcagagtaaaggcgaagggcaggaagggtgtcggggggctctgaaagtgggcaaaggggtggctggcctggggtgggggttgtgatgtctcctcttccccatcagtatctgtgtcctcaaattcatcctcctgctccgagtctgtcccggacagcttcttgtccttgcttttcgttcccatcccaccgttcttccggccgccgctgcctggcttccggcccctgcgggcgcccttgtccccatccatgtggttgtcttccccgtccccctgcatgtcgggaacagatgccaccaggtccttcaagaagtcaaactgctgctccagctcgatgcactgcttcaggtgggatgtggtcatggtcttcgcgttccgcgactgggtcacctggcaggccttcttcaacagcgactctaggaaaagctcgagcgcccgggagatgatgacaggcaccgccgccgccaccttcccaatctcttcgtccgtctgcatgatcttcttgatccgcgccggcgggaaccgcgcgttgtacttcttcttcttg

SEQ ID NO: 65174 - DNA, 1233 bp, Homo Sapiens; identical to SEQ ID NO: 19385

SEQ ID NO: 65175 - DNA, 690 bp, Homo Sapiens; identical to SEQ ID NO: 19386

SEQ ID NO: 65176 - DNA, 428 bp, Homo Sapiens
cacgtcataagtttattgacaaacatatctagtatggcatatgagttctagtttgatccacttccagaggctgcacctcttaaaatgctcttcatatctgttaaatggaggaactgaaacatccttatgttttaagcagttggtgtcttactacaaggaagggtgtagcaaatgcagatccaaagtacaaacacatcttagctagtaacgaccacttgttttccactgaaaatggcaaattcttcccagggccctcctcatagtggctcctacggaccacagaggttgtgaacctccggatgctctggcccaacataccgctgctggaagctctgcgaaaggcgcagagaatgaggacagatgaaatggcggcacctcaccaagaccttttttttcacgaccttgttccccggtgcgcacggacgcgt

SEQ ID NO: 65177 - DNA, 909 bp, Homo Sapiens; identical to SEQ ID NO: 19399

SEQ ID NO: 65178 - DNA, 1618 bp, Homo Sapiens; identical to SEQ ID NO: 19400
  misc_feature (860)..(912): n is a, c, g, or t

SEQ ID NO: 65179 - DNA, 1209 bp, Homo Sapiens; identical to SEQ ID NO: 19401

SEQ ID NO: 65180 - DNA, 1568 bp, Homo Sapiens; identical to SEQ ID NO: 19402
  misc_feature (695)..(703): n is a, c, g, or t

SEQ ID NO: 65181 - DNA, 908 bp, Homo Sapiens; identical to SEQ ID NO: 19410

SEQ ID NO: 65182 - DNA, 597 bp, Homo Sapiens; identical to SEQ ID NO: 19414

SEQ ID NO: 65183 - DNA, 1795 bp, Homo Sapiens; identical to SEQ ID NO: 19426
  misc_feature (285)..(525): n is a, c, g, or t

SEQ ID NO: 65184 - DNA, 293 bp, Homo Sapiens
gcatcaacatttttattgaaatacaaaaagtgcaaacggtgaaatacatgattggtgccaaggaagtcattaagtgtgaatgtgaacactggattcacacagtacaagcacccgctccctggggtacagaccagtgggggacatgagaaagaccaaatagatccgaaaggctccccagtgaatggggctgtgagcgacacttgatacacaaaggagggcggagagcagagcagccctggccgaggctagagaccaagggactgatgaagaaccagcagcagcccaggccccag

SEQ ID NO: 65185 - DNA, 633 bp, Homo Sapiens
cttcattaaccctttattacaagtcacgctcttatagaagtatatgtggacttacgtgaaaaaatcaaatgtatccaagaataaaaaacacagcacataaagtagtatatgcattccagtgttcgcgccagaaacggcgggcgcccaagtaaaagctcttctaaaacggcctgactggggcaggccgggggcgaacggttccgggcctcaggcacagtgggggggccgcctgcctcctccgcggcccggcgggcgggggcagcaccagctcctagggcctccgggccagcggcggaccccaggccggcccaagcccgacgccaggcaaaaccctttgggcggggccgtatctggccctccggggacggcagtgacaacacccccagaaatgtgggcttcagggctggccacagggtaccctcaaaagcccgcagcttagtcggcctttttcaggaagatctcgctcagaatcacccacacaggggagtccgtctggatcgagaggcgcagtgcttccaaagggccgaaggctgggtccacctctccctctgccactcccttgtagaaggagccgatctggaggtagccgtcggggctccgagggtaccggagggtggcggtgcggccctcctg

SEQ ID NO: 65186 - DNA, 1575 bp, Homo Sapiens; identical to SEQ ID NO: 19436
  misc_feature (686)..(720): n is a, c, g, or t
  misc_feature (835)..(844): n is a, c, g, or t
  misc_feature (1045)..(1075): n is a, c, g, or t
  misc_feature (1232)..(1234): n is a, c, g, or t
  misc_feature (1240)..(1266): n is a, c, g, or t
  misc_feature (1501)..(1510): n is a, c, g, or t

SEQ ID NO: 65187 - DNA, 689 bp, Homo Sapiens; identical to SEQ ID NO: 19437

SEQ ID NO: 65188 - DNA, 479 bp, Homo Sapiens; identical to SEQ ID NO: 19446

SEQ ID NO: 65189 - DNA, 764 bp, Homo Sapiens
cctggtttgtaaaaaatctgattattcaaatttattaccatcaaaaattatgcaatgatgctgtattttttcttaacaaataaaaaacaaactgggtacaacagtgaactctacagcactaccatccacaaggaaaaaatgaatgtttcatcatccaacattaccaaaccctggaatgttgatcttgacttaccctagctaggttgggggacgtcggcaccacgtccctcagctaaaacagctatgcacccttccccgcccccacttacctatctagatagcgctgcccagaggaagaggcgctctccctgcccctcagcaagctgggataataaggactgattagagtaccattgatagaagtccagtagtcttgccacattggtttatgagggcatcttggagtggaaaagagcgattatcgggggctttgaaaacagctgcaaaccagggaggaaaatcatctggcccctgctctgaggacagacatgtgctaccaggcccactggcctggacctgaaaggccagccacgcccccgcttggccctgaggtgcatggggtgtggcacacaccctaacctgtgctattcaccttggccacacagccagaccccacagcctacaaacaccacaccatactgcaatgctggggaccaaagccaggctctgtgggcccaggtcagccagcagctccctcgggaaccccaggcacacggagttgcttcccctcttgagggtttgaagcagaagccaagggctgactc

SEQ ID NO: 65190 - DNA, 468 bp, Homo Sapiens
  misc_feature (160)..(168): n is a, c, g, or t
ctgggaagtatattttatttacatttttaaaatctttaactagtatctcttcctcctttccacccccaaagacttgggaagggaaagaacgggaacctcaaacacctactccccacatacaaatacacaccccatggctcacaccaccaaatgaaagtgnnnnnnnnncaggtccacccctccttctgaagggcccaccaggtctgggcaagggtgggagggccctgggctgggtctctaaagagaaaaaaaggagaggggagcaagtcagttgaataggttggaaagtcatccagggccccaccttcttcttccctttgtgccctactgcctctgctggcaaaaaggggcaggggtcccttcgtcccctcaacaccaaacacaaaggcaggggctgcagcttttaacggtcaggcctttggacacaaaatactttcgctttggggtctcctgacgtggtcaccacca

SEQ ID NO: 65191 - DNA, 886 bp, Homo Sapiens; identical to SEQ ID NO: 19447

SEQ ID NO: 65192 - DNA, 871 bp, Homo Sapiens
gggtttaacagtttattaggatttataagtgtcattttaaaaacagtcgatttaaaccatgtaaaaataaatatgcaaaaagtctgcaaaacaaaacatactttaaacatgtttaagtaaatagattatctgaaattctggatttttcagtcacttcattgttatgctatggcagccaagtaatccttaacttcagttggagtaagcctcctaaatccagcttcattgcagattccaacttctatgttatcctctgtcatttgcccttcaaagctttcctttagggttaagatggctgtatgaatggcatcttcaagttccagatcttcattatatcttttctcaaggaaagtcttcccattcacatagttctttcccattgctgtagctttccaggcaaagtaagctccagatggatctgactgaaataaatatggtcgtccctcattccaaccacaaataagtaaagaaactccaaatggacgaacaccacctgactgagtatattcttgcatcacagaagctactctctgtaccagctgagctgtaggaatgggttcttggtacacaagatagtattgttgagctagttttcgagctctgtgcacaagcactctgtaatcggggcccatgccactgtacaccaaacctatatgcttggtaattggttctactttgtgtacacttcgctcatcatacagaatggatttctgttttttctcagttgctaataccacaccatttgcagctttaattcccacggacggggctcctccagctacagcagccaaagcatattcaatctggacaagtttaccagacgggctgaatgtagtcagcgaaaagctgtacccgcgcctgcagcccgggg

SEQ ID NO: 65193 - DNA, 833 bp, Homo Sapiens; identical to SEQ ID NO: 19454

SEQ ID NO: 65194 - DNA, 1306 bp, Homo Sapiens; identical to SEQ ID NO: 19459

SEQ ID NO: 65195 - DNA, 815 bp, Homo Sapiens; identical to SEQ ID NO: 19463

SEQ ID NO: 65196 - DNA, 566 bp, Homo Sapiens; identical to SEQ ID NO: 19141
  misc_feature (360)..(368): n is a, c, g, or t

SEQ ID NO: 65197 - DNA, 398 bp, Homo Sapiens; identical to SEQ ID NO: 19468

SEQ ID NO: 65198 - DNA, 819 bp, Homo Sapiens; identical to SEQ ID NO: 19472

SEQ ID NO: 65199 - DNA, 778 bp, Homo Sapiens; identical to SEQ ID NO: 19475

SEQ ID NO: 65200 - DNA, 814 bp, Homo Sapiens
gttctgattttgacaagggtaacttcttctttattaaagcaaataactggacataatcttaaaggattccacctccatcgtctttcctaacttagatcttcattgagaaattgggcaaggttaagtttacttttttctagtgctgcggttttggctcgtcttggtagtctcatcttcatttctgattctggttctggaacttcatgatcactttcagagtcggcttcagcagtctgacacctcctgttcgtcctagctgaaactgtcacttttctctgtcctctgttagtctttagctgagtagactttgatgcttgggttgcttttacacccctgagtggagtcatatatacttctttattcttttcatcttcattttggaaagtagttgtagtcaaggtggcatcctgtgctgcttcagcttggtcaccaaattctttatttcctttttctaactgaatcttgattttctccaaagctctcagacatgtcctatcttttacttgctccagaatctcattcaatagaaccagaagatcttttgcaagatggctactgagttctaaagaactcaaggcttttgtatagactcgaatttctggcgagcacggacttgttaagatctcattgcaaattttcatagccaaattgtcatgtactgttaaggcctgataatcttgggaagtcttggcctgaggattaatccacttggtcttgtcaaatctacaagtaactcagcaacatttgtgatatcaatttcagctaaaggagaagatgcaggggcattggccagtgttgcagggttggaagaaaa

SEQ ID NO: 65201 - DNA, 1031 bp, Homo Sapiens; identical to SEQ ID NO: 19493

SEQ ID NO: 65202 - DNA, 887 bp, Homo Sapiens
gcctatctttcaaaactgagcactgggtatttttaacataagccatgtcatatgtacagtttaactatgtaactatgtttcaggaataaacaaaatccatgatattttagtaactcatagtgtatttatagaatgaaaagttctctatcaaaatacacttttcactgggaaaaataaataaaatagacaaatggatctacacaaagtaaacattaactttggtagatttcagtgtagttcataacaagcatatttgcccttattcccccagagctgctcaactaccaagaatttttaaaatatttttaactgagattttattatgttgacatttgtttctcattccacatcatcttcagccaagctctgagcacttacaattctctgactaattgttgggagcttagtcagaagcatctggaacactggtggtggaagagtttgctgtaagacctgcagtaactgctgtggctgtccacacacagcaattgcatttgtcagatggtctacgcccttctcatattcaccttgagctagtaactcttcaccaagctgtatttcttcaaggaagaacttctgaacagcttcagcatctttaaggtcaggtaacttggaaagcccagctctctccttggcaagcttctgtttctttcttcgttctcgaagcctgttcttgaagttggggtcacttcgtcttttgcggtcgaagtagatgcagtacccaatgaaaagggccccgcatacaccggcggcgatggcgctgttccgacccaccatcttctctacaacgctgagcgtggacggtggcggcagggaccgcgaaggagcggtgggccacgaaccctcagagcggtcggcgcagctcacacccgacggccgcctcgtgc

SEQ ID NO: 65203 - DNA, 1036 bp, Homo Sapiens
ccagttcactctttatttcctcatatcagctttaaacggctctggaggaagcaccgggtttcttggcctgtctattgtgaatcttctccaggtttgctctggaaaggcctgggggggccgcgtcctgtcctgccccatcctccttcactggggcagttccaggacaatcttgcctatgttcttgttggcctccatgtacttatgggcctcctggatttcggtcactgggtaaattctgtccaaaaccggcagcaaacgttgggggccctccggggaaaagtgaggcaaaatttgctccgtgaaagcattcaccagcatttgcttgtacttattgtccctagacctcagcaaatggtgatcagacttcctcgcttaaaaagtagctttgaaaacaggggcccattgatgtcacctcctcccatcagaccatagagaacccatcgaccatcaagagccaggcagttgacgttcttctcccagtaggatccgcctatgcagtctagaataagattaactccagcacctttggtgaatttcagcgttgcttcagagaaatcctcttttttgtaattgaatccagcagctgctccaagcttttctgccatttgaagcttcttctgggagccagctgtgaccagaggaatagctccagccatccgggtgagttggatagcagctgtgcccacaccactcagtcctgcatggattagcacatagtctccagcctgaacatttcccacaagatgtaacagctggaaggcggtgagccaggcctctgggatggctgcagcctgggtcagggtcaatccctctgggataggcatgaggagcccttcggggacagtgacgtactgagcctggcccccaccggggagcagagccatggctgtgtccccgatcttccagtgtccctggcagccaggccccagctctgccacatgtccagatgcctcaagtcccaaaatgttgctggctcctggaggtgggtcatactggccttgtctctgcattaagtccgcccggttcagcctcgtgc

SEQ ID NO: 65204 - DNA, 561 bp, Homo Sapiens; identical to SEQ ID NO: 19142

SEQ ID NO: 65205 - DNA, 1127 bp, Homo Sapiens; identical to SEQ ID NO: 19561

SEQ ID NO: 65206 - DNA, 834 bp, Homo Sapiens; identical to SEQ ID NO: 19575

SEQ ID NO: 65207 - DNA, 1362 bp, Homo Sapiens; identical to SEQ ID NO: 19576

SEQ ID NO: 65208 - DNA, 643 bp, Homo Sapiens
gcacgaggggggtcgatttgggaggaaaggtgtggctataaactttgttactgaagaagacaagaggattcttcgtgacattgagactttctacaatactacagtggaggagatgcccatgaatgtggctgaccttatttaattcctgggatgagagttttggatgcagtgctcgctgttgctgaataggcgatcacaacgtgcattgtgcttctttctttgggaatatttgaatcttgtctcaatgctcataacggatcagaaatacagattttgatagcaaagcgacgttagtcgtgagctcttgtgaggaaagtcattggctttatcctctttagagttagactgttggggtgggtataaaagatggggtctgtaaaatctttctttcttagaaatttatttcctagttctgtagaaatggttgtattagatgttctctatcatttaataatatacttgtggactaaaagatataagtgctgtataaaatcagccaattatgttaaactagcatatctgcctttattgtgtttgtcattagcctgagtagaaaggcctttaaaatttttttagaaagcatttgaatgcattttgtttggtattgtatttattcataaagtatttaattagtgctgacaaa

SEQ ID NO: 65209 - DNA, 653 bp, Homo Sapiens; identical to SEQ ID NO: 19599

SEQ ID NO: 65210 - DNA, 1596 bp, Homo Sapiens; identical to SEQ ID NO: 19603

SEQ ID NO: 65211 - DNA, 1287 bp, Homo Sapiens
aaatttttgggaatttattgatttgcatttaaaagggaactgctgacaaagattcactggtaataatttgaacaagttggaaaatacagtcaacattactgaaacactactaaaataattccaggacagaacaaaacttcttagatgctgtctttgatgtgaaaattgactgcttcttacttttctaacacacggtggtataattaacaatattcaatcacttctattctttcctgcatatataaaaattaaaataccaattaaaaaactaatatatcttctctttatttcttacagatatgagttcaatgtttcactcaatagtgctgtggtttaagaaaattttttcatttacaagttaaacaacaatccgcccaaagggaactgatagtctataggctcatagtgcaaataaacagtttaggaatgcagcaactgacatttctaaagtacaaaacagataaaattcttagaagatacatgcaaaaagctctactaagcagatggccacagaactagaacattgataattttactggcgatgtcaataggactccagatgtttccaaactcaacttgaactctcatcttaggctttgtattttgcttttccagtttcactaatgacacaaacatgattcaaatccctgaagtattcattatagtcaagggcatatcctacaacaaacttgtctggaatttcaaatccaacaaagtctggcttatatccaacacttcgtggggtccttttcaccagcaagcttgcgaccttgaccatctttggattatactgcctgaccaaggaaagcaaagtctgcattgttttgccagtgtcaattatatcttccacaatcaagacattctttccagttaaagttgagagatcatctccaccaattacttttatgtcccctgttgactggtcattacaatagctcttcagtctgataaaatctacagtcataggaatggatctatcactatttctattcagtgctttgatgtaatccagcaggtcagcaaagaatttatagccccccttgagcacacagagggctacaatgtgatggcctcccatctccttcatcacatctcgagcaagacgttcagtcctgtccataattagtccatgaggaataaacaccctttccaaatcctcagcataatgattaggtatgcaaaataaatcaaggtcataacctggttcatcatcactaatcacgacgccagggctgcgggtcgccataacggagccggccggcgcgcgggctgactgctccctcgtgc

SEQ ID NO: 65212 - DNA, 943 bp, Homo Sapiens; identical to SEQ ID NO: 19644

SEQ ID NO: 65213 - DNA, 1583 bp, Homo Sapiens
cgggctgcaggaattcggcacgaggtttctcttatagtagaggtgtgaaatggcaacttttattaatgatgaatggcaatgacttttaagtttgatcacagagtgtttgcatattttcttactatttttggtatgatttaaaaattattggttcattaaccatttaaaagaggaataattcagtagaggcactaggaggttgaacaggatcattcttcagtaatattcagccttgacaagcacagcggctacaatacccaggaaagtgagcaacaggagaccgagtttttctttgttgaaccgtttcaagagaaaaaattttccccaatccacctttgactggctgttgggaggatatctgagtttgttagcaccttctctctttaaactttttaataaacagggacgctgatgagaaaaagtatcaaaactatgttttccgtgataagctcccatcccactggaacccactcctccaaatgggaaagagttgagcgtgaagtgcataatgacgtcattgcctgtgacacctccactggatgtctcatcaatcatccgtttgatgagcttatggttatgcgaaaatacataaagagccagaggcttttcacgttcatttatgaaatttatggcctcatctacatttttcacaggcactattggaagaattggtccaaaaatttcttcttgcatcaccttggttttaggatcaacatcggtaagtactgttggggctatgtagcgtgtggcctcatcagtctccccaccaaaagctatcttttgtccttcaagcaacttagtatcctcttaaatgacgaagattgatgatcctttcataatcaggagactctttatattttctcataaaattccttcactgtttcttaatcttcatacaatttgattttggagggatgcttcacagagaatatagtcgggtgcaatgcaggtttggccacaattcatgtattttccccaggttatgcgtctgcaaacaatgtcccaggtcacaatctttatcaatataacatggacttttccctcccagttcaagagtcacaggggtcagatgcttggcagcagcttccatgacaattttgccaaccgcagtgtttcccgtatagaaaatgtggtcaaatcgctgcttcaggagctccgtggtttcctcaacaccaccattaataacaatatagagatcctggtctaaatactgagggagaagctttgccaagatcttggctgtattttcactcagttcagaaggctttataatcacagcatttcctgcagcgatggctcctatcagtggctgaatggtgagaacgaaggggtaattccaagctccgattatcagcaccactcccagaggctgtggctgaatataggcctcatccagcatggtgagcacgttcttcttaactggtttagcagtaacccattcaggaagattctcaagcataaaatcaatttccccaaggacagtaatgacttcctgactgtacacattgaattcactcttgcacaggtcggcggcgatggccgtcaggatatccttctcgcgctcctgcaccatcccctcgtgc

SEQ ID NO: 65214 - DNA, 994 bp, Homo Sapiens; identical to SEQ ID NO: 19673
  misc_feature (256)..(311): n is a, c, g, or t

SEQ ID NO: 65215 - DNA, 876 bp, Homo Sapiens; identical to SEQ ID NO: 19677

SEQ ID NO: 65216 - DNA, 540 bp, Homo Sapiens
tctaaaaaccagccatttatatctgtttaggtaagtaacaggagtgaggtggtgtatttacaagttggcttgtccagatatactataacttagtgtctgtatttaatattgacaaccaaaaatatatataaatatcttgcatctatacacaacagggcaggagtctccatgtcttcttgagcagtgagtttgcaggctcccacaggccctcttctcatggtaatagtgtggccctcagtgcaaaggagactagaacccggcagcccagactggcccttcccctctcctccctgcactccagtgctcccaactggtctcaggtaaagaaagattaatttgagtggttgggtaggaagagatgggaaggggcaaatcctaatggagcctgacccctagagtggggagatccaggccagcagaacgggtggccatagccacctcctgggatagaagctttgtagttcatagttcgattagtgtgtccttaggacataggtccagccctacagattagctgggtgaagaaggcaagcctcgtgc

SEQ ID NO: 65217 - DNA, 276 bp, Homo Sapiens
gcacgagggttaaagattcttttattaataaattctccctcccctccaaactctccccaaaataaatatctcctccccgctttggggagttgggggggtctgtatcttagggccagccctcctagtgggccagccccctagtgttaaaaataggtccctaaccccccagggtgacccccgtggtggaatttcaggacatctgagtgagtggggcctagtgtcaagtctgccccccaagtcagcctggcccccagggcctctaggaaggcctcgtgc

SEQ ID NO: 65218 - DNA, 653 bp, Homo Sapiens; identical to SEQ ID NO: 19703

SEQ ID NO: 65219 - DNA, 839 bp, Homo Sapiens; identical to SEQ ID NO: 19705

SEQ ID NO: 65220 - DNA, 771 bp, Homo Sapiens
gcacgaggtttttaacagttatagttcatatattaagtttagaattaaaagaaaaggcaatgtttattagctatttcataaatcttctctgaaaagttctcaattcttctcactgaaacttgtaagcaactgagcagcttctgtctgtatctgtttatcctcctctgggtgggctggatagtccttggctttcattagccagaaagcagcaagctttttgttgtgtagtttcaagtatgtctttcctaaaagaagtaagtttttgctgtagaagtttggatccacttgttctgccctgtgaaagtagcctaaggccttctcataggtggaactaggaggagttgcaaacagcattttagcaattcttctttgataccaaggcatttcggcaaatgtatagcaccaaatacccataaggtgaattgaagtagcatctttagggttcagttcaattgctttctcaaaatgctccttgatgatatatgcatttgcaattttagccttgatgccttcataatctccaacatcactaaggcagattgcataccacttatgagatgcaaaacttgattcatttttttctagtgctctttttgcatactctagggcttcatacaccaatagctttttctcctcttctgaggttctgctaagctgagctacatcacgtgatgcccgtgccaaacgccacagtaactctgcatcttcactttccttgtattgggttagcaactgataaagtttttctgtttctccgctttcacctcgtgc

SEQ ID NO: 65221 - DNA, 648 bp, Homo Sapiens
acgtaaaagagtattttaattcttgtccttggaagccataaagattatacatgacttggaaatgagactgtaccaaatgatggccaaagaagaatcatcctttctactccttctctttcgtctggtcactcagaaatataatattatcagctatgattgttgttgcttgtcgcctcacattatttttatccatgtattcaccatagtctattttcccttccaaataaattcgagacccctttttcacatattgatatgccacgtctctgaggcctggccggaatactgatattctgtgccatgttgtcttttgactgacatcacccagttggtaaacttcactatcccctgatcgccacatctcattagttgctagagaaaatattgtgactggattttttccttccacctgtctcaagacagggtcctgacccactcgcccaagtaagtgcacacgattcagggatctttcaagaaccaaactggtagttgtttcggactcatgtcttacaaactgacgaagtacctgtaatacaggtcttcgaaacatggcttctattttcttttcttacagtctaatctttaggcttttcctgacgatctaacccgagcagcccagccacgcaggggatcacttccgcctcgtgc

SEQ ID NO: 65222 - DNA, 744 bp, Homo Sapiens; identical to SEQ ID NO: 19716
  misc_feature (136)..(146): n is a, c, g, or t
  misc_feature (472)..(496): n is a, c, g, or t

SEQ ID NO: 65223 - DNA, 609 bp, Homo Sapiens
ctctatgcagtccttgtttcctgccatttaattttaaatgaaaatgagacatatgagtacactgaaaagtaacatcaccatctggaaaattatacataaggaaaatgcaataagggaatatagatccttcaccccctattccagtactctttaacaactctgcttccttggacgggaattcatgaggtataatacttaaggagattttcatctgtaggttttaggattttcttatcggccatattcaccacccatcctggagcaagaccaaaaaaaatctgccttggatccttcctagtacagagcattttgaaaagttcatctttagtgatatcaggtaaaatataaccatacttcctggcgagttcaagtcgtgcttcaggaaatttggcaggatccgccaggtacccacggttctttgcatcaatgtaatatggtaccagttcttctggtggaagcattctttttggaatgggttgtccacgaaaaaagaatggaacaggtttgcatacaatgtccagacttcttggatcataaaaggctgtagtaacaacaccaccatttttttcaatggcagcaatagctagttctgaacccaactgtacttca

SEQ ID NO: 65224 - DNA, 1256 bp, Homo Sapiens
gcacgaggggctgagtggctacaaagactttatcaaattattttaaatgttggcatttaagtattcatgtgtatacagttacatggaaccttcaggtcagtggggcacaaatgtggtatacacacgatgagcctggcagggaagcaaatgagaccaggcttggagctacagggatttaaaaaaattggatgtctttctgagggtctgagaagaatagggcagaagaggaaagggtcactttaggggtctggcttaacccactgcctagatctccaactgaagagctcctttcccatcctcaggggaagagtgcctgttttcaaacggcatccctactacacatataccccccttccctaaaatcttgatgtggcaaacacacccaagaacccacaggaatatgtccttataaatatgtttgtatcagagaaaacaaggcactttgggagcattatggcttactctactacatgtacatcattctagacagaaagtaaaaactggttagttcctcaagtgaattaactgaataaacttaatacaataacaaaattgttccctaacccacactgaggcacagttaaagggaacatggtaggaggcacagaaggaggcacagaatgaggcacatctctgcgcgacacctggtcccaggtcagttggaccccagcagggctcaaagcctgatgcctccaggaagcctgacatctctcatgagcaaagccccctggccttggagcactggctccctccctccccataccctgaagtcaggtgaggggccgcagtgggaggcagtcctagagcagagctgggacacggtgggaatgcttaagcagggtcaccaaagccacagagacctcaatctgtccaagctggcactgcagagtcagaggatgggcgccacgggaagagatttcacattagccgtgacaacaccgcctcggctctgcgttgacattggccagggtcgtttctgagggcgctcgggcttccactggaggcgagctggagcctgggccagctgctctgagcctccaagggctggctgagcctgccccctcccccaggctgctcctttggaatgtacccatctcacaaccaaggcaaagccacaagttgcttctgacactattggaagctgggccccagggccacaggaatgggggcaggtcccttgggcggggtgaaccaggaagggaggaggctccttggcttcggcgcttaggagtccttataaaggcattgcctcgtgc

SEQ ID NO: 65225 - DNA, 856 bp, Homo Sapiens; identical to SEQ ID NO: 19738

SEQ ID NO: 65226 - DNA, 1801 bp, Homo Sapiens; identical to SEQ ID NO: 19747
  misc_feature (540)..(550): n is a, c, g, or t

SEQ ID NO: 65227 - DNA, 488 bp, Homo Sapiens
gcacgaggcaaacaccaagatcaaaggaatatttattacaacatttatggacctagctcctccataaataaatctgtacagagttggaaagtaagaccatggtatatacagaaggaaagagcacagtgttaaggctcaggaatcagtacaagtcatcagggtcagcattctcccactttcaagtgcactaacaaggctgctgggatttccactggagtgtcaacagcagtattcttgttgcaggaactctcagaatttgggggtccataacaggttcagcctatgacccaggtccaaaagttccagccttctctgccacctccagagctagcttcaggttctggtcaaagagctcacacctgataggcatttctaaggaatagaatggattcttgagggcaaagtctgagtaaatctcataaatctttcggagaagagaatctattccagcttgcctaggatctgctagaaccacaaactcctcgtgc

SEQ ID NO: 65228 - DNA, 949 bp, Homo Sapiens; identical to SEQ ID NO: 19172

SEQ ID NO: 65229 - DNA, 771 bp, Homo Sapiens; identical to SEQ ID NO: 19757

SEQ ID NO: 65230 - DNA, 644 bp, Homo Sapiens; identical to SEQ ID NO: 19760

SEQ ID NO: 65231 - DNA, 273 bp, Homo Sapiens
gggttctgttataaatctttattttttaagacttgaacacctgcagaattaaatacaaaagcaatcaaaaatcatcatattttctaaaaacagttttccatttggggcttgcggccctcttcaataaaatcattctgaagatttaaagaggtttcagcttcaaattctcagaataaagactccttttgagaggggctacagaagcccccatgagcttcctgctcctcaaaactaacaggcaaaacaacaaacctcctagaaagcaaacggacg

SEQ ID NO: 65232 - DNA, 865 bp, Homo Sapiens; identical to SEQ ID NO: 19769

SEQ ID NO: 65233 - DNA, 951 bp, Homo Sapiens; identical to SEQ ID NO: 19784
  misc_feature (48)..(58): n is a, c, g, or t

SEQ ID NO: 65234 - DNA, 1314 bp, Homo Sapiens; identical to SEQ ID NO: 19790

SEQ ID NO: 65235 - DNA, 416 bp, Homo Sapiens
acaccaacctgcttccactttattcttgtttacacattctcctgctcccagatttggagtcagaacactatgtgagctcaacagtcctgctcagagccatgttccatatcccaccagtttcccttttcccaacccccacccacccccactcagtaagtccccttgcccaggttttgctcttggagggaagaaagcagaagaaaagatgcaggactgagatgattgtcctgaccccgctaccctcaagtgtaagagaagtcctggatggaatgggtggtgattccaatgagggatgggaacctctttccaaggcacaaggggccatcttctcaacatgctgctttttcagatttgggtagtatgttggccaggagctgggggctgcagcgcctccagctgactgaggaggagaggaa

SEQ ID NO: 65236 - DNA, 859 bp, Homo Sapiens; identical to SEQ ID NO: 19186
  misc_feature (688)..(713): n is a, c, g, or t

SEQ ID NO: 65237 - DNA, 502 bp, Homo Sapiens; identical to SEQ ID NO: 19814

SEQ ID NO: 65238 - DNA, 1480 bp, Homo Sapiens; identical to SEQ ID NO: 19818

SEQ ID NO: 65239 - DNA, 1399 bp, Homo Sapiens; identical to SEQ ID NO: 19827

SEQ ID NO: 65240 - DNA, 908 bp, Homo Sapiens
  misc_feature (55)..(64): n is a, c, g, or t
gcacgaggccaaagatttattgaagcagaaccaagttggttggatacttgctggnnnnnnnnnngcagttttaatggtattcaaaataccttttaaaaagtattctagcacaagatttttctgtaaactagattatgttgtaaacttttttctaaatcttgtaggagtgtcggttgttaagaactagagcttattcctattccaaatctatcttgcgctcctgaaaaactgcagaaaggcacttgaaagctgtttctttaagatatggatttcttttttattcttgctggtaatatattgctgcactgagtgtgtgcaatttttattcaaggtcatcgtgatgctgagaagtttcgttgataacctgtccatctctagtttcaaccgtcttaatcagaagtgtcctttttgagtgggtatcaaccagagggagtgaatccagattagtttccctcaggttcagggaggaaaagtttggaagaggcagagaaatcctgctctcctcgccttccagcagcttcctgtaggtggcaatctcaatgtcaagggccatcttaacattgagcaggtcttggtattcacgaaggtgacgagccatttcctccttcatattctgaatctcatcctgcaggcggccaatagtgtcttggtagttagcagcttcaacggcaaagttctcttccatttcacgcatctggcgttccagggactcattggttcctttaagggcatccacttcacaggtgagggactgcacctgtctccggtactcagtggactcctgctttgcctggcgcagggcgtcattgttccggttggcagcctcagagagtcagcaaacttggatttcctcttcgtggagtttcttcaaaaggcaatctcttcttgcaaagattcactttgcgttc

SEQ ID NO: 65241 - DNA, 636 bp, Homo Sapiens; identical to SEQ ID NO: 19882

SEQ ID NO: 65242 - DNA, 727 bp, Homo Sapiens; identical to SEQ ID NO: 19883

SEQ ID NO: 65243 - DNA, 741 bp, Homo Sapiens; identical to SEQ ID NO: 19898

SEQ ID NO: 65244 - DNA, 763 bp, Homo Sapiens; identical to SEQ ID NO: 19899

SEQ ID NO: 65245 - DNA, 665 bp, Homo Sapiens; identical to SEQ ID NO: 19905

SEQ ID NO: 65246 - DNA, 1257 bp, Homo Sapiens; identical to SEQ ID NO: 19917
  misc_feature (1130)..(1139): n is a, c, g, or t

SEQ ID NO: 65247 - DNA, 1121 bp, Homo Sapiens; identical to SEQ ID NO: 19918

SEQ ID NO: 65248 - DNA, 857 bp, Homo Sapiens
ttttgtttttttttcaatttgagagcaggtactgtttattaaccaaccagcttagaaaaataatcatggtagacaccttagttcattcttctaataagcctgttgatctggtcctccctgttgccagcatctccaccttctacaaaatgggtggtctttttcttcattccacctcgtggagaagacaatttgaagggccacaggaagttatttgcctctttgaagcgttttccaacagtatagatctcatgaatcaaatcctccatgcagatgatgccgtatttaccaagagatcgagcaatcaaagcgttatctgtcaaagcaattcgcttcttattgattttgccataaccacgcttgtagattagttcatttactgacttcagattggggtacccccatgcaatatatggctctacaatcctcagcatgttaatcgaagccttgttgagcttcacaaaggttccattgaagatttgacgaaggcgaagaagctgcaacacctttcgaacctttgggctcactccattgatacctctgattctgatgacaaacgccaatttgggttctgcaggtacatagaagttgccagcttttcttgccatcctcgccattcgaatttcagttctgtacatctgcctatattccttgtgatagtgctttgctttttcatagataagcttcctccttgcctttcgaagcatcttttgggcaaacttctttctcaggcgcttgatcttcagctctgcgaaattccttcgctttttcttaagggtttctggcacagcaggaacctccttcttcttctcttctacaccctccatggttccctcgtgccgaattcctgcagcccgggg

SEQ ID NO: 65249 - DNA, 594 bp, Homo Sapiens
aaatgcaacatacaaactttattgaacaaaagtaaactgtttcagtaaactcaaacaggcacttaagagaaaaactgactggaagaacttttatcttaaacatcttacagtaacctacttgcagttgcatttaactgagctctgttgctgtgaagaatacagctcatgcacaggtatggatgaaagatttgtacatttctcaagtattcactgaatactaccttatatacacatatacattaaatttgaaaaagatttgacgatccccagataaacttcatttttgttgatcttttggaagaggtcgtctaaagagaagaatatgtggttctggctcatgaatcatgtaatgaacccagcctagactctgttggacaccaagtctcctccactcctcttcagacatcagatgagttttaggtacttgtttggaaagttctctgggtaacataacatgccggtactcgtagtgttcgtcgaagtacttgtccgagtagtagatctgcttgtgggccatcctgctggcgcgctgcagaaaatgaaacgagagcgcgaagagcgggcgcagcagacaaaaccacgtccacctcgtgc

SEQ ID NO: 65250 - DNA, 807 bp, Homo Sapiens; identical to SEQ ID NO: 19924

SEQ ID NO: 65251 - DNA, 871 bp, Homo Sapiens; identical to SEQ ID NO: 19925

SEQ ID NO: 65252 - DNA, 815 bp, Homo Sapiens
gcacgaggggactctgtgcatggtatttccggtggcagatgtgtaagattttttatgtaaatcgtgttgttttagcagaggactatcagacctgacagcagctggacatcgaggtcctcactggggtggtgactgccacgctgatgctgagtggaagccaagccccttcagtcagagctgggccgatctcagacccaaatgctaccaccaccaagccctgtgtcgcgacggcagcggctgcagtcaccagaaacaatccttcctgcctcgacacccgtgccagccccagccaccctgacggcgggctgtccacggaaatgccacggccaagagcccaggtccttcacgctggcctcttccctgccgggctgggctccccaatgccttcagagttcgttgtgccgagctctggagatcctgccggacaggtcctgcagatgcttcttcaccgtgtagcccagctccttggtccgcccctccagcagggcgtgcttctcgcggctgcggctcacacgctcgccgtcgcccacgctctctgcgtgcctcagcttctcgtgcgcaatctccagctgcttctggtagtggttgtgcttctcgattttggcttcgaagtgcttgagctcctcccggaacgcctccagctccttgtccgtgaggttggcggactgcgccaggtcccacaggtcaatcaccctgggctcctcgaactcagcctcagtgctgtagccctggtggctgaccctgcgcaggcggtccaggccctggttgatgctgcgcagcttctccttcagctccgtgtgcctgctgtgcaggac

SEQ ID NO: 65253 - DNA, 1178 bp, Homo Sapiens
gcacgaggtgagaagagattttagttattcagtgttttcagagtttcaacaagggatacagatacaagcagcttcttacagagtttacaatctggggagagaacatgaaagacactgtttaacaggcaaataattccaggaataaatatacatgaatgtgtttttcaaaatacaggttcttatacaaatgtataactaaatactgattccatagtggggtggttgtaactgaaagggctttgagaaaaggctttgaataaaactagtcatccacctagccaaagatcctttccagcagcacaaaaggaatttgtaaggagaacagagattaactgtcagatatctttctaatctgtaaatttatccaaagtttgaaaataccatgaagaatcttaggaatgccagtaaccagggaatgggatatttgcatatcacaacatctacaggctaaatacactccgaatgcttctcaatgtggggaagtatgagaagttaataattctcctagtgtctggcttcctttttctttgcctttccctctcatacgttcaatcacctgtgttacaggacacacataagtagttggaaggtgttaaactttgacagcaaagcaaaatcagaggtagaggcaaatgtttaaccaatcatgttcaaatataagctactcaatgaagagttttaggtttaaagagcgaaatattcaccattactgagaaatctcagtttctcattcaatttcgcattgcactttgctaccacaaactaaatgggtgtacatttttgagtgctgatttattactcaaaggtttgaatttggagactgaaacaaaccatgctttatctgtgtactttgagaaaatccatccacaagaaaggagccaagcgtcagtttccaatggggggaacattctcatggaggtactgtaaggctaagtctgtccacttcatttcttgttctttgacagattctgtggtgccaccattgtcttgttcaggttcaggaagctcattcagtggtattgcgacatcctcataaggcagcttgtcttctcgccaagcatcatcaatcaaatccaagatccttccatctctctgaacctcactgtccattttcctgcagctttgatcttgtcaaatcggcacccggccaccgcggcagacgcttgctcccctcgtgc

SEQ ID NO: 65254 - DNA, 634 bp, Homo Sapiens; identical to SEQ ID NO: 19201

SEQ ID NO: 65255 - DNA, 919 bp, Homo Sapiens; identical to SEQ ID NO: 19947

SEQ ID NO: 65256 - DNA, 320 bp, Homo Sapiens; identical to SEQ ID NO: 19948

SEQ ID NO: 65257 - DNA, 840 bp, Homo Sapiens; identical to SEQ ID NO: 19950
  misc_feature (483)..(531): n is a, c, g, or t

SEQ ID NO: 65258 - DNA, 901 bp, Homo Sapiens; identical to SEQ ID NO: 19961
  misc_feature (444)..(453): n is a, c, g, or t

SEQ ID NO: 65259 - DNA, 1117 bp, Homo Sapiens; identical to SEQ ID NO: 19963

SEQ ID NO: 65260 - DNA, 746 bp, Homo Sapiens; identical to SEQ ID NO: 19969

SEQ ID NO: 65261 - DNA, 805 bp, Homo Sapiens
gcacgagggtttaattttcgactcacagttccacatggctgggaaggcctcaggaaacttaacaatcacggtggaaggcacctcttcacagggcggcaagagtgagaatgagagccagtaggggaaatgccaggcacttataaaaccatcagatctcatgaaagctcactatcatgagaatagcatgagggaaactgcccccatgattcaattacctaccacaacacctgggaattatgaggattaaaattcaagatgagacttgggtggggatacatccaaaccatatcaatccatatatggctgaaatttacatcagacaatggtaaatatctatgttcaaagtccattgatgctttgagattctgagctattttctggtatggaaaacagacttagcatctccatctccattggatgtatgctgcctcctgtgatgatcaaggaatgcaatggttctcccaagtccacagtgcacatttgccttaaagtgcctgctgcaattttctggtcgtcggctccaaccctggctaagccaacacaaagtgtctcctcggtaactgctggttcttctcctcgtattctttgattttgaacaatctccagaagctgctgggctgcttggtttacactcatataccgtggaggttcatagatcttccttcccttgattagattttccaaagactgctcctttactttgatgtctagtaaacataatgtgtgcatgccattttgtctgttcttcctccctttgtcaaagaagctttctggtctccaagtgtctgtcccaaaaacaatagaa

SEQ ID NO: 65262 - DNA, 1326 bp, Homo Sapiens; identical to SEQ ID NO: 19976

SEQ ID NO: 65263 - DNA, 888 bp, Homo Sapiens; identical to SEQ ID NO: 19204

SEQ ID NO: 65264 - DNA, 852 bp, Homo Sapiens; identical to SEQ ID NO: 19998

SEQ ID NO: 65265 - DNA, 858 bp, Homo Sapiens; identical to SEQ ID NO: 20031
  misc_feature (504)..(522): n is a, c, g, or t
  misc_feature (573)..(586): n is a, c, g, or t

SEQ ID NO: 65266 - DNA, 1212 bp, Homo Sapiens; identical to SEQ ID NO: 20032

SEQ ID NO: 65267 - DNA, 925 bp, Homo Sapiens; identical to SEQ ID NO: 20037

SEQ ID NO: 65268 - DNA, 485 bp, Homo Sapiens; identical to SEQ ID NO: 20050

SEQ ID NO: 65269 - DNA, 753 bp, Homo Sapiens
gaacgtacacaagctttattgggcaacagcaacgagccacgctggcaaacaatgaaagtaaagtccctcaaaaacacgaaagatcatatgtgtgtcatcacagcatcgagaatttaaatcatctggaagttcctgctaaattaaagcatactgtgccagagctcccctctaatcaaaaaacgctgtcctggtgaaaatttgcaatgaggattacagagagagagatcaaccagtgaggaaatcacagactcttacatgagtttacagttaaccccactgcaacaaaataataaattagccataatttgttttttttgcaaataccatgccccccacctgaccccacaaacacaacagtcactgacatggcccagctatattaacagactgcgcctcaaaccatgctgtggcggaaaagacagattcccgggtaatgccgctttggcctgagaagatgcttcggaactccaggtggaggagctgctcacgctgcaggatgctttgcaggttcattcaaaacccaatttttttccaagaagaactggacataattcatgggaatattttaagtatatataagtggcaaaaaagctgtacattaaaagaagggggagaaataaaatgtgttgtatttacaaagctctttgtatatttttttaaatgaaaacaaagctgggagtgatagaaatttaatgcaatgaaaacccaaataattcttcaaaaacctttagatgacatcattctctcgctctt

SEQ ID NO: 65270 - DNA, 598 bp, Homo Sapiens; identical to SEQ ID NO: 20060

SEQ ID NO: 65271 - DNA, 770 bp, Homo Sapiens; identical to SEQ ID NO: 20065

SEQ ID NO: 65272 - DNA, 941 bp, Homo Sapiens; identical to SEQ ID NO: 20067

SEQ ID NO: 65273 - DNA, 522 bp, Homo Sapiens
gcacgagggagggagcagaggcagctgcctttattgggggccatgggctggctgatttcagtcaaaggccacacatttgatcttgaagtcaccgtcagctgccatgtagttgatggcctccaggttgaggcggttggggaacttgaattcgtatccatctggcagcttgacggtcaggttggcctggtcgaaggtgatgcacacctctgcaacacttccaggctggaagggaaagacagcctcccgctgctcggtcccccaggccccgccgtccttgctgttgcacacgatggtgttggcgtcgccgtgggcgttgaagcgagggttgaagtgcaggcacaggttgttgctgtctttgcccaggttcagcacgaagctcttagcgtcaggagccacctcgcctcgcactcgaaggcactctccaggtttgagattcaggttgctggcgaccagaccacaagccatgattgagtccaggaggatgttcccgggcaggcgcaccagctgtcagcggacgcgtgg

SEQ ID NO: 65274 - DNA, 1136 bp, Homo Sapiens; identical to SEQ ID NO: 20079

SEQ ID NO: 65275 - DNA, 855 bp, Homo Sapiens; identical to SEQ ID NO: 20094

SEQ ID NO: 65276 - DNA, 380 bp, Homo Sapiens
gcacgaggggattttaatgtatgatggtctttatttacaactttattggcaaaaaagaaaagggaaacttttaaacaatttaacacagggcattgtagctgatcctgtcagataaagaagttccattttaaatgtccatctaattgtccaaagatacacaatactgaatctgcatacgcagtttcctttatgaagtacagtgctcatgttttaggcagtcttctaaacatacaaatacagaggaaattaaatcactcattaaaaactgtgtcaaatgaagggtattttaaatataagtttgttgtttctggtaatagcacatgcccaaatgaaaaccaaaagatggaaaggcagatacacttcttacttgggcctcgtgc

SEQ ID NO: 65277 - DNA, 719 bp, Homo Sapiens
gcacgaggacgttggcagtgacatttatttttctgggggaggggagttatatacagcagtgacccggagcccctcacccccaccaggcttaggtggggacaggaggcgttggcagaaggcacacagtggcagtagcccagaagaggccaggaagtaagggtgggtatgtgatgtgtcctgggagacccagatgaggaaattgaggctcagtgagggcctcaggtcacacagcaaggtgcgaaggcagctagtcccgagagcttgtggtggttgcttctctcttgcctgggctacaggaggacgcaggggcagcccccgcccttcttcctgggggcactgggagggctcggtgggagctcttgttcctggtatttccggacagcccgcaccagctgctcaaaagcctcgtccacgttgagacgcagtttggccgaggcctcaaagtaggccacgtggtgggaggcgccgaaggcagaggcttctgatcgggggacctggcgctgtgactccagatctgccttgttcccgaccaacacaacggggaagtcgtcgcggtccttgacccgcagaatctgcgtgaagagcttgcccacctcgttgaaactctgccggtcattaatggcgaacaccagcaggaaaccgtggccagcacgcatgtactgctctctcatggccccgaactcttcctggcccgcggtgtccagggatgtccagccggg

SEQ ID NO: 65278 - DNA, 918 bp, Homo Sapiens; identical to SEQ ID NO: 20119

SEQ ID NO: 65279 - DNA, 842 bp, Homo Sapiens
gcacgaggcaataagttcagagtcacataacacataaaatcaacatttaaaataaatagcaaattcacatctagaataaataggtctgcctaatttgcattaattgtgcctgatatcatacaggcacaatctgtcattccatgagataactggaaaagtctccaaagtcagagttcaaacctgcaggactgaaaacacacagaagcactgtcgcaggttgggttccccgaaagcagatactgaggtggagaatggcgtgcaggaaggttcataggacagtgctgtgggctgagccggctgggtacaggcttgtcagggagaggcactgggctgtaatgtggccacaatgaggtctcactgaccccacaaggggctctggagctgggatggccccagagggtttcccaagttggggtgaggaggccagccctttgtaccccatatggagccggtaagggttacaggcaggaagggggtatgatctggggcaggcagggctcttcagcaggggaaactcctcataagggctggaagtaaatggccagccagcagcactcccagctgttaggggagtatgtccttcagtctggaaaggtcatccgggcagctgagctcagcacccagcactagcacaattacaaactaatgcaatgagaggtatattcaacaagtgtctgagcctgatggctcaagtacacacactggccatacatgtactatgcccaggaagtagctcagagggaatacagtgcacttattacctacagaaatttctcctctctgcatcccagctataaggttattcatctgcatgttctcagcaagggaatcttgccattgcc

SEQ ID NO: 65280 - DNA, 1074 bp, Homo Sapiens
gcacgagggaggtttgcagctattttatttacaagtatacatttaacacaatgaaataaacactgatatactgaagcctagttaatagtagtgtaacaatatgcatcattttgatgattacattattttaaacaacaaactacactgaaaaattaatgccgataaaattcttggtcataatattaagaaatacaatatataaattgaaaatatgattgcttaaaatttgaaaatggaagtgaactcatttggacagactcagagttaacataatctgaagggaggggagctctgacccaaatgatatctttcaggttaacagaagaaaaaagaagcatagtttatcttcaaggagaacgggcagtttgcttcttcaggtagaatatattcccagtgtcctcaggctttgcagcagaatcacatcaccgagcatgaagacttgccttgtgaagctgccccgtccattttttctgcctccaaaattatccttcgaaaaacatccacagcagtctgattttctttagcagaagattccaaaaaagctgcattccaagattctgccaaagctttcccttcttcataactgatcaccctttccatatgcaggtctttcttattcccaaccaacataataggtatttgtactttccccaccatatccaacaatttgccatggataactttaatcacttcaaaacttttgattgatgtaacagaatacacaagaatatagccattaatatctatggagtatgtctgaggaaagatagaatattcatcttgcccggctgtgtctacaagttgaagatgatattcttgtccatttactgtgatcaactttgtaaaagtgttttctatggttggatcgtaggagtccacaaattggccttcaacaaattgaatcgtcaatgaggatttccccacagaccggtagcccaggatcgcgatcttccgggacttggactgcggcatcttggcggcctcctcagccccggcccaaccacatcaaccgcggcggcggtggctcctgctgctgtgatcggcggcggccgcgccgggagagagccctcgtgc

SEQ ID NO: 65281 - DNA, 789 bp, Homo Sapiens
gcacgagggaaaatatcagacatagctttattgctgactcctgcccccttcagagcccatagtcacaggcctcagggctgttctgtaagtagagctctaggaaaccttgccagtctttctcactagtaagcagggctgagactgtgggatcttccttcatggctgccatccacagtttcagttttggagtgtggtctacacactcatttaacttcattgcttccagccgttcaaaccagggccagatgaggtaatcaatcatagagatagaattgccaccaaagaaggtcgtcttcttattagtcagaacctcctctagcttggtaaattctttacgaaattcttcttttaggccatcatagtcttctttattttggcttctaataaagcttcctaccaaggatggcaccttagaaaacaactctaagatcatcttctggcaagctttctcataggggtcatccggcaacagcttcttccctgggtatgcttcatccaggtactcacaggtgatggcagactcgtagatcagctgaccctgactgttttccagaactggcaccagaccaaagggatttttcttaaagaaccactcaggcttatttttcaggttgatattgatgacttcatgcctgattcccttggccttcaggactagacgcgtcctctcagcaaacgggcagaacctcatgctgtagatgcggatcgagccctccgggaccggccccgggggcgcgcttcccttccccaagctcctggctgactccccggacatcgtggcgcagcgca

SEQ ID NO: 65282 - DNA, 866 bp, Homo Sapiens; identical to SEQ ID NO: 20148

SEQ ID NO: 65283 - DNA, 886 bp, Homo Sapiens; identical to SEQ ID NO: 20156

SEQ ID NO: 65284 - DNA, 821 bp, Homo Sapiens
gcacgagggaaacttacagtttattgtgaataaaccactcaactttgagcagatgacattgcctcaattaactttttcgttgaagaaaaacaaagatatatggtaaattcatgaaaatactgtgtcctttctcttccaccctttgtagggcagaaaaattctgcctgacctttcccatcttcctgatgatgttaacaaacgacagccactgagggcacaggagggggctctacacaggccaagagctacaggctacagtctgagcacagaaaaccctccagctccagcatccagggccacagctggacacaagtacagaacctggcagccctgcagcccagacaatgcccagggtgtgatttagggtgcagagctgcaactcagatcctgtgccatggcagtatcacaggaaggacttgacggagaggtgaaggctccagacgccaggatatttattccctgtgccaatacagcattcacacctgacctccaggtcctgcagcaggtactctcctcattcacagttagctccccactgttccattctgggttcatttgctatactcctaatctgttctcccaatccaccccacagtctctcccttgctggggacaacacaggaagagacaaaacctgaggaaggaaaaagggaacctgcaaccagccatggacctcatgatcccatgagtcacagctatcctctgtctttaagaatgactgttttatagcttacatggtacctgggaaattgctgacttgcagctgaaatgtatgaataccaaagaatttctatcacaatattcacagatctccctcgtgc

SEQ ID NO: 65285 - DNA, 1172 bp, Homo Sapiens; identical to SEQ ID NO: 20179

SEQ ID NO: 65286 - DNA, 767 bp, Homo Sapiens
aagctgaaacttacctcatgaataacttgattaaagtagtaggtgattaaaatttcaatagaatcaaatgagacaaaaattttaaactgactcatttgagtttcaactttacagtcattgaccataaagcacactaaaaatgtaagttatttttaaatacatctgaaataaaaatacttactaaaaaggaagaagccgaagatgtatatttagaccagcacacaattttgatttcaattagccttattctaatatttagcttttagatctttcatacacattttcacgtactttgcaattgagaccagaaagacttgtaggtctttctgcagaatgagtgggtccttgcaaagtgagtgggaaacttactcctagatcagaaatgtttgcctctctgagtaaaatgtttctttcagatgagccatagagggggcaccttttactcaacttttctttgttttgaaactttgtttcccatactgttttcagccttttgtttataattagaaattgtgagaagcttcatttagtgtttaaaaatgtggggagataaatcagacttaacatgtatgtaagatcaattcacttaaaagtatggtccaaatagcaaaaataggaccaggtgaaacatgtagtcattttttaaaaacatgtacttggtcttttgtgtgtgtctgttttattccattagaataaatgtgtccttgatgtaatgcaaagcatttcttcctgattaaattgtagatgtagactttacaatataattc

SEQ ID NO: 65287 - DNA, 1770 bp, Homo Sapiens; identical to SEQ ID NO: 20192

SEQ ID NO: 65288 - DNA, 646 bp, Homo Sapiens; identical to SEQ ID NO: 20206

SEQ ID NO: 65289 - DNA, 1338 bp, Homo Sapiens; identical to SEQ ID NO: 20213
  misc_feature (339)..(367): n is a, c, g, or t

SEQ ID NO: 65290 - DNA, 955 bp, Homo Sapiens
acattgagaaaattaatttattcccatgatgggggctgaaggagggcccagagctagagcctggtctcctgcccccttgcctcttcttccagatgaagagaggcttagctgaggcctgaacaggcctgggatggctcttgggcttgagggcctgttctggcaggatggcaagcagacactggacagggtcacttgggcggccgatatgccagcttccgactcttcaggactgaccacttgtgccgctttatggtgtagaccaggggcaccagcagagccatcatcatcaacatcttgagccccatgcgttttcgatggtcgtgctctggctcagatgcccagcgcaggaaggtgcacacatccttggctatctgggacatggtagctggggtgccatcgtcaaactctaagacatctgtgtagatgggaggggccatggcaatggcctggccaggaaagtaggggttgaagtagagaccttcccgcagtgacaccccggtgggtggctcgcagtagcccgtgagcagggagaagacgtagtcctcaccaccatgcctagctcgcacgatgtagctgaggtcagggggcaatgctccgttgttggcagctcgagcagcctcactgttggggtatggttttgggaaatagtcgaacagcttccctggccgcatgaacatctccccatcttcattggggccgtcttgaacctccacctccgcagccagctccttagcttcatcctccgtgtagcacacgcccaccaggtggcggtaggccacgaagtccatgctgtggcaggaggcgcacacctgcttatatacctggaaacccctccggatgctggtgtggtccaaggaagagaggaggccacggtgagaccacggatagctgggggggtgcagctccaggtcactggcactcacagccgaatgcagagccacggccagcctcgtgc

SEQ ID NO: 65291 - DNA, 1071 bp, Homo Sapiens; identical to SEQ ID NO: 20217
  misc_feature (851)..(917): n is a, c, g, or t

SEQ ID NO: 65292 - DNA, 1044 bp, Homo Sapiens; identical to SEQ ID NO: 20233

SEQ ID NO: 65293 - DNA, 921 bp, Homo Sapiens; identical to SEQ ID NO: 20237

SEQ ID NO: 65294 - DNA, 656 bp, Homo Sapiens; identical to SEQ ID NO: 20239

SEQ ID NO: 65295 - DNA, 1938 bp, Homo Sapiens; identical to SEQ ID NO: 20246

SEQ ID NO: 65296 - DNA, 1124 bp, Homo Sapiens
gctttattaactccctctttccgttgtggcaggacctcattagctgcagagctggaagggaggccaagaagctgtggtctcagtacgggtcattaaaggggtacagaggatgccctgcatcccttgggactctcttcccatccaccgtaagcataggcacaatatatctccaatttttgttcagggcatttagctgcttcatctcttctgggctaaaggtgaagtcaaacaccttgatgttctgaaggattcgagaaggagtgatacttttggggatgcagatcactttccgctggacctgccacctgagcaagatctgagctggagatcggccatacttttcagccaatgccaggactactggttcctccagcaggacaggctcatcaggatcacgccatgcacgatcagaggagcccaaagggctataagcagttacctccaggccacgtgcttggcagtgggcaattagctcattttgagccaagtatgggtggcattccacctgcaagacagctggacgcacggaggccacactgagtatgtcatcaatctgccgactgttgaagttggacaggcccagcgcctgcaccagccccttagccaccagtgcctccagagccttccaagtctccttgtagtgggtggagtcgtagcatatagtcccatcagcattcttggggaaggggttgtctccccgctcaaaggcataaggccagtgcatcaggtacaggtccagatactccagctggaggtcagccagagtcttccggagggcaggctccacatcctcggggtggtgcttggtgttccacagcttggatgtcacaaacagctcctcccgaggcaccgccttgcctggtcccacgtcctccttcagggcctccccaatctcaggctcattgccgtagatagcagcacaatcaatgtggcggtagcctacgctaagggcatacttaacagctgcttttacctgaccaggctcactcttccaggtacccagaccaatcagaggcatcttctgcccagtgtgcagtagaacacaggaagccgccattgcccccttggcacaagcacagagcgtgaatagggtactgtggcctgggctcagttctgcctcgtgc

SEQ ID NO: 65297 - DNA, 1307 bp, Homo Sapiens; identical to SEQ ID NO: 20260
  misc_feature (221)..(258): n is a, c, g, or t
  misc_feature (362)..(394): n is a, c, g, or t
  misc_feature (788)..(805): n is a, c, g, or t

SEQ ID NO: 65298 - DNA, 795 bp, Homo Sapiens; identical to SEQ ID NO: 20261

SEQ ID NO: 65299 - DNA, 1626 bp, Homo Sapiens; identical to SEQ ID NO: 20267
  misc_feature (710)..(736): n is a, c, g, or t
  misc_feature (789)..(844): n is a, c, g, or t
  misc_feature (1246)..(1255): n is a, c, g, or t
  misc_feature (1299)..(1334): n is a, c, g, or t

SEQ ID NO: 65300 - DNA, 761 bp, Homo Sapiens; identical to SEQ ID NO: 20273
  misc_feature (612)..(620): n is a, c, g, or t

SEQ ID NO: 65301 - DNA, 860 bp, Homo Sapiens; identical to SEQ ID NO: 20277
  misc_feature (78)..(89): n is a, c, g, or t
  misc_feature (216)..(232): n is a, c, g, or t

SEQ ID NO: 65302 - DNA, 810 bp, Homo Sapiens; identical to SEQ ID NO: 20286
  misc_feature (170)..(323): n is a, c, g, or t

SEQ ID NO: 65303 - DNA, 1104 bp, Homo Sapiens; identical to SEQ ID NO: 20295
  misc_feature (218)..(236): n is a, c, g, or t
  misc_feature (248)..(469): n is a, c, g, or t
  misc_feature (860)..(908): n is a, c, g, or t

SEQ ID NO: 65304 - DNA, 626 bp, Homo Sapiens; identical to SEQ ID NO: 20302

SEQ ID NO: 65305 - DNA, 818 bp, Homo Sapiens; identical to SEQ ID NO: 20303

SEQ ID NO: 65306 - DNA, 814 bp, Homo Sapiens; identical to SEQ ID NO: 20310

SEQ ID NO: 65307 - DNA, 1636 bp, Homo Sapiens; identical to SEQ ID NO: 20311
  misc_feature (1419)..(1443): n is a, c, g, or t

SEQ ID NO: 65308 - DNA, 544 bp, Homo Sapiens
cagcaaataaattctttatgttcaaaacagcaaattcaaatacaaaaacccaccgccatcgtccctccctccctcctgctctgggccagggatgggcctggaaggaaaaatgggaggtggggaggaggttgcggggttcacagcaaactcgtgtcaaatgcggaggtaacaggctccacagggagggggctcctctcaggaggggtgagggcattattgcatttgctggggggaaggacaaccctctcccctgtattccctgcgtcaggaaactaggaaggtcatgacccccaaacaaaacccaaggccccagggagacaaagggaccagtttggcagctgatggtggaaagtggtggaggcgggggtggccgcccaatttggctgatccctcccctccctgtgcctgacccagctgaggtaggtggggaacagggcacaggggggccggggaccccggccagactgggaaccagggaggggatggtaccgattggagcggggcagggggcctggccccacctcctctcaccatcgtccttggg

SEQ ID NO: 65309 - DNA, 679 bp, Homo Sapiens
catcttccaaagtttttaattcattggtttctagtatattcacaaagttgtgcaaccatcattccacaatttcatcatcttccaaagaaagcccgtccctgttagctgtcatgcctcttctctcttcctccagtacctggcaaccaccaatgtgctttgtctctgatacacagatttgcctattctggacatttcacataaactcgtgattggcttctttcacttagcgtaatatttgtaggattcactcaggctgtggcatgcgtcaaaatttccttcctttttatggccaaataatattccattgtatggacagaacacacttcatgtcttaattcatctgtggatggacatttgggttgttgctaccgtttgacttttgagtaatgctgctatgaacgcgggagcacaggtattgtgtggatggatgttttcaattctcttgggcatagacctgggaaggttatacttttattgatattaatagttctgatattggacatccctgctgtgtggtttcacctctcatggactctgacggctgctgtgccttctctgctcggcaggcggtgccctgaggcacaggtgggcgtctggggctggaactctcgctaggcgctacaacttcctctcctgccctgtggcagagccaagccccttgcagggctgttcctcgtgc

SEQ ID NO: 65310 - DNA, 394 bp, Homo Sapiens; identical to SEQ ID NO: 20336
  misc_feature (56)..(65): n is a, c, g, or t
  misc_feature (169)..(219): n is a, c, g, or t

SEQ ID NO: 65311 - DNA, 1175 bp, Homo Sapiens; identical to SEQ ID NO: 20339

SEQ ID NO: 65312 - DNA, 1127 bp, Homo Sapiens; identical to SEQ ID NO: 20344

SEQ ID NO: 65313 - DNA, 854 bp, Homo Sapiens; identical to SEQ ID NO: 20345
  misc_feature (32)..(43): n is a, c, g, or t

SEQ ID NO: 65314 - DNA, 1136 bp, Homo Sapiens; identical to SEQ ID NO: 20355

SEQ ID NO: 65315 - DNA, 748 bp, Homo Sapiens; identical to SEQ ID NO: 20361

SEQ ID NO: 65316 - DNA, 868 bp, Homo Sapiens; identical to SEQ ID NO: 20367

SEQ ID NO: 65317 - DNA, 432 bp, Homo Sapiens; identical to SEQ ID NO: 20369
  misc_feature (306)..(315): n is a, c, g, or t

SEQ ID NO: 65318 - DNA, 1592 bp, Homo Sapiens; identical to SEQ ID NO: 20371

SEQ ID NO: 65319 - DNA, 892 bp, Homo Sapiens; identical to SEQ ID NO: 20377

SEQ ID NO: 65320 - DNA, 944 bp, Homo Sapiens; identical to SEQ ID NO: 20384

SEQ ID NO: 65321 - DNA, 703 bp, Homo Sapiens; identical to SEQ ID NO: 20406
  misc_feature (631)..(644): n is a, c, g, or t

SEQ ID NO: 65322 - DNA, 931 bp, Homo Sapiens; identical to SEQ ID NO: 20407

SEQ ID NO: 65323 - DNA, 972 bp, Homo Sapiens; identical to SEQ ID NO: 19237
  misc_feature (812)..(827): n is a, c, g, or t

SEQ ID NO: 65324 - DNA, 907 bp, Homo Sapiens
gcacgagggagaaatcaaaacacagggaaccaaagtgcaaatcatccaccccccatgggggggccatcctgaaccccacatcaacccctcagcccccttcaggcccccagcgcaggcccagggcctggagcttctgcctcaggtagctcttgagctggggcaggcctctctgggactccagttcctcgaagggtagcggcaggagctggtagcccatcaggcctaggtgccgctccctcagggccctcgagcccagcagcacccggccgtcccggcagaaatgccagcgttcccgcaacaccagcaccaccctctgggcagggtctcgagtagtggcgctagaggcagcctggccctgtgggcaggaccttggtgggtatggcaggaaggggtcctgggtcctcacgggaagcacagcaccagagctgctggcgcacagcaggaagtctgtgcagtagcctggaggcacagtcaggtcctggcggtatttctcctcccccagcagctggcgcaacccctcagctactatgtccttgtgactgtacttgcagcgggcacggtcggtgatgagaggctggggaaagatgggcacttgctgccttcggggaaggcggggaccccggtatcctgggagctccagctccacggccgtgtccagcagggagaggtagcgacgcacaatcagagcatgaggggtgccactgatgtagttgatgaagccaggggaaaaaacaaagtgcagggctctgaagggcaggcaccgcagttggcacagtgacatcaagatgttgactgtagccaggggtgccacccctgcttcccgagccaggatcctctcaaggcagggcataaactgctgttccaggggcaggtagttcagtcgcccaaagggcaggaccaacttctg

SEQ ID NO: 65325 - DNA, 1106 bp, Homo Sapiens
  misc_feature (124)..(134): n is a, c, g, or t
gcacgaggtataattccagaacattttaattctacagagctttaataaaaagcccgacagtttccaaatgttcatcaaaaacagaatgaatatcagtcccatcaataagggggaaaatcaaagnnnnnnnnnnnggagagggtgagagatgtaagagatgaatgaaggttgacaactattctcctttaaaaagagaaacactgcttcctcaatgtcactgaaggatatgaacaggcaagaggaaagtaactgtccatatttgccttatatacagtattgggtaattaaatgccagttgggctgtttaggaatggcttgctaaaacattgaaaaaatgaaagacttcatccttgtcgtagactgccacttcagtggaacattcagtgcacatgactgggtgatagatttcttccacatctgtctctgccttctcagcagcatcttcccggttagacctcatcttcttatggacccgccttttcttcctgttctctgaggctttatatcttagaacctcctctttgttaatagaacaattcattacaaacattgctctatattgagttttgtatgattcatgcctttggcaatcaaggcaaagtgtggtcatgcaggcaggacaattcaagacagcatcactatttggaacaggctgttgttgacgtgatctctgtggtcccaaaccatggtaaccccttctctgtgcatcaacccaggcctgatctctgttatctttttcaggatcatacagtaattcgtcatttgttggaatcttgtgttgtttcttcttttttttcttggtcacctgtactgctctgtcttcatcctcggaatcagaatcaaaatatatatcatcgtagtaccttgtcggagctgttgcaacttttccatttcctgaggaagatccagttcccagagaggataacttgtcctccattgttttcatggtagaatttaattcagcttccatctccttttcaaattcatcttcactagatgattcactttctccggtaagacattctctgatgagttttcgtttttggtcaggagttccatgtaaaagcacatccacttcatcctcagagctgctcaaagcctcgtgc

SEQ ID NO: 65326 - DNA, 258 bp, Homo Sapiens; identical to SEQ ID NO: 20440

SEQ ID NO: 65327 - DNA, 848 bp, Homo Sapiens; identical to SEQ ID NO: 20441

SEQ ID NO: 65328 - DNA, 432 bp, Homo Sapiens
gcacgaggctttatttgaacagaacaagcaccctggccccagggcaaccacttccccaggtgcacagccagggccctcctgtctgcaggagaattcacagctggtgtgggactcagcccctaggccattcacagctttgtctggctctgtacattcattcagcacggggcaggggggccatgccaccagcctgggggctcaccaggcccctggatgcacacaactcaggcagggcacctgtgggaaggcgcatatcctggcggcagcagcacgtggcaccaggtgccaggccagttaggtggatcctggggccccagggagcgcagcttgctgggcagtttcataaaatgcagcccctgcccacacccacctggcttcaggctttggatgtctccaaaccaaaaacctcccactgaaaatccaggtgtgatg

SEQ ID NO: 65329 - DNA, 807 bp, Homo Sapiens; identical to SEQ ID NO: 20446

SEQ ID NO: 65330 - DNA, 1098 bp, Homo Sapiens
ctacacatactccttatatttcattattctaagttatacacaatgttcaacaggagtttgaagtttatttagtaataaacataagtcatggctgacaactgaaaaatcctattcacataaaccatcatagattaaaaatacatagtatttgtactttaatgcaatagggtcccaggattcaaacaaggaaatttgattccagagttggcattatgtagttatgtactctgctacaaagaactagtggaggtaaacttcggcagtaaaattctcaacagtcaaatattaatgcatttcatatacatggctttgcatccgtagaggaagatacagttccttcagcacacgtgccaatttctgagtcttccactagagaatcctcaacagtttcttcttcagaatcaaattcctgattatccagtgattcaaaattatccagaggttcaccattcagtctctctattagctctgccatatactgtacatgttctgctacttctgccagttctttattctcctttttcaggcgggcaatttcattgtccttttgttcaatttctttatgaagtttctcattttccttaagtgcttcatacagcgcctttctccgtttttctgccacttccttccaatactgagaggatggattttctttaatcataagatcaaatgactcctgggtgactcctccaagatttttattttcactagattctgggacaataaccccagggctggaagttgtagatgttaagtggtcattccgatgtttccttttggacaagcctgcggacagctcattttctcttccaacaagagatccagatgcagaaggctgaatcatcttcagagttcttcttgggacagaactattctttatattctctttgatttcttcttgtttctgcttcatactgggattcattatgtagatggtgaagcacagaagatgggtggagacgctcaatcctcgtagcgaacgcacgtagctatggctgcagcacctcgcaaaaggccacagctcacctacgctgatccccacggtcgctggagtgcccggcgcgctctgcagtaaagccctgctaactcccctcgtgc

SEQ ID NO: 65331 - DNA, 1339 bp, Homo Sapiens; identical to SEQ ID NO: 20469

SEQ ID NO: 65332 - DNA, 843 bp, Homo Sapiens; identical to SEQ ID NO: 20472
  misc_feature (38)..(57): n is a, c, g, or t

SEQ ID NO: 65333 - DNA, 805 bp, Homo Sapiens
  misc_feature (45)..(66): n is a, c, g, or t
actgttatcactacaaattttattcaaaaacccatctttgtatgnnnnnnnnnnnnnnnnnnnnnnaaaaaaaattccccttatgaactggtttggtcaatcaactacaacactttctagcagacataaggtaaaaatggcatggctcaaaatcgcccagatctttcacgatctctcgaccgcctcctgtcacgctcccgtccgccgccacctccaccaccgccaccgccaccgccacgaccacggtctctagaccgagaacgacgctcccgggatcgggatcttgatctatgcttcttgcgacggcggccatacaactcccgccgcagctctctggaaatgggcttcaaatgcatgaagttgcagaagccgcctcgtgtgcattctcccatctcatactgacggcagcaggcttctctgaagtccgtcacgggtgacagctcggcgtggatcggctgtccattaaaccaacggttattcaagtcaatcacagccttttccgcatcttcctcacggcgaaacttgacgtacacgttccccaccaggtggtctcccaggttgtcacagacgttcatctcctctacttccccatacttctcctccatttctgtaaaaacctcctcaaaaaactcatcatagtgttcctgcatctccacatcgctcacggcacagcgcaaaccgtcagcagactgggaagagttttgagggttaccgttaatgttcagagggcattggtctgggctaacgtcggtttattgtgcaccgaaagcacctgttctcatgacgacatgctccaattttgaaa

SEQ ID NO: 65334 - DNA, 476 bp, Homo Sapiens; identical to SEQ ID NO: 20487
  misc_feature (390)..(422): n is a, c, g, or t

SEQ ID NO: 65335 - DNA, 1163 bp, Homo Sapiens; identical to SEQ ID NO: 20492
  misc_feature (148)..(158): n is a, c, g, or t
  misc_feature (163)..(181): n is a, c, g, or t

SEQ ID NO: 65336 - DNA, 886 bp, Homo Sapiens; identical to SEQ ID NO: 20495
  misc_feature (235)..(256): n is a, c, g, or t
  misc_feature (634)..(646): n is a, c, g, or t

SEQ ID NO: 65337 - DNA, 982 bp, Homo Sapiens
gcacgaggtttcccttttttcactgtgtaataggacacattttaataaacaaatgatcagcattttacacaatccattttcttcaaaaaatctagagcaagggataacttcattatttgcataacatttcagcattgcagtttgaaaacagctgaactttcagatgaagttgacttctacttgattgcaggattcagggtttctcagatgttaatacagagtcaaaagcggtggataaaaccttgcaaatggcttgtgcttgttccaggctgttgcactgataaacccacaggctgtattcctcattgcttgcatttgtggtcttcagagccagtaagctttttcccgcccccagaccgtcatcgtaacacaccatccggattattaagtagagagcatgcctgtgcaaaacatcatattgatctgatgttgatacttttatgccatacttggaaactcccataataaattcttcctccggaggaacaaaaaggcaactttccatcttgctgggcaacgtctatataatttatcaggtctaatggcccttcaaggccttttccctcggagagtttcagtttctcaatggcaccaacatattttattcgaaattctgcacaggtatctgaattattgttgctttgtcctgagcttttggtggaatatgtgtcgaggctggccacagtgctggatcgtgaaagacccccaaggctagaatccacagacttgctcttagtactgatttcgctactttgggaactgctactactgtgtcgttttttgcccttgcgaaacatttttcaccaccattgcttgatccagagaagatcccctcgcagccgcgggcccatccccgggttgcggacttcggggtccgcgtgggagtgccgcggcctttggcgcccaggcagctactcccgttcccgctccagcgccggcttttccagccctcctgcccacgtccgccgggccgccctcgtgc

SEQ ID NO: 65338 - DNA, 1019 bp, Homo Sapiens; identical to SEQ ID NO: 20507
  misc_feature (32)..(45): n is a, c, g, or t

SEQ ID NO: 65339 - DNA, 720 bp, Homo Sapiens
tcccaagccacagccccgttttatttacactcatcccaaagcacatgatggggctgaaggacgaatctcaggggagcaaaaattagctgaaggccacagaggatagagacggggggcagggggagaacagggaaaggacagcgaggatggacaggccctcctggagcgttctccgtgggctcccgcgtctccttcaggatttggacttggacacagcaagtccgatgagtccggccagtcccgccacacccagggccatgcctcccacgatggccatgcccacgagtccatctttcttcatggccttgtcaatgagccgctccagttccttggcctggttgttctggggctctgtctgcagcaacccgcggacgtactttaaggccttctcgtattccttgagccggtagttccccacggccaggtaaaagacgtaatcccgctgttcctccttgctccctttgggcagcagctcctcgagcagcacgatgcctttacggatgtcatcattgtacttgctccgcaccaggcaccaggcgtactcaaactgcgtgctcttggacaccgagcctgctgccttctcagactgaaatttcttttcaaacttcagcaggtcctccacagacaccagctcgttcagcacggcctccatggccactgcccccgcgagcctcacactacagtctactgtgccacagtctccatggcccagtggggggg

SEQ ID NO: 65340 - DNA, 599 bp, Homo Sapiens; identical to SEQ ID NO: 20528

SEQ ID NO: 65341 - DNA, 665 bp, Homo Sapiens
acgaattggcatatttgtttatttctcagtttgtgaaaatgtccttaatttgttgatgtagcaaacaaatttcaactttgattgctatgcaaaaaaacaagataatctgctttgcaatgaactttatatagttcaactgcatacaggcaacatgctatatatgaaaaagttactaactgaactacaggtattaaatactgaaaagagttaacagtttattataatttattttatttaacaatctaagaagttcgcagccatcagcagttccagtgcaatttcaggtgcaattgggaattcaggaatctcggtggagctgttagtgtagcgaaccttgtacgtaaaatacatgcatactttcgatagcacatgtgaaggtatctctctaaaattgacctcattggtttcgttctcagcaaactgacctgggccactcaacatggcttttatcgtgcctgatgttaatgcatgttctctttttacaataaattcatggccatcagatgatatcaatttgacatacatggcatcaggtccttcacagccaccataggttttctcctctccatccattttgttcttatgaaattctactttgcttccccaggaactttagtagtttctcgtcagtcccgcagccaccgcagccgggtcccccctcgtgc

SEQ ID NO: 65342 - DNA, 853 bp, Homo Sapiens
ctcgtggtcttctgttatcctttctgcaggtcgcttcttcaaccccttcattttcctggtttgtagtttgcttaggtcttgcttctgcatatgaatccttccataagttgtaccaaaagtatcatgggaaatatttttcttcttctttggcttgagagcttttggcattttcatagataatttataaaggtcatccgatgccaggtgtgtcctcctcagaaccagatccaatgagggtcccatctcttccaattcaatccgtggtgttctgcaaccagatttcttcaacagcaacttatagcttcgaaagtaaatcttcccattcagtgcagtgaagtgcagaacatactctaatccagccaggcggatatttgatactgtggggcctctgaagaaatcaataagaagactttttagtcttctataatcttctgttacatcgaaatcatcgccagcaaatatcagcatgggttttgttccctcaggacatttactgttcttaatgtcttttagagagacaaaattctcaatacctaattcaatcatatccagcacatggtagtcatacatacgacctattactagattatttggccgcttcttattatgggagccaaacatgaataaagaacaatctgacttctttgaaaagaattccagtgatgtctgatcctcaaaaggtcttgtaatatttttctttttatatagtacaccgtatggttttttcagtgcatacacatctttaagtacttttgtcactgttgcatttgcatttccccctttaatcagcatggcatttttaatattttcattgagtttcggttctctcttctcaagaatctcttggctcttt

SEQ ID NO: 65343 - DNA, 775 bp, Homo Sapiens
cttacaaatcacatatatttacattgtggatctgggatacacttatcacagtaggagctgctcaaatcaatctgaatgctacgcaatctgggaacctccccataactgtttgagccagcatttcagattatagataagctgtttccagctggactgggtttggaaagttcactctaaagaatgaagtcacctgttgtcactgtcctcctctccaggattccttttggggccaggtaccatcctgtggctccttaaggaggcttctctctttaattctccatgaggcatccagggtggtctgggctatgggaagaacccttcaacttgggagtagacaggtgctccaattcatagtgcccattctcagaggccttgtgtgtgagtttctccttcatgccttccttctggctcttcttgtgctccataatctgctggagctggtgcccagcatagtctggcttggtggtcagcgggccagccggcacagctacaccaaggacatctgacaccatgtaggggcgcagccagcccaccaagggagtgcttccggggctgtagtgggtctgtttgtggtagaagagaagtccatctacctcaaaaggggaaatccatagatagcacatcacacaggctttcgggagtgcaagggaagttctttagccccacaaatttaaaaggattaagcttggttttctctccagtccttcttcttctggtaactttgaatgcatccagtagaatcgaaatcaatctggcctcataaaaaggtgtcccc

SEQ ID NO: 65344 - DNA, 1409 bp, Homo Sapiens; identical to SEQ ID NO: 20549
  misc_feature (351)..(360): n is a, c, g, or t
  misc_feature (639)..(648): n is a, c, g, or t

SEQ ID NO: 65345 - DNA, 1130 bp, Homo Sapiens; identical to SEQ ID NO: 20551
  misc_feature (505)..(533): n is a, c, g, or t

SEQ ID NO: 65346 - DNA, 377 bp, Homo Sapiens
ttctaatgcttcatgggtcaaaaccagtggtttctttgggggacctctctaatcaatcagtgctaagggattgagggttgagtgttgaagaagaggaaagcactcagacttatttgggcacttacacaagattccaaattccccattgcttccagaggcaggggacagcacaacctgctctggaggcctcactacgagcctggctaatgtcggtgggactaaaagccttacaattttggtcattcaactagaaagaggcctacggtccacacgcaaaactggaggtcacccctagggccatctgtgcatggaaaccaccactctggagctggtagggagttggagggaggggtgctcacttccgggtggggtttcca

SEQ ID NO: 65347 - DNA, 1182 bp, Homo Sapiens; identical to SEQ ID NO: 20566

SEQ ID NO: 65348 - DNA, 238 bp, Homo Sapiens; identical to SEQ ID NO: 20569

SEQ ID NO: 65349 - DNA, 718 bp, Homo Sapiens
atcccccgggctgcaggaattcggcacgaggaaaggttccaagggacaggaccaagaacgaggggctgagacatttacaacagcaggcattttctcttcctcttcttcacgggaggcgggcagaggactgctcggatcgcttcgtcaaacactgtcttgaggcctcgctgtgtgagcgccgagcactccaggtattttacagcaccaatctccttagccatggctagaccctgcggataggtgatgggagtcagcttcttctccttcagtttctcgatcgtgtctttatcatccctaagatcaagtttagttcccactaggatgatgggagtgttgggacagtggtgccgcacctcaggataccactttgcacggacattttcaaatgatgcaggactcacaagggaaaagcaaattaagaacacatctgtttgcggataggatagggggcgtaatctgtcataatcttcttgtccagctgtatcccataagcccagattcaccggttttccatctaccataacattggcagaataattgtcaaagacagtagggatatattctccaggaaatgcattggttgtgtaactgatcagtaggcaagttttacctacagctccgtctcccaccaccacacacttgatggcctgcatcagggccgctcgctgggccgcggcggcggcggcagggcgctgagataggaagcggcgcctcgtgc

SEQ ID NO: 65350 - DNA, 1561 bp, Homo Sapiens; identical to SEQ ID NO: 20584
  misc_feature (272)..(291): n is a, c, g, or t

SEQ ID NO: 65351 - DNA, 628 bp, Homo Sapiens
gcacgagggtttattgtaggtattgtgtttcaaaaaatttatagcataaataacttttcatgtcataaaataacttagtagaatttataataaaactttgagaatttaatatctcatcaaaatacaataaaatatggttttcaaatatgattaaccctttcggcttttcttttacttgagggcatataaaccaaaaatacccaaactatggctgcacacttaaactttaacatatttggtttattttaatgtaactcaaccattctaaattaatacatagttttccttcctgcatggttctttgtaatttttgttccttttgacttatttttctgtttcaacacagcttccttcttcattttcacctctttccatctgcaaagtcatctatctccgggcccccagaacatgtagttgaactcactcagccccttggcatcagtttctgtaatccttgcatcagtgtagggagtaactgcttgagtaactacaaaggtatttcaaaaacttcagtgcaatttggttcagttattttcattcagatgccatcaccgttcagggagattaatcactggaacccattgatccatgtagcgactttcccggcaaaaacaaataagttgactta

SEQ ID NO: 65352 - DNA, 769 bp, Homo Sapiens; identical to SEQ ID NO: 20594

SEQ ID NO: 65353 - DNA, 1411 bp, Homo Sapiens
  misc_feature (430)..(438): n is a, c, g, or t
  misc_feature (768)..(776): n is a, c, g, or t
  misc_feature (902)..(910): n is a, c, g, or t
ctctaacaagtttacagcagtgcacagcagttacagacatttattttatagtaagaaaagtacaaccttatttattaaacttgaggtgggcaggggagagggaggaaagcacattcgggaacgagttctcaaactaatgctcaaaaccggtgtccagtgacgtaaaaaccactttcccaaatggcggagcctttccttccctggggatagtggcagagggagtgaccgccaccgcagcatgcctgctgactccctctcagtcccactttccatttctattcttttttatcaaatggcattcttggaatcaggaattatcactatcacctataagttatttatcaagttgatagttaaatcattaaagaaaaggagtatcaggggtagctgctcacattgtggggcaggaaaataggatttgagggctgcnnnnnnnnnccaaggaaggtatcacactcctgtccccaaataattttttcataagttaatcatgacttcttaagggcaaaactataatggatagctgagtaagactagtgctgaaaactggacagaaggacccagaggtgttctttcattttctctcttacctcaatctttcccttttcaagctacaggtaaaggctctaccaccattaaggtattgacttatcctatgaattgattccttcttcttctgagttctaagatagttcttttatcagtccatcaatttttgtgcttgatactgagggttaaagggaaaggaggggagaaaacaccaaattnnnnnnnnngcttggaatgcaggctcaagctgacactggagtattttccttcatagtacaagtaacgacgttataactattaaatggtgttttagtaactgttgcatttctggtttccatgtacttattctgccnnnnnnnnnggcgattccaggggagttttgcttggatcttttcaacaattgacttggtctgatctcgggcgatgccaacatagtgatcaatctgggtcttgtacttctcatagacaatcgggacactgaaaatgaccagttcaccaagaattagaaaggtgattccgttaaaaacaccaccaacataggtcatcagccacatgaagacacccaccttcaaagagtcaaccagatcttctaccaaaaagagacgaataatgagtttcagggccctgttgatgtgcaccatgccagcattcatgtaattatggaaagcttctgaggacagaataatgtctacgtccaggtaggctttgaatggatggccttcttctgacttctgtacagcttggatgacggacttgtagatcctgaagctgatggtgacagagagaagagccaggatgaggtaagaaaccacactgatgacactgaaagctgccagggaaagcagcatgatcacctcgtgcg

SEQ ID NO: 65354 - DNA, 1129 bp, Homo Sapiens
gcacgaggctgagacacgttggtcgtcattgcctccgagcccactttagccctcagctctgtatcagaaattggtctcttcccatggcgatgtccatctgccaccgtggcactggtattgctttgagtgcaggggtctctctttttggcatgtcggccctgttactccctgggaactttgagtcttatttggaacttgtgaagtccctgtgtctggggccagcactgatccacacagctaagtttgcacttgtcttccctctcatgtatcatacctggaatgggatccgacacttgatgtgggacctaggaaaaggcctgaagattccccagctataccagtctggagtggttgtcctggttcttactgtgttgtcctctatggggctggcagccatgtgaagaaaggaggctcccagcatcatcttcctacacattattacattcacccatctttctgtttgtcattcttatctccagcctgggaaaagttctccttatttgtttagatccttttgtattttcagatctccttggagcagtagagtacctggtagaccataatagtggaaaagggtctagttttccccttgtttctaaagatgaggtggctgcaaaaactccccttttttgcccacagcttgcctactctcggcctagaagcagttattctctctccatattgggctttgatttgtgctgagggtcagcttttggctccttcttcctgagacagtggaaacaatgccagctctgtggcttctgccctggggatgggccgggttggggggtgggttggtgaggctttgggtgccactgcctgtgggttgctggcttaaaggacaattctcttcattggtgagagcccaggccattaacacctacacagtgttattgaaagaagagaggtggggggtggaggggaattagtctgtcccagctagagggagataaagagggctagttagttcttggagcagctgcttttgaggagaaaatatatagctttggacacgaggaagatctagaaaattatcattgaacatattaatggttatttctttttcttggatttccagaaaagcctcttaattttatgctttctcatcgaataatgtaccctttttttc

SEQ ID NO: 65355 - DNA, 1120 bp, Homo Sapiens; identical to SEQ ID NO: 20606
  misc_feature (817)..(826): n is a, c, g, or t
  misc_feature (866)..(874): n is a, c, g, or t

SEQ ID NO: 65356 - DNA, 1492 bp, Homo Sapiens; identical to SEQ ID NO: 20609

SEQ ID NO: 65357 - DNA, 369 bp, Homo Sapiens
gtggttgtaggaaccaccctacagcctaaaaaactttattaagatcttattgcttatgcagttaaagaaacactgattgagctacaggtttcctgtacctggtctcaggtcactctgtgcaaagcttccccaggctgttgggagctgggaaactgctaggcaggggcaggccccagagtgggaagcatggtacctcctaagaacctcagagtgggtagcgggcttcaagacagccctcagggtgaacagaaaggtcaggagtgtcggcttaagccagggcccaggggctacattccctgaaatgaatcaagcccaaccctctctggggtttccagaacaaaggctaggtgtggggagcagcactgtgga

SEQ ID NO: 65358 - DNA, 1010 bp, Homo Sapiens; identical to SEQ ID NO: 19253

SEQ ID NO: 65359 - DNA, 743 bp, Homo Sapiens; identical to SEQ ID NO: 19255

SEQ ID NO: 65360 - DNA, 794 bp, Homo Sapiens; identical to SEQ ID NO: 20630

SEQ ID NO: 65361 - DNA, 1227 bp, Homo Sapiens; identical to SEQ ID NO: 20647

SEQ ID NO: 65362 - DNA, 509 bp, Homo Sapiens
gcacgaggctatcgacaaagggagacaaagtcaaggggtgaagggaaaggagggccaagtagagcctccacgaccctcggcttcctcctcaccagctccccctccctccaagtccagtaagaagttgggccaagctggaagggattgaccgggttgcttgtctggagatggagccactacaggcgggcctgggcgcctggagtcgggcatgaaagaaaatagcgcctcatcgctcttatctaagcccagagacttcgcttgaaaagatcgagaatggaggaggggatcggcactcacttgcagacatcaacagtttccagaaaattcggttcaattccttcaccacggacccaccaaccaaggagctggcaaaacccactaaccaaccaggagaacacagacccggtttgtcttttgacaaccgagtggaactgacggggccggcgcctgccctgcgggtcccctcccttggctgagaagaaaaccaaataaaccttgaacagccttga

SEQ ID NO: 65363 - DNA, 1009 bp, Homo Sapiens
ctcaaaaagaaacatttaataggaacttacaaacagaagcaatgtttctagcagccactaaatggcggcactcaccctcccaaaagtaccctttatataacaagcatttttggcaaaacgtgtagctagtcatatctcaaactttcttgtgaaacacctgaacactggggaggttagataagcatctttatgaggggttatctgtactaccggcactgtttaaagacattgctgcaaaatatcttggtatgcaggagtcaaacagcagtcatcatgccagctgctcttcaagatgacatcactcttacaatgcaacaggctgttttcctacactcgacccctcgaaaccagtccttaaaatcttacatgcctgcttcttctgtgatagtccctggacctagagggagggtgcttgatattgtatggctttagtagtattgcaatggaaatggaaaacagattgggtccagtggaattccacaagagggagatttgcaggcttggttgaatcatctatatagtcttcataataccatgaagaagtaaaacaatgagaaatacataacattaataattggagtagtagaaatctaaataaagtaatatgatgtttaagatatcccttgccttaatagcctataaatatgggaagagtgactatcatcttctgaatttcaggacccatatattccgacagtttcagtaatatgaagattttggaaattctaaaaggttttgagatcatttctaatcaagcatttagctcttatgttagcattaattgcagccccaacttttgcaacttattgacctgcacatttttctgagcacttactttccttatgtcagatgtagggaatcatgagatgaacaagttttggttcctgcactgtagcaaatgaatttaggcaaagatatgaaagatgaaaaaaccctatgactatatgacttttagtgtcatgaaactgattactatataatcttgttattcttcccattgcttgacttt

SEQ ID NO: 65364 - DNA, 829 bp, Homo Sapiens; identical to SEQ ID NO: 20650
  misc_feature (337)..(495): n is a, c, g, or t

SEQ ID NO: 65365 - DNA, 730 bp, Homo Sapiens
gacagtttttaattgtgcctttattcaacttagttcattaaaaatgttttaaagatcctataaataaagtgaccactcacatgggatataggtcacccctcagcatgttattttttttcttaaaaagcagtatttcttacaggaatcttactgatcacacggtagttacaataatgtcggatatgatgtatacagtctaaacaagacagtccagttaagaatatacataatgtaaaaatacacatattaaaagttagccaagtggacagacgcatgcgggggtggggggagcaggtgacaggaactcctttaacaatcagtaaagggcccaaatgcaaagaatctggttttccccgttacagtaaacagctttcactaacgtatacaggtatttcatacacatctaaacacacaagggtaagttgtgacctgctacacatagggtctaaagtggtgtaattgtgattttcctgtgatactcccaagaaaactataaatagtgaaccccatgcaagtactgggaagcactagtcttttatcacaggttgaacctgaggaggtttaactcttgacattagtatctgtaaaagagcgtacggctctttttgctatgttttctccacaactgacatgcacttggtgtgggagaattccgatggctgtctgacctaagagtgatactactattcaaaatgtgggtaccttttcagtaatactgagttacacattt

SEQ ID NO: 65366 - DNA, 912 bp, Homo Sapiens; identical to SEQ ID NO: 19257

SEQ ID NO: 65367 - DNA, 540 bp, Homo Sapiens; identical to SEQ ID NO: 19259

SEQ ID NO: 65368 - DNA, 959 bp, Homo Sapiens; identical to SEQ ID NO: 20667
  misc_feature (109)..(123): n is a, c, g, or t
  misc_feature (199)..(221): n is a, c, g, or t
  misc_feature (549)..(565): n is a, c, g, or t

SEQ ID NO: 65369 - DNA, 903 bp, Homo Sapiens
gtgcaaaactactgtatttacaaaaatggcacaaaagtgaattcaacagttaatgcacatgcatacttcattcacatcttcaacaacaaaaggtattctaactctacagaactgaatattagcttcaacggcagctgttaagcactagagtcacataagttacaccagaatgggcaaatattgcccaagtaaaattctactgttaaagctgaaacaggtttaaggccattcaagttcaagcacagagatacaaatctttcagagccccatctagttgtgtttgaaatatgtgacctttcttctaacttgtggtcttaaacttctgttttacaaaatccaaaaggtaaatacagaagaaatcaatacaatagagattatattaaataagagtaacatacaaagctataattaagatgaagtaatgaaagccaaaacattaaaattttaaaacttgcttgttacttgttagaaccagtactacactagaagttaggtaatatatacaactattttcaagtagtttacttatgttgctctaacatgtcctcttcaccagtgcactgttaaactaatcaaaaactctacacacgtatattccacaatagcagcacacactactgctacctgcaaagctgtcagtctcaaatgactagtgaatgaaaggaaataaaaagtagataagtaacatattaaggagaaataatgagatttagcagattcatgcagttcagcctcttaatcacccagccagcttgctagcaacaagggacggcttccgttgaggaaggtcttgcggagtgggaatgtggtcccagtgacctcggtcctatcccggagctgcagtagaagttgcttggttcttcatttttgctttacccagggtgtaatcccccaaaatcaaaa

SEQ ID NO: 65370 - DNA, 860 bp, Homo Sapiens
gcacgaggtttttgttttgctaccatttatttgctgtatggtatgtactcaaggcatgagtcagggcttctgtactaccctctgatcccaggagacagggcaggcaagaaggagagcccagggagaagctacctcatcatgggaaaattgtgggagctggaagaggtagggggagacccagccatcctgttctgacttctagcaatttcttctgccctcagtcatgaggggctccctatcctcccatcctatggtcccaggtgcagcaatgagagaggggaagggaagagagaaaggaagacaagttggtgccaggtgaaggcatctctgctctgcatagctatttggccctggccatgactacaagcaaaagtgggtgcagatggctgggccaagggctgtggtatggagtggatactcagtaggcatggttggcaatgtagagtgactgtgctgctgctccaccatcttctccactgccttcatacttgccctgggctgcaagcccattcacctcagcccgcttgatgaactcctcagtggcagccccagcattgtcccgttgccctcgccaggcattgagtgcagaggcttgcagggcacgcccataggagaaggtaagcgcccagggtcggggaagggggcagcggttgatggcattgaggttgaatgatgcctcttcttcgctctgacccccagacaggaaggtcactcctgggacagctgggggcacagtgcgacgcagggcagtgacagttgccatggcaatctcctctggggtatacttgatgggacaggcatggcccggggtcaccatgttgggcttgagcagggtcccctccaggtatacatgatgggtc

SEQ ID NO: 65371 - DNA, 642 bp, Homo Sapiens
tgaaagtcactttcactccaagccctgggcctgacaggagggggccaaagaggggggctgcctaaggcagggcccagacccccacagtgggggcctctggagctgtgtctttactcttgctgccgatcaatcccatgctctgaaatgcgcacactctggctccttagtagatgccataggtgggctcatgactgtccctgtaccggtccaggtagcgcaggggctgccggtgggggaagcgcttctgcttggggtggtaagggggcggccgcacgaactcaaacaccggctcccgcatgtccagaagctggtggaagatgtaggtgacggagtcatcccagcggcactggaagaaggacaagccggctggagtcatggtttcttggtgtttcttgtagaaatcaaaagtgcggaaggtccgctgggccagctgatagcagggtgaggggcgtgcgtcctcagagaagtcaatcggctggtcctgcttgaagagcaggaaggcaagacggtggatgccggagcctcgggcagggaagggggggaggtagggacacgtcacctgtccttcagccacccggttacccgggatgttggttagcagccagtggaggtactcagcaatctgcctcgtgccgggaattc

SEQ ID NO: 65372 - DNA, 1587 bp, Homo Sapiens; identical to SEQ ID NO: 20672
  misc_feature (546)..(596): n is a, c, g, or t

SEQ ID NO: 65373 - DNA, 1124 bp, Homo Sapiens; identical to SEQ ID NO: 20676
  misc_feature (55)..(87): n is a, c, g, or t
  misc_feature (815)..(840): n is a, c, g, or t

SEQ ID NO: 65374 - DNA, 2188 bp, Homo Sapiens; identical to SEQ ID NO: 20683
  misc_feature (1542)..(1576): n is a, c, g, or t
  misc_feature (2006)..(2018): n is a, c, g, or t

SEQ ID NO: 65375 - DNA, 757 bp, Homo Sapiens; identical to SEQ ID NO: 20684
  misc_feature (552)..(572): n is a, c, g, or t

SEQ ID NO: 65376 - DNA, 1372 bp, Homo Sapiens; identical to SEQ ID NO: 20688
  misc_feature (63)..(107): n is a, c, g, or t

SEQ ID NO: 65377 - DNA, 795 bp, Homo Sapiens; identical to SEQ ID NO: 20693

SEQ ID NO: 65378 - DNA, 1405 bp, Homo Sapiens; identical to SEQ ID NO: 20705
  misc_feature (679)..(709): n is a, c, g, or t
  misc_feature (1087)..(1096): n is a, c, g, or t
  misc_feature (1138)..(1150): n is a, c, g, or t

SEQ ID NO: 65379 - DNA, 839 bp, Homo Sapiens
agaacaaaacaggtatatttctattagactacctgatacagaagatagtgtggtatggatggatagtatgaaggacaaataatacaaatatattttattgaaataaacaaaaatgcatacacagctcaatgggtcacttggaacaaacttgcttgactatattactgagcagaaacaaaacggaagcccaaacacctttctttttttgacctgtatctggagataggtaggaagacactacttggttttttaaaaaactgaccttcccttaaggcctggtcatagaagtgtaaaccatgtaaatgaatccaccattaccagttgtcatatcatatctatgtcccctgtgtattctgagattacccacatacctgccaatatacctgggaaaggttattttatcacagttacacttgagttcttggcaggcaggactgaggaagagtaatttgaaagaagttttacatcctatttagaagaaatcactagtatttccttaaataacaggttacaatagaaagatactgcctggaagttatcctttcactttggttcatttttagtttctctttatgatttacatagctgtttaattcatttgcttatagtaccatcctgccataaagtattaaagcacaagatacctattattccttccacatctgcatttttcaggttttatactctacatccacagtacgtcagcagttcttgaatgtttaaaacataaatgggtaaaatgcttctcaaaatgcagatgtttatcactacaatggtactaagatgggaacgacacactgagagaagggataaaagcaaacatgttcctggtgcaggaa

SEQ ID NO: 65380 - DNA, 935 bp, Homo Sapiens
gccttgaaatgtttttaatagaattggtctagtaatcgttcaggatttcggtgatgggccctccctgtctggacactgccaacccacagctggaggggcacttaaggcacgtcattttgtgattagaattacacaaaatttgattaatattatagctgcaaaattaacatacacaattttcactcataatttaaaatattttgatgaaattctttgctttcacaatagaagatcaatggtacacagtatattgaactctgtaacaaaattatttttgagaaaatacagaagtgagaaatagtgatttcctcaatttgtttatagtctatcacaaagtaggccaaagttcagtattaaatagatatcctaataaaagtttttacaagttttcctaaggaaatacattcataagactgtttaccttctgtttgacagcagtgacaggaacgtggggatccccactcatgacgagtccctagcactcagcccctggcacccacagccccggcgcgctccgtcacctggtagggagcagcctgggctgccgtgagtgaggtgttctcactctggttccgtgtttgtgtttagcctgtgcaattctcgtcaacacagaacacctgcctgcccacccccggtgctgaagaccgaccagtcaaggaggtgttggtgggagtgttgtgttcaccatgtggagatcaggcggcgattaccgcatcttctttgctgactttggtaaccgggtgtccagggaggagcgatcgggagtggccaagcagttgcctggactcagcttctgactctgcagctgggagtcagatgcagggcccaggggtccaggggtggtgttcagcgcctggaatcgccatgcactgcgcggtggaccgcacgacgcctcctgctcctgttctcccaggcacagacaggcacttgaaagg

SEQ ID NO: 65381 - DNA, 1008 bp, Homo Sapiens; identical to SEQ ID NO: 20725

SEQ ID NO: 65382 - DNA, 1281 bp, Homo Sapiens; identical to SEQ ID NO: 20731
  misc_feature (713)..(721): n is a, c, g, or t
  misc_feature (961)..(970): n is a, c, g, or t

SEQ ID NO: 65383 - DNA, 841 bp, Homo Sapiens
gcacgaggttttttttaaagaaatgagatttattgccttgtggggggaagggatgtggttgtgataggcaggccactctgggatccctgggatgcaagcccagggacagcagagtccccaggtgggaaatctacacacacaccccagggatgtcccagagacttcttctaccctaagaggagatcctgggcaggatgtgagaaatctgagcatcctctgtttggatggccgaagctgctggcatcaaactctggtctggaagaatcagtcacctgagcaaggcttccggaagtagatgatgagaacaatgcccacgatgatgcccagcacacccaggccaaaggccacgccacacagcacattctccagcagatctgagggcagtgcgttccggggtacccaataggcaattgctgtgtagcggtcaatttcgtgagtcacaatgcaggagaaaatgtcagaaggttctggtgtgaagtttaagtaagaaaaggcctggaagctgagtccatcgacagctgagacaaaagtaggcccaaatccttccacagggatggaatgatgctgccagttcactgtcagcatgggtgggaagagattactgacaaaacagaccaaagtgttgggcttgccaaactccaggggcttcagcgtgaacacttcagcgataggaaaccctctggacaccgggattttcccatcaagttttggccctatttgctggatcatccactcgcagaactctttgtcaaataaaatggcaggagcatctccctgttcctgagcccagtcagcaaattcgggcaggcgaggcacccgagtgttctgggaaaaggtccaa

SEQ ID NO: 65384 - DNA, 627 bp, Homo Sapiens; identical to SEQ ID NO: 20734
  misc_feature (475)..(486): n is a, c, g, or t

SEQ ID NO: 65385 - DNA, 1194 bp, Homo Sapiens; identical to SEQ ID NO: 20743
  misc_feature (214)..(229): n is a, c, g, or t
  misc_feature (881)..(890): n is a, c, g, or t
  misc_feature (1028)..(1044): n is a, c, g, or t

SEQ ID NO: 65386 - DNA, 662 bp, Homo Sapiens
gggctgcaggaattcggcacgaggaattaacagtctttattgggctcagaccaggagtccgtgggtcttgaggacctctgtgtatttgtcaattttcttctccacgttcttctcggcctgtttccgtagcctcatgagctgtttcttcttccggtagtggatcttggctttctctttcctcttctcctccagggtggctgtcactgcctggtacttccagccaacctcgtgagccaggcgccccagataggcaaactttcttgtaggcttcagacgcacgaccttgagggcagcaggaaccaccatccgctttttcttgtcgtagggcggtgggatgccgtcaaacaccttgagacggtccagagcggcctggcctcgcttggttttgtggggcagcatacctcgcacggtccgccagaagatgcggctgggggcccggaagtggtaggggcctcgggaagggttggtgttcatccgcttgcggaggaaagccaggtacttcaacttgtttctgtagaaattgccagaaatgttgatgccttcacagcgtacgaccaccaccttccggcccagcagtacctgtttagccacgatggccgccaggcggcccaggagatggcctcgaccatcaagcaccaggacctgcacctccgccatcttcg

SEQ ID NO: 65387 - DNA, 1309 bp, Homo Sapiens; identical to SEQ ID NO: 20746
  misc_feature (682)..(691): n is a, c, g, or t

SEQ ID NO: 65388 - DNA, 509 bp, Homo Sapiens
  misc_feature (430)..(446): n is a, c, g, or t
gccaggcaggaggacctctgcgtcctctgtttattgttttgcagcaggaggcccaacatagaacatactcgccagtactcggctgtgcaaaacaggggctagcgctgaagtacaaatgggaaaacgtgattcttttgttttaaataaatacttagaacacgacttggctcctacaagcatctggactctaggtctcagtactggagtgtctcacccatgggccccacgcagggacgccacggttccctcccaccccgtgatcaagacacggaatcggctgccgatggttggatcgcaatgcgccccttttctagagccttccccggccatctacaggcaggatgcggctgggaaaaagacaactggaatttctcgaaggttgatggtccgcacggttgaggattctacgtggttctcttggttcccctgnnnnnnnnnnnnnnnnngaggaggccgcggcccttagatcaccttcttgagctcgtcgtacaggaccagcacgaaggcgc

SEQ ID NO: 65389 - DNA, 1176 bp, Homo Sapiens; identical to SEQ ID NO: 20750
  misc_feature (988)..(996): n is a, c, g, or t

SEQ ID NO: 65390 - DNA, 1130 bp, Homo Sapiens; identical to SEQ ID NO: 20757
  misc_feature (73)..(96): n is a, c, g, or t

SEQ ID NO: 65391 - DNA, 934 bp, Homo Sapiens
cccgggctgcaggaattcggcacgagggttttattttattatggctagaaagacactgttatagccaaaatcggcaatgacactaaagaaatcctctgtgcttttcaatatgcaaatatatttcttccaagagttgccctggtgtgacttcaagagttcatgttaacttcttttctggaaacttccttttcttagttgttgtattcttgaagagcctgggccatgaagagcttgcctaagttttgggcagtgaactccttgatgttctggcagtaagtgtttatctggcctgcaatgagcagcgagtccatcctggcaggcggctgtggtggtttgaagagtttggacaggtcctcctcagggagcgggggttctcctcggctctggcgctgcatattctcctgctggcgacgctgctgatactgatgtttctgctgctgttgtttactagtattcctcatgtatgtgttgtatttaactatatcttggctcatttcatccactctgtccatcagcaactgtagattcttccccaaatgattgctgctggcaaggctgagcaattcatgtttatctgcaacagctgacttcttttcaagttcccacattaggacattgatcagatgtgaatttttaattacaatcggcacttcttcaaacatgtactcaaaggtgatatttgcttttttcaatgcttcaggggaaaatccttttctttacaaacttccatcagtttaggagtcagtctgtatgcctttagtgagagagatccttgggcagtttttatgggatcataaatgagaacgacagattcttcatggcatgctggtaactaaactgagagtccaggagtgcccggggtaacgaatgagccatagtatgtggactgataccagcccacgtgaagatgaatcaatgtttacctgggcaaagg

SEQ ID NO: 65392 - DNA, 1289 bp, Homo Sapiens; identical to SEQ ID NO: 20760
  misc_feature (352)..(361): n is a, c, g, or t

SEQ ID NO: 65393 - DNA, 1103 bp, Homo Sapiens
gaggtttcaacttaacatttattgcacaactcacttcaggccactgctgacatcccaaaacacagcctagtaacacacaacttcaccttcaaggactgcagagatagaccaactatatataaataatctcgtggaaacgtaatttgggtgagaaaaatatgacgctagagactttgcgatgaatattttgcctaagttcaaaagcttgaaaatacagttggcctacaatctcaaatttcacccaataaccgtggcccttagtcaccacaccttccatcatctttttacctctgcctgttcttgccctttacagttgcagctctctcaactcccttgcctctagttgactcctcttcccatttcctacaactttgtggcgggagcattttagcaaagccatttcaaaggcgttcaaagtccaactgatccaatgcatttactcagaaatttataccaacagggatgctttcaatattttaaattacttgagcatttatattagcataaaaattttaaaaccaaatgcttaacaatagggtagttggataatttaacatacgtccacataaaattaaaccattaaaatttgcttttcaagaaatatttaataacaaggtaagtaacatatgcttatctaacatggaattttatgtcactgctgctaaagcaaaacatcctgttcactggataaaagacctgctttatgtgtatacacttcagtgcaatttttaaaaatactataatttcagaacttccaaatttcaacagatgccagtgttctctccttttttcatatgggaaaatttctttcaaaattatttgaagcttggacaaaaattccacagctgtaatcctcaggatcactttgcagtcttcaagattcagatacagaggaagcttcaattcaacctttcagagaagacattccagctcgcatgatctcatcaaccaagagaatgttggtggcaatcacagtgcaggagtgaagaagctgtttctttacacaatagttatcccatacgcctacttctgctgccaccattggctcacctgtgttcaggtccacacccacaagctcgtctctttagaggtctgcctcgtgc

SEQ ID NO: 65394 - DNA, 913 bp, Homo Sapiens; identical to SEQ ID NO: 20770
  misc_feature (835)..(847): n is a, c, g, or t

SEQ ID NO: 65395 - DNA, 832 bp, Homo Sapiens; identical to SEQ ID NO: 20772
  misc_feature (261)..(292): n is a, c, g, or t

SEQ ID NO: 65396 - DNA, 726 bp, Homo Sapiens
ccccgggctgcaggaattcggcacgagggtggccaacaaaacaataaacacctttattacatgggtgaagacaaaacaaggatttatttgcctttgcgggccttgattttcctaagatagaactccaactctttgccctctagcacatagccatctgctcggccacactgtcccggccttgaagcgatgcacgcaagaagcttgccctgctggaactgctcctccaggagactgctgattttggcattctttttcctttcatcatatttcttctgaatttttttagatcgttttttgtttaaaatctcttcttcctcaggagtcagcttggctcccttcttgcggcccaggggcagcgcatagtgggactcgtaccactgtcggtacggtgtgctgtcgatgagcacgatgcaattcttcaccagggtcttggtacgaaccagctcgttattagatgcattgtagacaacatcgatgatccttgttttacgagtacaacactctgagccccaggagaaattccccacgtccaacctcagggcacggtatttcttgttacctccccgcacacggactgtgtggatgcggcgggggccaatcttggtgttggcagctgggcgccccaactcatacttccgcttcttgtggtagggctttctcttgcccccggttttgcggcgcttgtgccagttgtcccgagagatgcccatcgctcggccctcgtgc

SEQ ID NO: 65397 - DNA, 1512 bp, Homo Sapiens; identical to SEQ ID NO: 20789
  misc_feature (530)..(544): n is a, c, g, or t

SEQ ID NO: 65398 - DNA, 786 bp, Homo Sapiens
gcacgaggttttggctctagagggggtagagggggtgctatagggtaaatacgggccctatttcaaagatttttaggggaattaattctaggacgatgggcatgaaactgtggtttgctccacagatttcagagcattgaccgtagtatacccccggtcgtgtagcggtgaaagtggtttggtttagacgtccgggaattgcatctgtttttaagcctaatgtggggacagctcatgagtgcaagacgtcttgtgatgtaattattatacgaatgggggcttcaatcgggagtactactcgattgtcaacgtcaaggagtcgcaggtcgcctggttctaggaataatgggggaagtatgtaggagttgaagattagtccgccgtagtcggtgtactcgtaggttcagtaccattggtggccaattgatttgatggtaagggagggatcgttgacctcgtctgttatgtaaaggatgcgtagggatgggagggcgatgaggactaggatgatggcgggcaggatagttcagacggtttctatttcctgagcgtctgagatgttagtattagttagttttgttgtgagtgttaggaaaagggcatacaggactaggaagcagataaggaaaatgattatgagggcgtgatcatgaaaggtgataagctcttctatgataggggaagtagcgtcttgtaggggggggcccgttaccacatccccctataagtgggtcgtattaccgcgctcactggcccgccgtttacaacgtcctgactgggaaaacc

SEQ ID NO: 65399 - DNA, 1059 bp, Homo Sapiens
  misc_feature (705)..(715): n is a, c, g, or t
gcttttgttccaatcattaggagagtggttgaggagtactgaatccctcactactttgatgacacaggtaatattccaaattcacatttccaggtaccaagagttccctctaaatggcacaatcaagtcagccttcgtttacatttccttctactgaacacagcaatgcccattggtatctctgaagcgtaatcctctcttaggtcggtatttctccaaataaagcagctgtttggaattgaacgctccccttcttttttgtcttataaactgaactgcatcttcgtacttcattccacattcaatcaaagcaagtgcaaccagcacaggtgcccttcccaatcctgcaacacaatgcactgcaacacagcaacctggctcttcacgaaatttggtttttaacaggtttaaccaatcatctactatctgattagggggtggagctccatcatcaaatggccaatctagaacgtggattccttctttttcaactggagctttatcatatgtagcatcacaaactcgaaccaaagtcgtcactccatacttcttaagttcctctgtgaacttgttgagagtagcattggtagggttgtgagttatcagaaaacgcatgttctcataggagatctccacaggggctggacggttcattatggcaaataaaaagtgtgagcgtgcgtgtgagtgtgatggggaaagtgnnnnnnnnnnntcaataaatcttgaaatgtttcacagcagaaaacattaaaaagaccactaaaatgcctattatcaatcagtgttttctctattcaacttgtttattccttatgaagcttctctcttcaagataagcaaagtatttagaatccacttgaatccaaattcaatttgggcctcaatttctgcagatggataccttcggactccaaaaaatccaactacatacaaaacttaagcagcctttactacatttaggcactagtgagacaagttaaaagtgtaggtcactttccacttgtttacttgatgcttaattttactggagtcattaaaagaaatatgcttgcaatt

SEQ ID NO: 65400 - DNA, 1404 bp, Homo Sapiens; identical to SEQ ID NO: 20826

SEQ ID NO: 65401 - DNA, 904 bp, Homo Sapiens
atcccccgggctgcaggaattcggcacgaggttttcacaaatagcactttttatttgccactatttgaagtctgaactttaaacagattcttggactggtggttcatatccatcagctcgttcaactttagcacctgtctcgtccccagtggcttttccagaactactgccttcaccatgaagctccatgagctttcccaattcaaacttgggcttcttcagcatttttacttttctaacgaagacatcatggagaggataaatagattggcaagccttttctatgtcttttccaatgctgtctggaatcaatttattgaccacttctttcaagtcatttgtctgcacctctcgggtcatgatttccatcatcttcttccggatttggcggacctgttggtgctgagcataagaggtcttccgtatctgattgttgcgttttttagtaaaaccaacacagaacagacgaagcaagtaaccatcggtagtcttgacatcaacgtgagcttcaatcattgtctgccattttttgaccatggaacacattttgtcacgggtaagatccatgccatggaagttagtcaggcagtttttaccctgaacatcttcagtaatcagcttgaattttctaaatgcaacttcatcattctgcaaatcagcaagactcacttcaaacacacgacccttgagaccatcagatgcaattttggttccttgggtcctggtgacgagcgtctttccaatatttcttatattgaacatagcaggtgctttcacatcataccaatctttcttagaaaatggatcaaccactttcttcttggctccctttttgccgcctttcgtaaggcgcttgttcttgccaccgccatggtgcctggtgcagcgtcgtgcggacgcgtgg

SEQ ID NO: 65402 - DNA, 1482 bp, Homo Sapiens; identical to SEQ ID NO: 20835
  misc_feature (114)..(126): n is a, c, g, or t

SEQ ID NO: 65403 - DNA, 1372 bp, Homo Sapiens; identical to SEQ ID NO: 20837

SEQ ID NO: 65404 - DNA, 1053 bp, Homo Sapiens; identical to SEQ ID NO: 20846

SEQ ID NO: 65405 - DNA, 181 bp, Homo Sapiens; identical to SEQ ID NO: 1

SEQ ID NO: 65406 - DNA, 452 bp, Homo Sapiens; identical to SEQ ID NO: 4

SEQ ID NO: 65407 - DNA, 485 bp, Homo Sapiens; identical to SEQ ID NO: 11

SEQ ID NO: 65408 - DNA, 460 bp, Homo Sapiens; identical to SEQ ID NO: 15
  misc_feature (335)..(394): n is a, c, g, or t

SEQ ID NO: 65409 - DNA, 497 bp, Homo Sapiens; identical to SEQ ID NO: 23

SEQ ID NO: 65410 - DNA, 514 bp, Homo Sapiens; identical to SEQ ID NO: 24
  misc_feature (66)..(78): n is a, c, g, or t

SEQ ID NO: 65411 - DNA, 385 bp, Homo Sapiens; identical to SEQ ID NO: 27

SEQ ID NO: 65412 - DNA, 683 bp, Homo Sapiens; identical to SEQ ID NO: 29

SEQ ID NO: 65413 - DNA, 995 bp, Homo Sapiens; identical to SEQ ID NO: 41

SEQ ID NO: 65414 - DNA, 134 bp, Homo Sapiens; identical to SEQ ID NO: 42

SEQ ID NO: 65415 - DNA, 723 bp, Homo Sapiens; identical to SEQ ID NO: 46

SEQ ID NO: 65416 - DNA, 278 bp, Homo Sapiens; identical to SEQ ID NO: 47

SEQ ID NO: 65417 - DNA, 475 bp, Homo Sapiens; identical to SEQ ID NO: 48

SEQ ID NO: 65418 - DNA, 444 bp, Homo Sapiens; identical to SEQ ID NO: 51

SEQ ID NO: 65419 - DNA, 439 bp, Homo Sapiens; identical to SEQ ID NO: 55

SEQ ID NO: 65420 - DNA, 340 bp, Homo Sapiens; identical to SEQ ID NO: 56

SEQ ID NO: 65421 - DNA, 296 bp, Homo Sapiens; identical to SEQ ID NO: 59

SEQ ID NO: 65422 - DNA, 310 bp, Homo Sapiens; identical to SEQ ID NO: 61

SEQ ID NO: 65423 - DNA, 1005 bp, Homo Sapiens; identical to SEQ ID NO: 70

SEQ ID NO: 65424 - DNA, 497 bp, Homo Sapiens; identical to SEQ ID NO: 74

SEQ ID NO: 65425 - DNA, 439 bp, Homo Sapiens; identical to SEQ ID NO: 78
  misc_feature (12)..(12): n is a, c, g, or t

SEQ ID NO: 65426 - DNA, 383 bp, Homo Sapiens; identical to SEQ ID NO: 91

SEQ ID NO: 65427 - DNA, 243 bp, Homo Sapiens; identical to SEQ ID NO: 106

SEQ ID NO: 65428 - DNA, 393 bp, Homo Sapiens; identical to SEQ ID NO: 133

SEQ ID NO: 65429 - DNA, 431 bp, Homo Sapiens; identical to SEQ ID NO: 145

SEQ ID NO: 65430 - DNA, 414 bp, Homo Sapiens; identical to SEQ ID NO: 148

SEQ ID NO: 65431 - DNA, 286 bp, Homo Sapiens; identical to SEQ ID NO: 151

SEQ ID NO: 65432 - DNA, 521 bp, Homo Sapiens; identical to SEQ ID NO: 158

SEQ ID NO: 65433 - DNA, 1045 bp, Homo Sapiens; identical to SEQ ID NO: 176

SEQ ID NO: 65434 - DNA, 319 bp, Homo Sapiens; identical to SEQ ID NO: 182

SEQ ID NO: 65435 - DNA, 490 bp, Homo Sapiens; identical to SEQ ID NO: 187

SEQ ID NO: 65436 - DNA, 355 bp, Homo Sapiens; identical to SEQ ID NO: 189

SEQ ID NO: 65437 - DNA, 599 bp, Homo Sapiens; identical to SEQ ID NO: 204

SEQ ID NO: 65438 - DNA, 723 bp, Homo Sapiens; identical to SEQ ID NO: 209
  misc_feature (631)..(631): n is a, c, g, or t

SEQ ID NO: 65439 - DNA, 838 bp, Homo Sapiens; identical to SEQ ID NO: 210

SEQ ID NO: 65440 - DNA, 554 bp, Homo Sapiens; identical to SEQ ID NO: 214

SEQ ID NO: 65441 - DNA, 978 bp, Homo Sapiens; identical to SEQ ID NO: 218
  misc_feature (82)..(85): n is a, c, g, or t
  misc_feature (87)..(87): n is a, c, g, or t
  misc_feature (90)..(90): n is a, c, g, or t
  misc_feature (92)..(109): n is a, c, g, or t
  misc_feature (180)..(180): n is a, c, g, or t

SEQ ID NO: 65442 - DNA, 1227 bp, Homo Sapiens; identical to SEQ ID NO: 238
  misc_feature (86)..(86): n is a, c, g, or t
  misc_feature (179)..(179): n is a, c, g, or t
  misc_feature (259)..(259): n is a, c, g, or t
  misc_feature (418)..(418): n is a, c, g, or t
  misc_feature (609)..(609): n is a, c, g, or t
  misc_feature (623)..(731): n is a, c, g, or t
  misc_feature (751)..(752): n is a, c, g, or t
  misc_feature (760)..(760): n is a, c, g, or t
  misc_feature (764)..(765): n is a, c, g, or t
  misc_feature (767)..(767): n is a, c, g, or t
  misc_feature (769)..(769): n is a, c, g, or t

SEQ ID NO: 65443 - DNA, 524 bp, Homo Sapiens; identical to SEQ ID NO: 243

SEQ ID NO: 65444 - DNA, 490 bp, Homo Sapiens; identical to SEQ ID NO: 246
  misc_feature (339)..(339): n is a, c, g, or t

SEQ ID NO: 65445 - DNA, 798 bp, Homo Sapiens; identical to SEQ ID NO: 248

SEQ ID NO: 65446 - DNA, 1097 bp, Homo Sapiens; identical to SEQ ID NO: 260
  misc_feature (559)..(578): n is a, c, g, or t

SEQ ID NO: 65447 - DNA, 642 bp, Homo Sapiens; identical to SEQ ID NO: 262

SEQ ID NO: 65448 - DNA, 531 bp, Homo Sapiens; identical to SEQ ID NO: 266

SEQ ID NO: 65449 - DNA, 716 bp, Homo Sapiens; identical to SEQ ID NO: 269

SEQ ID NO: 65450 - DNA, 1443 bp, Homo Sapiens; identical to SEQ ID NO: 283

SEQ ID NO: 65451 - DNA, 1895 bp, Homo Sapiens; identical to SEQ ID NO: 299
  misc_feature (1628)..(1628): n is a, c, g, or t

SEQ ID NO: 65452 - DNA, 693 bp, Homo Sapiens; identical to SEQ ID NO: 313
  misc_feature (111)..(124): n is a, c, g, or t
  misc_feature (134)..(240): n is a, c, g, or t

SEQ ID NO: 65453 - DNA, 626 bp, Homo Sapiens; identical to SEQ ID NO: 316
  misc_feature (402)..(402): n is a, c, g, or t

SEQ ID NO: 65454 - DNA, 469 bp, Homo Sapiens; identical to SEQ ID NO: 324

SEQ ID NO: 65455 - DNA, 935 bp, Homo Sapiens; identical to SEQ ID NO: 352
  misc_feature (650)..(660): n is a, c, g, or t
  misc_feature (819)..(870): n is a, c, g, or t

SEQ ID NO: 65456 - DNA, 817 bp, Homo Sapiens; identical to SEQ ID NO: 355
  misc_feature (172)..(175): n is a, c, g, or t
  misc_feature (179)..(179): n is a, c, g, or t
  misc_feature (182)..(186): n is a, c, g, or t
  misc_feature (188)..(193): n is a, c, g, or t
  misc_feature (196)..(197): n is a, c, g, or t

SEQ ID NO: 65457 - DNA, 470 bp, Homo Sapiens; identical to SEQ ID NO: 370

SEQ ID NO: 65458 - DNA, 308 bp, Homo Sapiens; identical to SEQ ID NO: 371

SEQ ID NO: 65459 - DNA, 220 bp, Homo Sapiens; identical to SEQ ID NO: 372

SEQ ID NO: 65460 - DNA, 562 bp, Homo Sapiens; identical to SEQ ID NO: 380

SEQ ID NO: 65461 - DNA, 956 bp, Homo Sapiens; identical to SEQ ID NO: 399

SEQ ID NO: 65462 - DNA, 1135 bp, Homo Sapiens; identical to SEQ ID NO: 402

SEQ ID NO: 65463 - DNA, 259 bp, Homo Sapiens; identical to SEQ ID NO: 413

SEQ ID NO: 65464 - DNA, 1195 bp, Homo Sapiens; identical to SEQ ID NO: 427

SEQ ID NO: 65465 - DNA, 744 bp, Homo Sapiens; identical to SEQ ID NO: 436

SEQ ID NO: 65466 - DNA, 949 bp, Homo Sapiens; identical to SEQ ID NO: 448

SEQ ID NO: 65467 - DNA, 374 bp, Homo Sapiens; identical to SEQ ID NO: 470

SEQ ID NO: 65468 - DNA, 842 bp, Homo Sapiens; identical to SEQ ID NO: 474

SEQ ID NO: 65469 - DNA, 494 bp, Homo Sapiens; identical to SEQ ID NO: 476

SEQ ID NO: 65470 - DNA, 581 bp, Homo Sapiens; identical to SEQ ID NO: 477

SEQ ID NO: 65471 - DNA, 696 bp, Homo Sapiens; identical to SEQ ID NO: 478

SEQ ID NO: 65472 - DNA, 538 bp, Homo Sapiens; identical to SEQ ID NO: 481

SEQ ID NO: 65473 - DNA, 516 bp, Homo Sapiens; identical to SEQ ID NO: 498

SEQ ID NO: 65474 - DNA, 489 bp, Homo Sapiens; identical to SEQ ID NO: 505

SEQ ID NO: 65475 - DNA, 553 bp, Homo Sapiens; identical to SEQ ID NO: 506

SEQ ID NO: 65476 - DNA, 1236 bp, Homo Sapiens; identical to SEQ ID NO: 518

SEQ ID NO: 65477 - DNA, 258 bp, Homo Sapiens; identical to SEQ ID NO: 524
  misc_feature (241)..(241): n is a, c, g, or t

SEQ ID NO: 65478 - DNA, 896 bp, Homo Sapiens; identical to SEQ ID NO: 546

SEQ ID NO: 65479 - DNA, 679 bp, Homo Sapiens; identical to SEQ ID NO: 550

SEQ ID NO: 65480 - DNA, 862 bp, Homo Sapiens; identical to SEQ ID NO: 567
  misc_feature (543)..(639): n is a, c, g, or t

SEQ ID NO: 65481 - DNA, 570 bp, Homo Sapiens; identical to SEQ ID NO: 568

SEQ ID NO: 65482 - DNA, 505 bp, Homo Sapiens; identical to SEQ ID NO: 572

SEQ ID NO: 65483 - DNA, 364 bp, Homo Sapiens; identical to SEQ ID NO: 578

SEQ ID NO: 65484 - DNA, 376 bp, Homo Sapiens; identical to SEQ ID NO: 579

SEQ ID NO: 65485 - DNA, 331 bp, Homo Sapiens; identical to SEQ ID NO: 584

SEQ ID NO: 65486 - DNA, 700 bp, Homo Sapiens; identical to SEQ ID NO: 588
  misc_feature (537)..(537): n is a, c, g, or t
  misc_feature (594)..(594): n is a, c, g, or t
  misc_feature (606)..(606): n is a, c, g, or t
  misc_feature (615)..(615): n is a, c, g, or t
  misc_feature (675)..(675): n is a, c, g, or t

SEQ ID NO: 65487 - DNA, 299 bp, Homo Sapiens; identical to SEQ ID NO: 594

SEQ ID NO: 65488 - DNA, 412 bp, Homo Sapiens; identical to SEQ ID NO: 602
  misc_feature (395)..(395): n is a, c, g, or t

SEQ ID NO: 65489 - DNA, 766 bp, Homo Sapiens; identical to SEQ ID NO: 607

SEQ ID NO: 65490 - DNA, 783 bp, Homo Sapiens; identical to SEQ ID NO: 610

SEQ ID NO: 65491 - DNA, 388 bp, Homo Sapiens; identical to SEQ ID NO: 626
  misc_feature (366)..(366): n is a, c, g, or t

SEQ ID NO: 65492 - DNA, 347 bp, Homo Sapiens; identical to SEQ ID NO: 640

SEQ ID NO: 65493 - DNA, 461 bp, Homo Sapiens; identical to SEQ ID NO: 641

SEQ ID NO: 65494 - DNA, 557 bp, Homo Sapiens; identical to SEQ ID NO: 644

SEQ ID NO: 65495 - DNA, 422 bp, Homo Sapiens; identical to SEQ ID NO: 651

SEQ ID NO: 65496 - DNA, 859 bp, Homo Sapiens; identical to SEQ ID NO: 663

SEQ ID NO: 65497 - DNA, 440 bp, Homo Sapiens; identical to SEQ ID NO: 664

SEQ ID NO: 65498 - DNA, 563 bp, Homo Sapiens; identical to SEQ ID NO: 666

SEQ ID NO: 65499 - DNA, 286 bp, Homo Sapiens; identical to SEQ ID NO: 669

SEQ ID NO: 65500 - DNA, 556 bp, Homo Sapiens; identical to SEQ ID NO: 677

SEQ ID NO: 65501 - DNA, 788 bp, Homo Sapiens; identical to SEQ ID NO: 683

SEQ ID NO: 65502 - DNA, 611 bp, Homo Sapiens; identical to SEQ ID NO: 685

SEQ ID NO: 65503 - DNA, 510 bp, Homo Sapiens; identical to SEQ ID NO: 688

SEQ ID NO: 65504 - DNA, 389 bp, Homo Sapiens; identical to SEQ ID NO: 689

SEQ ID NO: 65505 - DNA, 628 bp, Homo Sapiens; identical to SEQ ID NO: 711

SEQ ID NO: 65506 - DNA, 492 bp, Homo Sapiens; identical to SEQ ID NO: 715

SEQ ID NO: 65507 - DNA, 130 bp, Homo Sapiens; identical to SEQ ID NO: 717

SEQ ID NO: 65508 - DNA, 487 bp, Homo Sapiens; identical to SEQ ID NO: 727

SEQ ID NO: 65509 - DNA, 497 bp, Homo Sapiens; identical to SEQ ID NO: 730

SEQ ID NO: 65510 - DNA, 827 bp, Homo Sapiens; identical to SEQ ID NO: 736
  misc_feature (399)..(471): n is a, c, g, or t

SEQ ID NO: 65511 - DNA, 1162 bp, Homo Sapiens; identical to SEQ ID NO: 737

SEQ ID NO: 65512 - DNA, 1395 bp, Homo Sapiens; identical to SEQ ID NO: 740
  misc_feature (456)..(490): n is a, c, g, or t
  misc_feature (1139)..(1190): n is a, c, g, or t

SEQ ID NO: 65513 - DNA, 1224 bp, Homo Sapiens; identical to SEQ ID NO: 743

SEQ ID NO: 65514 - DNA, 973 bp, Homo Sapiens; identical to SEQ ID NO: 744

SEQ ID NO: 65515 - DNA, 1437 bp, Homo Sapiens; identical to SEQ ID NO: 745

SEQ ID NO: 65516 - DNA, 1041 bp, Homo Sapiens; identical to SEQ ID NO: 752
  misc_feature (922)..(960): n is a, c, g, or t

SEQ ID NO: 65517 - DNA, 1158 bp, Homo Sapiens; identical to SEQ ID NO: 758
  misc_feature (463)..(473): n is a, c, g, or t

SEQ ID NO: 65518 - DNA, 443 bp, Homo Sapiens; identical to SEQ ID NO: 764
  misc_feature (207)..(215): n is a, c, g, or t

SEQ ID NO: 65519 - DNA, 793 bp, Homo Sapiens; identical to SEQ ID NO: 765

SEQ ID NO: 65520 - DNA, 648 bp, Homo Sapiens; identical to SEQ ID NO: 769
  misc_feature (537)..(537): n is a, c, g, or t

SEQ ID NO: 65521 - DNA, 867 bp, Homo Sapiens; identical to SEQ ID NO: 779
  misc_feature (64)..(107): n is a, c, g, or t

SEQ ID NO: 65522 - DNA, 642 bp, Homo Sapiens; identical to SEQ ID NO: 798
  misc_feature (573)..(573): n is a, c, g, or t

SEQ ID NO: 65523 - DNA, 525 bp, Homo Sapiens; identical to SEQ ID NO: 804

SEQ ID NO: 65524 - DNA, 813 bp, Homo Sapiens; identical to SEQ ID NO: 806
  misc_feature (231)..(231): n is a, c, g, or t
  misc_feature (483)..(524): n is a, c, g, or t
  misc_feature (745)..(745): n is a, c, g, or t

SEQ ID NO: 65525 - DNA, 904 bp, Homo Sapiens; identical to SEQ ID NO: 814

SEQ ID NO: 65526 - DNA, 791 bp, Homo Sapiens; identical to SEQ ID NO: 822

SEQ ID NO: 65527 - DNA, 797 bp, Homo Sapiens; identical to SEQ ID NO: 824
  misc_feature (389)..(398): n is a, c, g, or t

SEQ ID NO: 65528 - DNA, 1579 bp, Homo Sapiens; identical to SEQ ID NO: 827

SEQ ID NO: 65529 - DNA, 939 bp, Homo Sapiens; identical to SEQ ID NO: 832
  misc_feature (375)..(384): n is a, c, g, or t
  misc_feature (692)..(700): n is a, c, g, or t

SEQ ID NO: 65530 - DNA, 791 bp, Homo Sapiens; identical to SEQ ID NO: 841

SEQ ID NO: 65531 - DNA, 1206 bp, Homo Sapiens; identical to SEQ ID NO: 854
  misc_feature (341)..(341): n is a, c, g, or t

SEQ ID NO: 65532 - DNA, 451 bp, Homo Sapiens; identical to SEQ ID NO: 855

SEQ ID NO: 65533 - DNA, 1492 bp, Homo Sapiens; identical to SEQ ID NO: 858
  misc_feature (164)..(164): n is a, c, g, or t
  misc_feature (182)..(182): n is a, c, g, or t
  misc_feature (207)..(207): n is a, c, g, or t

SEQ ID NO: 65534 - DNA, 716 bp, Homo Sapiens; identical to SEQ ID NO: 861

SEQ ID NO: 65535 - DNA, 326 bp, Homo Sapiens; identical to SEQ ID NO: 866

SEQ ID NO: 65536 - DNA, 735 bp, Homo Sapiens; identical to SEQ ID NO: 867

SEQ ID NO: 65537 - DNA, 551 bp, Homo Sapiens; identical to SEQ ID NO: 875

SEQ ID NO: 65538 - DNA, 646 bp, Homo Sapiens; identical to SEQ ID NO: 876
  misc_feature (542)..(542): n is a, c, g, or t

SEQ ID NO: 65539 - DNA, 786 bp, Homo Sapiens; identical to SEQ ID NO: 880

SEQ ID NO: 65540 - DNA, 535 bp, Homo Sapiens; identical to SEQ ID NO: 881

SEQ ID NO: 65541 - DNA, 1214 bp, Homo Sapiens; identical to SEQ ID NO: 890
  misc_feature (627)..(627): n is a, c, g, or t

SEQ ID NO: 65542 - DNA, 1726 bp, Homo Sapiens; identical to SEQ ID NO: 893
  misc_feature (460)..(526): n is a, c, g, or t

SEQ ID NO: 65543 - DNA, 853 bp, Homo Sapiens; identical to SEQ ID NO: 898
  misc_feature (186)..(197): n is a, c, g, or t

SEQ ID NO: 65544 - DNA, 555 bp, Homo Sapiens; identical to SEQ ID NO: 903

SEQ ID NO: 65545 - DNA, 836 bp, Homo Sapiens; identical to SEQ ID NO: 907
  misc_feature (381)..(386): n is a, c, g, or t

SEQ ID NO: 65546 - DNA, 440 bp, Homo Sapiens; identical to SEQ ID NO: 914
  misc_feature (158)..(175): n is a, c, g, or t

SEQ ID NO: 65547 - DNA, 1090 bp, Homo Sapiens; identical to SEQ ID NO: 917
  misc_feature (49)..(49): n is a, c, g, or t
  misc_feature (84)..(84): n is a, c, g, or t

SEQ ID NO: 65548 - DNA, 384 bp, Homo Sapiens; identical to SEQ ID NO: 920

SEQ ID NO: 65549 - DNA, 1050 bp, Homo Sapiens; identical to SEQ ID NO: 945
  misc_feature (364)..(376): n is a, c, g, or t
  misc_feature (681)..(692): n is a, c, g, or t

SEQ ID NO: 65550 - DNA, 1191 bp, Homo Sapiens; identical to SEQ ID NO: 946
  misc_feature (72)..(72): n is a, c, g, or t
  misc_feature (313)..(369): n is a, c, g, or t

SEQ ID NO: 65551 - DNA, 407 bp, Homo Sapiens; identical to SEQ ID NO: 949
  misc_feature (352)..(352): n is a, c, g, or t

SEQ ID NO: 65552 - DNA, 1176 bp, Homo Sapiens; identical to SEQ ID NO: 957
  misc_feature (177)..(177): n is a, c, g, or t
  misc_feature (183)..(183): n is a, c, g, or t
  misc_feature (191)..(192): n is a, c, g, or t
  misc_feature (194)..(194): n is a, c, g, or t
  misc_feature (196)..(389): n is a, c, g, or t

SEQ ID NO: 65553 - DNA, 928 bp, Homo Sapiens; identical to SEQ ID NO: 961

SEQ ID NO: 65554 - DNA, 666 bp, Homo Sapiens; identical to SEQ ID NO: 978

SEQ ID NO: 65555 - DNA, 420 bp, Homo Sapiens; identical to SEQ ID NO: 984
  misc_feature (389)..(389): n is a, c, g, or t

SEQ ID NO: 65556 - DNA, 425 bp, Homo Sapiens; identical to SEQ ID NO: 985
  misc_feature (289)..(289): n is a, c, g, or t
  misc_feature (398)..(398): n is a, c, g, or t

SEQ ID NO: 65557 - DNA, 749 bp, Homo Sapiens; identical to SEQ ID NO: 989

SEQ ID NO: 65558 - DNA, 864 bp, Homo Sapiens; identical to SEQ ID NO: 1000

SEQ ID NO: 65559 - DNA, 801 bp, Homo Sapiens; identical to SEQ ID NO: 1004
  misc_feature (438)..(438): n is a, c, g, or t
  misc_feature (485)..(485): n is a, c, g, or t
  misc_feature (553)..(553): n is a, c, g, or t
  misc_feature (609)..(609): n is a, c, g, or t
  misc_feature (690)..(692): n is a, c, g, or t

SEQ ID NO: 65560 - DNA, 959 bp, Homo Sapiens; identical to SEQ ID NO: 1010

SEQ ID NO: 65561 - DNA, 926 bp, Homo Sapiens; identical to SEQ ID NO: 1012

SEQ ID NO: 65562 - DNA, 552 bp, Homo Sapiens; identical to SEQ ID NO: 1029

SEQ ID NO: 65563 - DNA, 871 bp, Homo Sapiens; identical to SEQ ID NO: 1032

SEQ ID NO: 65564 - DNA, 957 bp, Homo Sapiens; identical to SEQ ID NO: 1035

SEQ ID NO: 65565 - DNA, 861 bp, Homo Sapiens; identical to SEQ ID NO: 1036

SEQ ID NO: 65566 - DNA, 1365 bp, Homo Sapiens; identical to SEQ ID NO: 1049

SEQ ID NO: 65567 - DNA, 1116 bp, Homo Sapiens; identical to SEQ ID NO: 1053
  misc_feature (35)..(35): n is a, c, g, or t

SEQ ID NO: 65568 - DNA, 1000 bp, Homo Sapiens; identical to SEQ ID NO: 1061

SEQ ID NO: 65569 - DNA, 1677 bp, Homo Sapiens; identical to SEQ ID NO: 1063
  misc_feature (67)..(67): n is a, c, g, or t
  misc_feature (75)..(75): n is a, c, g, or t
  misc_feature (160)..(189): n is a, c, g, or t
  misc_feature (212)..(212): n is a, c, g, or t
  misc_feature (222)..(222): n is a, c, g, or t
  misc_feature (287)..(288): n is a, c, g, or t
  misc_feature (322)..(322): n is a, c, g, or t
  misc_feature (390)..(390): n is a, c, g, or t
  misc_feature (463)..(463): n is a, c, g, or t
  misc_feature (505)..(505): n is a, c, g, or t
  misc_feature (596)..(598): n is a, c, g, or t
  misc_feature (650)..(650): n is a, c, g, or t
  misc_feature (666)..(666): n is a, c, g, or t
  misc_feature (682)..(682): n is a, c, g, or t

SEQ ID NO: 65570 - DNA, 855 bp, Homo Sapiens; identical to SEQ ID NO: 1066

SEQ ID NO: 65571 - DNA, 1644 bp, Homo Sapiens; identical to SEQ ID NO: 1067

SEQ ID NO: 65572 - DNA, 461 bp, Homo Sapiens; identical to SEQ ID NO: 1069

SEQ ID NO: 65573 - DNA, 527 bp, Homo Sapiens; identical to SEQ ID NO: 1072
  misc_feature (129)..(167): n is a, c, g, or t

SEQ ID NO: 65574 - DNA, 361 bp, Homo Sapiens; identical to SEQ ID NO: 1074

SEQ ID NO: 65575 - DNA, 737 bp, Homo Sapiens; identical to SEQ ID NO: 1078

SEQ ID NO: 65576 - DNA, 607 bp, Homo Sapiens; identical to SEQ ID NO: 1081

SEQ ID NO: 65577 - DNA, 903 bp, Homo Sapiens; identical to SEQ ID NO: 1085

SEQ ID NO: 65578 - DNA, 530 bp, Homo Sapiens; identical to SEQ ID NO: 1092
  misc_feature (239)..(239): n is a, c, g, or t
  misc_feature (245)..(246): n is a, c, g, or t
  misc_feature (266)..(266): n is a, c, g, or t

SEQ ID NO: 65579 - DNA, 813 bp, Homo Sapiens; identical to SEQ ID NO: 1095

SEQ ID NO: 65580 - DNA, 1078 bp, Homo Sapiens; identical to SEQ ID NO: 1102
  misc_feature (751)..(751): n is a, c, g, or t

SEQ ID NO: 65581 - DNA, 376 bp, Homo Sapiens; identical to SEQ ID NO: 1111

SEQ ID NO: 65582 - DNA, 855 bp, Homo Sapiens; identical to SEQ ID NO: 1113

SEQ ID NO: 65583 - DNA, 419 bp, Homo Sapiens; identical to SEQ ID NO: 1116

SEQ ID NO: 65584 - DNA, 449 bp, Homo Sapiens; identical to SEQ ID NO: 1118

SEQ ID NO: 65585 - DNA, 346 bp, Homo Sapiens; identical to SEQ ID NO: 1127

SEQ ID NO: 65586 - DNA, 418 bp, Homo Sapiens; identical to SEQ ID NO: 1130

SEQ ID NO: 65587 - DNA, 336 bp, Homo Sapiens; identical to SEQ ID NO: 1131

SEQ ID NO: 65588 - DNA, 663 bp, Homo Sapiens; identical to SEQ ID NO: 1134

SEQ ID NO: 65589 - DNA, 738 bp, Homo Sapiens; identical to SEQ ID NO: 1145

SEQ ID NO: 65590 - DNA, 398 bp, Homo Sapiens; identical to SEQ ID NO: 1147

SEQ ID NO: 65591 - DNA, 623 bp, Homo Sapiens; identical to SEQ ID NO: 1151

SEQ ID NO: 65592 - DNA, 721 bp, Homo Sapiens; identical to SEQ ID NO: 1153
  misc_feature (117)..(213): n is a, c, g, or t
  misc_feature (217)..(229): n is a, c, g, or t

SEQ ID NO: 65593 - DNA, 380 bp, Homo Sapiens; identical to SEQ ID NO: 1158

SEQ ID NO: 65594 - DNA, 310 bp, Homo Sapiens; identical to SEQ ID NO: 1163

SEQ ID NO: 65595 - DNA, 381 bp, Homo Sapiens; identical to SEQ ID NO: 1164

SEQ ID NO: 65596 - DNA, 527 bp, Homo Sapiens; identical to SEQ ID NO: 1168

SEQ ID NO: 65597 - DNA, 410 bp, Homo Sapiens; identical to SEQ ID NO: 1170

SEQ ID NO: 65598 - DNA, 363 bp, Homo Sapiens; identical to SEQ ID NO: 1174

SEQ ID NO: 65599 - DNA, 393 bp, Homo Sapiens; identical to SEQ ID NO: 1176

SEQ ID NO: 65600 - DNA, 850 bp, Homo Sapiens; identical to SEQ ID NO: 1181

SEQ ID NO: 65601 - DNA, 287 bp, Homo Sapiens; identical to SEQ ID NO: 1184

SEQ ID NO: 65602 - DNA, 459 bp, Homo Sapiens; identical to SEQ ID NO: 1186

SEQ ID NO: 65603 - DNA, 588 bp, Homo Sapiens; identical to SEQ ID NO: 1188

SEQ ID NO: 65604 - DNA, 971 bp, Homo Sapiens; identical to SEQ ID NO: 1196
  misc_feature (103)..(103): n is a, c, g, or t

SEQ ID NO: 65605 - DNA, 653 bp, Homo Sapiens; identical to SEQ ID NO: 1198

SEQ ID NO: 65606 - DNA, 870 bp, Homo Sapiens; identical to SEQ ID NO: 1201
  misc_feature (428)..(428): n is a, c, g, or t
  misc_feature (476)..(476): n is a, c, g, or t

SEQ ID NO: 65607 - DNA, 604 bp, Homo Sapiens; identical to SEQ ID NO: 1210

SEQ ID NO: 65608 - DNA, 647 bp, Homo Sapiens; identical to SEQ ID NO: 1213

SEQ ID NO: 65609 - DNA, 416 bp, Homo Sapiens; identical to SEQ ID NO: 1226

SEQ ID NO: 65610 - DNA, 460 bp, Homo Sapiens; identical to SEQ ID NO: 1251

SEQ ID NO: 65611 - DNA, 490 bp, Homo Sapiens; identical to SEQ ID NO: 1255
  misc_feature (30)..(30): n is a, c, g, or t

SEQ ID NO: 65612 - DNA, 485 bp, Homo Sapiens; identical to SEQ ID NO: 1259

SEQ ID NO: 65613 - DNA, 429 bp, Homo Sapiens; identical to SEQ ID NO: 1262

SEQ ID NO: 65614 - DNA, 857 bp, Homo Sapiens; identical to SEQ ID NO: 1267

SEQ ID NO: 65615 - DNA, 501 bp, Homo Sapiens; identical to SEQ ID NO: 1275

SEQ ID NO: 65616 - DNA, 310 bp, Homo Sapiens; identical to SEQ ID NO: 1277

SEQ ID NO: 65617 - DNA, 554 bp, Homo Sapiens; identical to SEQ ID NO: 1289
  misc_feature (22)..(22): n is a, c, g, or t
  misc_feature (42)..(42): n is a, c, g, or t
  misc_feature (86)..(86): n is a, c, g, or t

SEQ ID NO: 65618 - DNA, 209 bp, Homo Sapiens; identical to SEQ ID NO: 1294

SEQ ID NO: 65619 - DNA, 400 bp, Homo Sapiens; identical to SEQ ID NO: 1308

SEQ ID NO: 65620 - DNA, 560 bp, Homo Sapiens; identical to SEQ ID NO: 1313

SEQ ID NO: 65621 - DNA, 229 bp, Homo Sapiens; identical to SEQ ID NO: 1316

SEQ ID NO: 65622 - DNA, 517 bp, Homo Sapiens; identical to SEQ ID NO: 1331

SEQ ID NO: 65623 - DNA, 747 bp, Homo Sapiens; identical to SEQ ID NO: 1336

SEQ ID NO: 65624 - DNA, 791 bp, Homo Sapiens; identical to SEQ ID NO: 1337
  misc_feature (67)..(79): n is a, c, g, or t

SEQ ID NO: 65625 - DNA, 497 bp, Homo Sapiens; identical to SEQ ID NO: 1338
  misc_feature (115)..(138): n is a, c, g, or t

SEQ ID NO: 65626 - DNA, 547 bp, Homo Sapiens; identical to SEQ ID NO: 1340

SEQ ID NO: 65627 - DNA, 250 bp, Homo Sapiens; identical to SEQ ID NO: 1344

SEQ ID NO: 65628 - DNA, 666 bp, Homo Sapiens; identical to SEQ ID NO: 1347

SEQ ID NO: 65629 - DNA, 434 bp, Homo Sapiens; identical to SEQ ID NO: 1348

SEQ ID NO: 65630 - DNA, 383 bp, Homo Sapiens; identical to SEQ ID NO: 1349

SEQ ID NO: 65631 - DNA, 592 bp, Homo Sapiens; identical to SEQ ID NO: 1350

SEQ ID NO: 65632 - DNA, 708 bp, Homo Sapiens; identical to SEQ ID NO: 1351

SEQ ID NO: 65633 - DNA, 1386 bp, Homo Sapiens; identical to SEQ ID NO: 1363
  misc_feature (1239)..(1251): n is a, c, g, or t

SEQ ID NO: 65634 - DNA, 1389 bp, Homo Sapiens; identical to SEQ ID NO: 1367
  misc_feature (1301)..(1301): n is a, c, g, or t
  misc_feature (1312)..(1312): n is a, c, g, or t

SEQ ID NO: 65635 - DNA, 622 bp, Homo Sapiens; identical to SEQ ID NO: 1369

SEQ ID NO: 65636 - DNA, 379 bp, Homo Sapiens; identical to SEQ ID NO: 1370

SEQ ID NO: 65637 - DNA, 347 bp, Homo Sapiens; identical to SEQ ID NO: 1371

SEQ ID NO: 65638 - DNA, 485 bp, Homo Sapiens; identical to SEQ ID NO: 1372

SEQ ID NO: 65639 - DNA, 228 bp, Homo Sapiens; identical to SEQ ID NO: 1373

SEQ ID NO: 65640 - DNA, 788 bp, Homo Sapiens; identical to SEQ ID NO: 1402

SEQ ID NO: 65641 - DNA, 726 bp, Homo Sapiens; identical to SEQ ID NO: 1403

SEQ ID NO: 65642 - DNA, 3071 bp, Homo Sapiens; identical to SEQ ID NO: 1404
  misc_feature (97)..(98): n is a, c, g, or t
  misc_feature (123)..(123): n is a, c, g, or t
  misc_feature (177)..(179): n is a, c, g, or t
  misc_feature (184)..(202): n is a, c, g, or t
  misc_feature (215)..(215): n is a, c, g, or t
  misc_feature (221)..(221): n is a, c, g, or t
  misc_feature (233)..(233): n is a, c, g, or t
  misc_feature (305)..(305): n is a, c, g, or t
  misc_feature (343)..(343): n is a, c, g, or t
  misc_feature (351)..(351): n is a, c, g, or t
  misc_feature (437)..(437): n is a, c, g, or t
  misc_feature (459)..(460): n is a, c, g, or t
  misc_feature (479)..(479): n is a, c, g, or t
  misc_feature (537)..(537): n is a, c, g, or t
  misc_feature (566)..(566): n is a, c, g, or t
  misc_feature (595)..(595): n is a, c, g, or t
  misc_feature (631)..(631): n is a, c, g, or t
  misc_feature (890)..(898): n is a, c, g, or t
  misc_feature (949)..(972): n is a, c, g, or t

SEQ ID NO: 65643 - DNA, 478 bp, Homo Sapiens; identical to SEQ ID NO: 1407

SEQ ID NO: 65644 - DNA, 481 bp, Homo Sapiens; identical to SEQ ID NO: 1431
  misc_feature (21)..(21): n is a, c, g, or t
  misc_feature (104)..(104): n is a, c, g, or t
  misc_feature (119)..(119): n is a, c, g, or t

SEQ ID NO: 65645 - DNA, 275 bp, Homo Sapiens; identical to SEQ ID NO: 1448

SEQ ID NO: 65646 - DNA, 1148 bp, Homo Sapiens; identical to SEQ ID NO: 1468
  misc_feature (192)..(192): n is a, c, g, or t
  misc_feature (347)..(347): n is a, c, g, or t
  misc_feature (518)..(518): n is a, c, g, or t
  misc_feature (541)..(541): n is a, c, g, or t

SEQ ID NO: 65647 - DNA, 760 bp, Homo Sapiens; identical to SEQ ID NO: 1497

SEQ ID NO: 65648 - DNA, 495 bp, Homo Sapiens; identical to SEQ ID NO: 1517

SEQ ID NO: 65649 - DNA, 462 bp, Homo Sapiens; identical to SEQ ID NO: 1526

SEQ ID NO: 65650 - DNA, 1023 bp, Homo Sapiens; identical to SEQ ID NO: 1531
  misc_feature (453)..(453): n is a, c, g, or t

SEQ ID NO: 65651 - DNA, 688 bp, Homo Sapiens; identical to SEQ ID NO: 1564

SEQ ID NO: 65652 - DNA, 877 bp, Homo Sapiens; identical to SEQ ID NO: 1570
  misc_feature (488)..(488): n is a, c, g, or t

SEQ ID NO: 65653 - DNA, 624 bp, Homo Sapiens; identical to SEQ ID NO: 1571

SEQ ID NO: 65654 - DNA, 360 bp, Homo Sapiens; identical to SEQ ID NO: 1572

SEQ ID NO: 65655 - DNA, 1509 bp, Homo Sapiens; identical to SEQ ID NO: 1580

SEQ ID NO: 65656 - DNA, 1176 bp, Homo Sapiens; identical to SEQ ID NO: 1584
  misc_feature (679)..(739): n is a, c, g, or t

SEQ ID NO: 65657 - DNA, 975 bp, Homo Sapiens; identical to SEQ ID NO: 1614

SEQ ID NO: 65658 - DNA, 471 bp, Homo Sapiens; identical to SEQ ID NO: 1626

SEQ ID NO: 65659 - DNA, 541 bp, Homo Sapiens; identical to SEQ ID NO: 1628

SEQ ID NO: 65660 - DNA, 344 bp, Homo Sapiens; identical to SEQ ID NO: 1629

SEQ ID NO: 65661 - DNA, 666 bp, Homo Sapiens; identical to SEQ ID NO: 1630

SEQ ID NO: 65662 - DNA, 1130 bp, Homo Sapiens; identical to SEQ ID NO: 1633
  misc_feature (91)..(104): n is a, c, g, or t

SEQ ID NO: 65663 - DNA, 577 bp, Homo Sapiens; identical to SEQ ID NO: 1642

SEQ ID NO: 65664 - DNA, 534 bp, Homo Sapiens; identical to SEQ ID NO: 1646

SEQ ID NO: 65665 - DNA, 966 bp, Homo Sapiens; identical to SEQ ID NO: 1650

SEQ ID NO: 65666 - DNA, 1176 bp, Homo Sapiens; identical to SEQ ID NO: 1656

SEQ ID NO: 65667 - DNA, 768 bp, Homo Sapiens; identical to SEQ ID NO: 1660

SEQ ID NO: 65668 - DNA, 1431 bp, Homo Sapiens; identical to SEQ ID NO: 1661
  misc_feature (620)..(620): n is a, c, g, or t
  misc_feature (627)..(627): n is a, c, g, or t

SEQ ID NO: 65669 - DNA, 850 bp, Homo Sapiens; identical to SEQ ID NO: 1669

SEQ ID NO: 65670 - DNA, 532 bp, Homo Sapiens; identical to SEQ ID NO: 1671

SEQ ID NO: 65671 - DNA, 1041 bp, Homo Sapiens; identical to SEQ ID NO: 1672

SEQ ID NO: 65672 - DNA, 710 bp, Homo Sapiens; identical to SEQ ID NO: 1673

SEQ ID NO: 65673 - DNA, 430 bp, Homo Sapiens; identical to SEQ ID NO: 1682

SEQ ID NO: 65674 - DNA, 492 bp, Homo Sapiens; identical to SEQ ID NO: 1688
  misc_feature (478)..(478): n is a, c, g, or t

SEQ ID NO: 65675 - DNA, 904 bp, Homo Sapiens; identical to SEQ ID NO: 1694

SEQ ID NO: 65676 - DNA, 783 bp, Homo Sapiens; identical to SEQ ID NO: 1698
  misc_feature (755)..(755): n is a, c, g, or t

SEQ ID NO: 65677 - DNA, 852 bp, Homo Sapiens; identical to SEQ ID NO: 1710

SEQ ID NO: 65678 - DNA, 746 bp, Homo Sapiens; identical to SEQ ID NO: 1711

SEQ ID NO: 65679 - DNA, 1039 bp, Homo Sapiens; identical to SEQ ID NO: 1716
  misc_feature (75)..(75): n is a, c, g, or t

SEQ ID NO: 65680 - DNA, 947 bp, Homo Sapiens; identical to SEQ ID NO: 1717

SEQ ID NO: 65681 - DNA, 679 bp, Homo Sapiens; identical to SEQ ID NO: 1741

SEQ ID NO: 65682 - DNA, 1007 bp, Homo Sapiens; identical to SEQ ID NO: 1744

SEQ ID NO: 65683 - DNA, 1090 bp, Homo Sapiens; identical to SEQ ID NO: 1746
  misc_feature (980)..(980): n is a, c, g, or t

SEQ ID NO: 65684 - DNA, 933 bp, Homo Sapiens; identical to SEQ ID NO: 1747

SEQ ID NO: 65685 - DNA, 553 bp, Homo Sapiens; identical to SEQ ID NO: 1752

SEQ ID NO: 65686 - DNA, 536 bp, Homo Sapiens; identical to SEQ ID NO: 1758

SEQ ID NO: 65687 - DNA, 1035 bp, Homo Sapiens; identical to SEQ ID NO: 1759
  misc_feature (207)..(238): n is a, c, g, or t

SEQ ID NO: 65688 - DNA, 860 bp, Homo Sapiens; identical to SEQ ID NO: 1763

SEQ ID NO: 65689 - DNA, 857 bp, Homo Sapiens; identical to SEQ ID NO: 1765

SEQ ID NO: 65690 - DNA, 541 bp, Homo Sapiens; identical to SEQ ID NO: 1768

SEQ ID NO: 65691 - DNA, 922 bp, Homo Sapiens; identical to SEQ ID NO: 1779

SEQ ID NO: 65692 - DNA, 969 bp, Homo Sapiens; identical to SEQ ID NO: 1780
  misc_feature (684)..(684): n is a, c, g, or t

SEQ ID NO: 65693 - DNA, 577 bp, Homo Sapiens; identical to SEQ ID NO: 1789

SEQ ID NO: 65694 - DNA, 697 bp, Homo Sapiens; identical to SEQ ID NO: 1790

SEQ ID NO: 65695 - DNA, 252 bp, Homo Sapiens; identical to SEQ ID NO: 1807

SEQ ID NO: 65696 - DNA, 272 bp, Homo Sapiens; identical to SEQ ID NO: 1813

SEQ ID NO: 65697 - DNA, 628 bp, Homo Sapiens; identical to SEQ ID NO: 1815

SEQ ID NO: 65698 - DNA, 571 bp, Homo Sapiens; identical to SEQ ID NO: 1817

SEQ ID NO: 65699 - DNA, 1070 bp, Homo Sapiens; identical to SEQ ID NO: 1828
  misc_feature (440)..(476): n is a, c, g, or t

SEQ ID NO: 65700 - DNA, 1369 bp, Homo Sapiens; identical to SEQ ID NO: 1835

SEQ ID NO: 65701 - DNA, 860 bp, Homo Sapiens; identical to SEQ ID NO: 1837

SEQ ID NO: 65702 - DNA, 1048 bp, Homo Sapiens; identical to SEQ ID NO: 1839

SEQ ID NO: 65703 - DNA, 993 bp, Homo Sapiens; identical to SEQ ID NO: 1843

SEQ ID NO: 65704 - DNA, 843 bp, Homo Sapiens; identical to SEQ ID NO: 1845
  misc_feature (277)..(567): n is a, c, g, or t

SEQ ID NO: 65705 - DNA, 763 bp, Homo Sapiens; identical to SEQ ID NO: 1847

SEQ ID NO: 65706 - DNA, 897 bp, Homo Sapiens; identical to SEQ ID NO: 1848

SEQ ID NO: 65707 - DNA, 526 bp, Homo Sapiens; identical to SEQ ID NO: 1857

SEQ ID NO: 65708 - DNA, 502 bp, Homo Sapiens; identical to SEQ ID NO: 1859

SEQ ID NO: 65709 - DNA, 483 bp, Homo Sapiens; identical to SEQ ID NO: 1863

SEQ ID NO: 65710 - DNA, 576 bp, Homo Sapiens; identical to SEQ ID NO: 1877

SEQ ID NO: 65711 - DNA, 376 bp, Homo Sapiens; identical to SEQ ID NO: 1879

SEQ ID NO: 65712 - DNA, 521 bp, Homo Sapiens; identical to SEQ ID NO: 1882
  misc_feature (452)..(468): n is a, c, g, or t

SEQ ID NO: 65713 - DNA, 235 bp, Homo Sapiens; identical to SEQ ID NO: 1890

SEQ ID NO: 65714 - DNA, 591 bp, Homo Sapiens; identical to SEQ ID NO: 1904
  misc_feature (562)..(562): n is a, c, g, or t

SEQ ID NO: 65715 - DNA, 379 bp, Homo Sapiens; identical to SEQ ID NO: 1917

SEQ ID NO: 65716 - DNA, 453 bp, Homo Sapiens; identical to SEQ ID NO: 1923

SEQ ID NO: 65717 - DNA, 1744 bp, Homo Sapiens; identical to SEQ ID NO: 1924
  misc_feature (1018)..(1018): n is a, c, g, or t

SEQ ID NO: 65718 - DNA, 256 bp, Homo Sapiens; identical to SEQ ID NO: 1931

SEQ ID NO: 65719 - DNA, 626 bp, Homo Sapiens; identical to SEQ ID NO: 1940

SEQ ID NO: 65720 - DNA, 920 bp, Homo Sapiens; identical to SEQ ID NO: 1947

SEQ ID NO: 65721 - DNA, 291 bp, Homo Sapiens; identical to SEQ ID NO: 1978

SEQ ID NO: 65722 - DNA, 304 bp, Homo Sapiens; identical to SEQ ID NO: 1979

SEQ ID NO: 65723 - DNA, 706 bp, Homo Sapiens; identical to SEQ ID NO: 1986

SEQ ID NO: 65724 - DNA, 788 bp, Homo Sapiens; identical to SEQ ID NO: 1993
  misc_feature (74)..(203): n is a, c, g, or t

SEQ ID NO: 65725 - DNA, 544 bp, Homo Sapiens; identical to SEQ ID NO: 1995
  misc_feature (395)..(395): n is a, c, g, or t

SEQ ID NO: 65726 - DNA, 508 bp, Homo Sapiens; identical to SEQ ID NO: 1997

SEQ ID NO: 65727 - DNA, 822 bp, Homo Sapiens; identical to SEQ ID NO: 2007
  misc_feature (159)..(159): n is a, c, g, or t

SEQ ID NO: 65728 - DNA, 594 bp, Homo Sapiens; identical to SEQ ID NO: 2010

SEQ ID NO: 65729 - DNA, 515 bp, Homo Sapiens; identical to SEQ ID NO: 2018

SEQ ID NO: 65730 - DNA, 965 bp, Homo Sapiens; identical to SEQ ID NO: 2024

SEQ ID NO: 65731 - DNA, 410 bp, Homo Sapiens; identical to SEQ ID NO: 2035

SEQ ID NO: 65732 - DNA, 951 bp, Homo Sapiens; identical to SEQ ID NO: 2047

SEQ ID NO: 65733 - DNA, 689 bp, Homo Sapiens; identical to SEQ ID NO: 2058

SEQ ID NO: 65734 - DNA, 192 bp, Homo Sapiens; identical to SEQ ID NO: 2067

SEQ ID NO: 65735 - DNA, 448 bp, Homo Sapiens; identical to SEQ ID NO: 2073
  misc_feature (380)..(388): n is a, c, g, or t

SEQ ID NO: 65736 - DNA, 513 bp, Homo Sapiens; identical to SEQ ID NO: 2077

SEQ ID NO: 65737 - DNA, 1120 bp, Homo Sapiens; identical to SEQ ID NO: 2081
  misc_feature (912)..(1013): n is a, c, g, or t

SEQ ID NO: 65738 - DNA, 719 bp, Homo Sapiens; identical to SEQ ID NO: 2086

SEQ ID NO: 65739 - DNA, 901 bp, Homo Sapiens; identical to SEQ ID NO: 2096
  misc_feature (37)..(37): n is a, c, g, or t
  misc_feature (67)..(67): n is a, c, g, or t
  misc_feature (238)..(238): n is a, c, g, or t

SEQ ID NO: 65740 - DNA, 722 bp, Homo Sapiens; identical to SEQ ID NO: 2103
  misc_feature (675)..(675): n is a, c, g, or t

SEQ ID NO: 65741 - DNA, 611 bp, Homo Sapiens; identical to SEQ ID NO: 2104
  misc_feature (386)..(386): n is a, c, g, or t
  misc_feature (510)..(510): n is a, c, g, or t

SEQ ID NO: 65742 - DNA, 379 bp, Homo Sapiens; identical to SEQ ID NO: 2109

SEQ ID NO: 65743 - DNA, 833 bp, Homo Sapiens; identical to SEQ ID NO: 2130
  misc_feature (137)..(137): n is a, c, g, or t

SEQ ID NO: 65744 - DNA, 1271 bp, Homo Sapiens; identical to SEQ ID NO: 2136

SEQ ID NO: 65745 - DNA, 627 bp, Homo Sapiens; identical to SEQ ID NO: 2141

SEQ ID NO: 65746 - DNA, 303 bp, Homo Sapiens; identical to SEQ ID NO: 2144
  misc_feature (250)..(258): n is a, c, g, or t

SEQ ID NO: 65747 - DNA, 801 bp, Homo Sapiens; identical to SEQ ID NO: 2146

SEQ ID NO: 65748 - DNA, 650 bp, Homo Sapiens; identical to SEQ ID NO: 2148

SEQ ID NO: 65749 - DNA, 1654 bp, Homo Sapiens; identical to SEQ ID NO: 2150
  misc_feature (56)..(68): n is a, c, g, or t
  misc_feature (93)..(143): n is a, c, g, or t
  misc_feature (377)..(418): n is a, c, g, or t
  misc_feature (450)..(697): n is a, c, g, or t
  misc_feature (1475)..(1475): n is a, c, g, or t
  misc_feature (1509)..(1509): n is a, c, g, or t
  misc_feature (1585)..(1585): n is a, c, g, or t

SEQ ID NO: 65750 - DNA, 448 bp, Homo Sapiens; identical to SEQ ID NO: 2154

SEQ ID NO: 65751 - DNA, 1108 bp, Homo Sapiens; identical to SEQ ID NO: 2156
  misc_feature (174)..(200): n is a, c, g, or t
  misc_feature (385)..(395): n is a, c, g, or t
  misc_feature (990)..(1068): n is a, c, g, or t

SEQ ID NO: 65752 - DNA, 1140 bp, Homo Sapiens; identical to SEQ ID NO: 2157

SEQ ID NO: 65753 - DNA, 474 bp, Homo Sapiens; identical to SEQ ID NO: 2158
  misc_feature (123)..(132): n is a, c, g, or t
  misc_feature (156)..(169): n is a, c, g, or t

SEQ ID NO: 65754 - DNA, 499 bp, Homo Sapiens; identical to SEQ ID NO: 2163

SEQ ID NO: 65755 - DNA, 815 bp, Homo Sapiens; identical to SEQ ID NO: 2165
  misc_feature (582)..(592): n is a, c, g, or t

SEQ ID NO: 65756 - DNA, 546 bp, Homo Sapiens; identical to SEQ ID NO: 2169

SEQ ID NO: 65757 - DNA, 1576 bp, Homo Sapiens; identical to SEQ ID NO: 2181
  misc_feature (356)..(367): n is a, c, g, or t
  misc_feature (882)..(907): n is a, c, g, or t
  misc_feature (909)..(909): n is a, c, g, or t
  misc_feature (912)..(913): n is a, c, g, or t
  misc_feature (918)..(918): n is a, c, g, or t
  misc_feature (956)..(969): n is a, c, g, or t
  misc_feature (999)..(1000): n is a, c, g, or t
  misc_feature (1010)..(1029): n is a, c, g, or t
  misc_feature (1036)..(1057): n is a, c, g, or t
  misc_feature (1153)..(1164): n is a, c, g, or t
  misc_feature (1288)..(1300): n is a, c, g, or t

SEQ ID NO: 65758 - DNA, 746 bp, Homo Sapiens; identical to SEQ ID NO: 2183

SEQ ID NO: 65759 - DNA, 938 bp, Homo Sapiens; identical to SEQ ID NO: 2197

SEQ ID NO: 65760 - DNA, 1414 bp, Homo Sapiens; identical to SEQ ID NO: 2204
  misc_feature (951)..(951): n is a, c, g, or t
  misc_feature (1225)..(1243): n is a, c, g, or t
  misc_feature (1303)..(1324): n is a, c, g, or t

SEQ ID NO: 65761 - DNA, 1173 bp, Homo Sapiens; identical to SEQ ID NO: 2208
  misc_feature (183)..(183): n is a, c, g, or t

SEQ ID NO: 65762 - DNA, 272 bp, Homo Sapiens; identical to SEQ ID NO: 2215

SEQ ID NO: 65763 - DNA, 1054 bp, Homo Sapiens; identical to SEQ ID NO: 2220
  misc_feature (41)..(41): n is a, c, g, or t
  misc_feature (50)..(58): n is a, c, g, or t
  misc_feature (130)..(130): n is a, c, g, or t
  misc_feature (243)..(452): n is a, c, g, or t

SEQ ID NO: 65764 - DNA, 488 bp, Homo Sapiens; identical to SEQ ID NO: 2225

SEQ ID NO: 65765 - DNA, 759 bp, Homo Sapiens; identical to SEQ ID NO: 2226
  misc_feature (382)..(382): n is a, c, g, or t

SEQ ID NO: 65766 - DNA, 932 bp, Homo Sapiens; identical to SEQ ID NO: 2227

SEQ ID NO: 65767 - DNA, 466 bp, Homo Sapiens; identical to SEQ ID NO: 2228

SEQ ID NO: 65768 - DNA, 916 bp, Homo Sapiens; identical to SEQ ID NO: 2233
  misc_feature (481)..(496): n is a, c, g, or t

SEQ ID NO: 65769 - DNA, 948 bp, Homo Sapiens; identical to SEQ ID NO: 2262
  misc_feature (64)..(64): n is a, c, g, or t
  misc_feature (90)..(90): n is a, c, g, or t

SEQ ID NO: 65770 - DNA, 803 bp, Homo Sapiens; identical to SEQ ID NO: 2265
  misc_feature (99)..(99): n is a, c, g, or t
  misc_feature (122)..(122): n is a, c, g, or t

SEQ ID NO: 65771 - DNA, 364 bp, Homo Sapiens; identical to SEQ ID NO: 2266

SEQ ID NO: 65772 - DNA, 452 bp, Homo Sapiens; identical to SEQ ID NO: 2267

SEQ ID NO: 65773 - DNA, 268 bp, Homo Sapiens; identical to SEQ ID NO: 2273

SEQ ID NO: 65774 - DNA, 834 bp, Homo Sapiens; identical to SEQ ID NO: 2277

SEQ ID NO: 65775 - DNA, 859 bp, Homo Sapiens; identical to SEQ ID NO: 2297

SEQ ID NO: 65776 - DNA, 663 bp, Homo Sapiens; identical to SEQ ID NO: 2300

SEQ ID NO: 65777 - DNA, 915 bp, Homo Sapiens; identical to SEQ ID NO: 2306

SEQ ID NO: 65778 - DNA, 371 bp, Homo Sapiens; identical to SEQ ID NO: 2307

SEQ ID NO: 65779 - DNA, 342 bp, Homo Sapiens; identical to SEQ ID NO: 2309
  misc_feature (178)..(189): n is a, c, g, or t

SEQ ID NO: 65780 - DNA, 986 bp, Homo Sapiens; identical to SEQ ID NO: 2319

SEQ ID NO: 65781 - DNA, 416 bp, Homo Sapiens; identical to SEQ ID NO: 2333

SEQ ID NO: 65782 - DNA, 613 bp, Homo Sapiens; identical to SEQ ID NO: 2335

SEQ ID NO: 65783 - DNA, 1119 bp, Homo Sapiens; identical to SEQ ID NO: 2338

SEQ ID NO: 65784 - DNA, 956 bp, Homo Sapiens; identical to SEQ ID NO: 2339

SEQ ID NO: 65785 - DNA, 1139 bp, Homo Sapiens; identical to SEQ ID NO: 2342
  misc_feature (218)..(218): n is a, c, g, or t

SEQ ID NO: 65786 - DNA, 502 bp, Homo Sapiens; identical to SEQ ID NO: 2345

SEQ ID NO: 65787 - DNA, 1103 bp, Homo Sapiens; identical to SEQ ID NO: 2352
  misc_feature (96)..(96): n is a, c, g, or t

SEQ ID NO: 65788 - DNA, 1117 bp, Homo Sapiens; identical to SEQ ID NO: 2354
  misc_feature (123)..(212): n is a, c, g, or t

SEQ ID NO: 65789 - DNA, 522 bp, Homo Sapiens; identical to SEQ ID NO: 2357

SEQ ID NO: 65790 - DNA, 460 bp, Homo Sapiens; identical to SEQ ID NO: 2358

SEQ ID NO: 65791 - DNA, 462 bp, Homo Sapiens; identical to SEQ ID NO: 2360

SEQ ID NO: 65792 - DNA, 506 bp, Homo Sapiens; identical to SEQ ID NO: 2362
  misc_feature (82)..(83): n is a, c, g, or t

SEQ ID NO: 65793 - DNA, 677 bp, Homo Sapiens; identical to SEQ ID NO: 2365

SEQ ID NO: 65794 - DNA, 1076 bp, Homo Sapiens; identical to SEQ ID NO: 2382

SEQ ID NO: 65795 - DNA, 274 bp, Homo Sapiens; identical to SEQ ID NO: 2385

SEQ ID NO: 65796 - DNA, 1072 bp, Homo Sapiens; identical to SEQ ID NO: 2392

SEQ ID NO: 65797 - DNA, 383 bp, Homo Sapiens; identical to SEQ ID NO: 2410

SEQ ID NO: 65798 - DNA, 276 bp, Homo Sapiens; identical to SEQ ID NO: 2421

SEQ ID NO: 65799 - DNA, 442 bp, Homo Sapiens; identical to SEQ ID NO: 2429

SEQ ID NO: 65800 - DNA, 319 bp, Homo Sapiens; identical to SEQ ID NO: 2439

SEQ ID NO: 65801 - DNA, 1509 bp, Homo Sapiens; identical to SEQ ID NO: 2454
  misc_feature (192)..(249): n is a, c, g, or t
  misc_feature (608)..(703): n is a, c, g, or t

SEQ ID NO: 65802 - DNA, 505 bp, Homo Sapiens; identical to SEQ ID NO: 2466

SEQ ID NO: 65803 - DNA, 677 bp, Homo Sapiens; identical to SEQ ID NO: 2474

SEQ ID NO: 65804 - DNA, 354 bp, Homo Sapiens; identical to SEQ ID NO: 2477

SEQ ID NO: 65805 - DNA, 761 bp, Homo Sapiens; identical to SEQ ID NO: 2481
  misc_feature (588)..(588): n is a, c, g, or t

SEQ ID NO: 65806 - DNA, 538 bp, Homo Sapiens; identical to SEQ ID NO: 2490
  misc_feature (312)..(348): n is a, c, g, or t

SEQ ID NO: 65807 - DNA, 341 bp, Homo Sapiens; identical to SEQ ID NO: 2492

SEQ ID NO: 65808 - DNA, 454 bp, Homo Sapiens; identical to SEQ ID NO: 2503

SEQ ID NO: 65809 - DNA, 562 bp, Homo Sapiens; identical to SEQ ID NO: 2506

SEQ ID NO: 65810 - DNA, 531 bp, Homo Sapiens; identical to SEQ ID NO: 2507

SEQ ID NO: 65811 - DNA, 426 bp, Homo Sapiens; identical to SEQ ID NO: 2526

SEQ ID NO: 65812 - DNA, 1119 bp, Homo Sapiens; identical to SEQ ID NO: 2537

SEQ ID NO: 65813 - DNA, 1165 bp, Homo Sapiens; identical to SEQ ID NO: 2545

SEQ ID NO: 65814 - DNA, 628 bp, Homo Sapiens; identical to SEQ ID NO: 2546

SEQ ID NO: 65815 - DNA, 448 bp, Homo Sapiens; identical to SEQ ID NO: 2548
  misc_feature (264)..(289): n is a, c, g, or t

SEQ ID NO: 65816 - DNA, 523 bp, Homo Sapiens; identical to SEQ ID NO: 2571

SEQ ID NO: 65817 - DNA, 636 bp, Homo Sapiens; identical to SEQ ID NO: 2576

SEQ ID NO: 65818 - DNA, 543 bp, Homo Sapiens; identical to SEQ ID NO: 2579
  misc_feature (483)..(483): n is a, c, g, or t

SEQ ID NO: 65819 - DNA, 463 bp, Homo Sapiens; identical to SEQ ID NO: 2604

SEQ ID NO: 65820 - DNA, 370 bp, Homo Sapiens; identical to SEQ ID NO: 2610

SEQ ID NO: 65821 - DNA, 288 bp, Homo Sapiens; identical to SEQ ID NO: 2634

SEQ ID NO: 65822 - DNA, 489 bp, Homo Sapiens; identical to SEQ ID NO: 2656

SEQ ID NO: 65823 - DNA, 429 bp, Homo Sapiens; identical to SEQ ID NO: 2658

SEQ ID NO: 65824 - DNA, 841 bp, Homo Sapiens; identical to SEQ ID NO: 2663
  misc_feature (72)..(72): n is a, c, g, or t

SEQ ID NO: 65825 - DNA, 604 bp, Homo Sapiens; identical to SEQ ID NO: 2665

SEQ ID NO: 65826 - DNA, 869 bp, Homo Sapiens; identical to SEQ ID NO: 2671

SEQ ID NO: 65827 - DNA, 639 bp, Homo Sapiens; identical to SEQ ID NO: 2676
  misc_feature (43)..(87): n is a, c, g, or t

SEQ ID NO: 65828 - DNA, 1250 bp, Homo Sapiens; identical to SEQ ID NO: 2680
  misc_feature (290)..(324): n is a, c, g, or t
  misc_feature (369)..(527): n is a, c, g, or t

SEQ ID NO: 65829 - DNA, 914 bp, Homo Sapiens; identical to SEQ ID NO: 2681
  misc_feature (348)..(356): n is a, c, g, or t

SEQ ID NO: 65830 - DNA, 2080 bp, Homo Sapiens; identical to SEQ ID NO: 2690
  misc_feature (201)..(247): n is a, c, g, or t
  misc_feature (306)..(306): n is a, c, g, or t
  misc_feature (345)..(365): n is a, c, g, or t
  misc_feature (395)..(395): n is a, c, g, or t
  misc_feature (421)..(421): n is a, c, g, or t
  misc_feature (966)..(992): n is a, c, g, or t

SEQ ID NO: 65831 - DNA, 822 bp, Homo Sapiens; identical to SEQ ID NO: 2693
  misc_feature (50)..(51): n is a, c, g, or t
  misc_feature (70)..(71): n is a, c, g, or t

SEQ ID NO: 65832 - DNA, 1222 bp, Homo Sapiens; identical to SEQ ID NO: 2694
  misc_feature (111)..(111): n is a, c, g, or t
  misc_feature (357)..(367): n is a, c, g, or t
  misc_feature (616)..(640): n is a, c, g, or t
  misc_feature (646)..(646): n is a, c, g, or t
  misc_feature (684)..(696): n is a, c, g, or t
  misc_feature (715)..(852): n is a, c, g, or t

SEQ ID NO: 65833 - DNA, 550 bp, Homo Sapiens; identical to SEQ ID NO: 2717

SEQ ID NO: 65834 - DNA, 233 bp, Homo Sapiens; identical to SEQ ID NO: 2731
  misc_feature (177)..(185): n is a, c, g, or t

SEQ ID NO: 65835 - DNA, 357 bp, Homo Sapiens; identical to SEQ ID NO: 2739

SEQ ID NO: 65836 - DNA, 614 bp, Homo Sapiens; identical to SEQ ID NO: 2741
  misc_feature (575)..(575): n is a, c, g, or t

SEQ ID NO: 65837 - DNA, 264 bp, Homo Sapiens; identical to SEQ ID NO: 2743

SEQ ID NO: 65838 - DNA, 868 bp, Homo Sapiens; identical to SEQ ID NO: 2750

SEQ ID NO: 65839 - DNA, 953 bp, Homo Sapiens; identical to SEQ ID NO: 2751
  misc_feature (325)..(325): n is a, c, g, or t
  misc_feature (394)..(394): n is a, c, g, or t
  misc_feature (750)..(750): n is a, c, g, or t
  misc_feature (765)..(765): n is a, c, g, or t
  misc_feature (779)..(779): n is a, c, g, or t
  misc_feature (784)..(784): n is a, c, g, or t
  misc_feature (795)..(796): n is a, c, g, or t
  misc_feature (800)..(800): n is a, c, g, or t
  misc_feature (817)..(817): n is a, c, g, or t
  misc_feature (828)..(828): n is a, c, g, or t
  misc_feature (863)..(863): n is a, c, g, or t
  misc_feature (874)..(874): n is a, c, g, or t

SEQ ID NO: 65840 - DNA, 752 bp, Homo Sapiens; identical to SEQ ID NO: 2757
  misc_feature (323)..(323): n is a, c, g, or t

SEQ ID NO: 65841 - DNA, 552 bp, Homo Sapiens; identical to SEQ ID NO: 2762
  misc_feature (78)..(78): n is a, c, g, or t

SEQ ID NO: 65842 - DNA, 546 bp, Homo Sapiens; identical to SEQ ID NO: 2765
  misc_feature (500)..(500): n is a, c, g, or t

SEQ ID NO: 65843 - DNA, 892 bp, Homo Sapiens; identical to SEQ ID NO: 2773

SEQ ID NO: 65844 - DNA, 1262 bp, Homo Sapiens; identical to SEQ ID NO: 2775
  misc_feature (924)..(924): n is a, c, g, or t
  misc_feature (1021)..(1021): n is a, c, g, or t
  misc_feature (1234)..(1234): n is a, c, g, or t
  misc_feature (1240)..(1240): n is a, c, g, or t

SEQ ID NO: 65845 - DNA, 1124 bp, Homo Sapiens; identical to SEQ ID NO: 2776

SEQ ID NO: 65846 - DNA, 844 bp, Homo Sapiens; identical to SEQ ID NO: 2796
  misc_feature (599)..(609): n is a, c, g, or t

SEQ ID NO: 65847 - DNA, 532 bp, Homo Sapiens; identical to SEQ ID NO: 2798

SEQ ID NO: 65848 - DNA, 674 bp, Homo Sapiens; identical to SEQ ID NO: 2802
  misc_feature (454)..(467): n is a, c, g, or t

SEQ ID NO: 65849 - DNA, 699 bp, Homo Sapiens; identical to SEQ ID NO: 2807

SEQ ID NO: 65850 - DNA, 975 bp, Homo Sapiens; identical to SEQ ID NO: 2815
  misc_feature (491)..(501): n is a, c, g, or t

SEQ ID NO: 65851 - DNA, 1487 bp, Homo Sapiens; identical to SEQ ID NO: 2816
  misc_feature (60)..(68): n is a, c, g, or t
  misc_feature (106)..(106): n is a, c, g, or t
  misc_feature (109)..(109): n is a, c, g, or t

SEQ ID NO: 65852 - DNA, 145 bp, Homo Sapiens; identical to SEQ ID NO: 2818

SEQ ID NO: 65853 - DNA, 1121 bp, Homo Sapiens; identical to SEQ ID NO: 2836
  misc_feature (92)..(92): n is a, c, g, or t
  misc_feature (109)..(109): n is a, c, g, or t
  misc_feature (148)..(148): n is a, c, g, or t
  misc_feature (340)..(348): n is a, c, g, or t
  misc_feature (614)..(614): n is a, c, g, or t
  misc_feature (626)..(626): n is a, c, g, or t
  misc_feature (650)..(651): n is a, c, g, or t
  misc_feature (658)..(688): n is a, c, g, or t
  misc_feature (691)..(721): n is a, c, g, or t
  misc_feature (724)..(743): n is a, c, g, or t
  misc_feature (745)..(747): n is a, c, g, or t

SEQ ID NO: 65854 - DNA, 842 bp, Homo Sapiens; identical to SEQ ID NO: 2837

SEQ ID NO: 65855 - DNA, 1410 bp, Homo Sapiens; identical to SEQ ID NO: 2840
  misc_feature (494)..(510): n is a, c, g, or t
  misc_feature (554)..(600): n is a, c, g, or t
  misc_feature (633)..(845): n is a, c, g, or t

SEQ ID NO: 65856 - DNA, 699 bp, Homo Sapiens; identical to SEQ ID NO: 2868

SEQ ID NO: 65857 - DNA, 1729 bp, Homo Sapiens; identical to SEQ ID NO: 2874

SEQ ID NO: 65858 - DNA, 988 bp, Homo Sapiens; identical to SEQ ID NO: 2875
  misc_feature (41)..(41): n is a, c, g, or t
  misc_feature (47)..(56): n is a, c, g, or t
  misc_feature (168)..(168): n is a, c, g, or t
  misc_feature (263)..(263): n is a, c, g, or t
  misc_feature (852)..(864): n is a, c, g, or t

SEQ ID NO: 65859 - DNA, 1370 bp, Homo Sapiens; identical to SEQ ID NO: 2883

SEQ ID NO: 65860 - DNA, 253 bp, Homo Sapiens; identical to SEQ ID NO: 2885

SEQ ID NO: 65861 - DNA, 595 bp, Homo Sapiens; identical to SEQ ID NO: 2887

SEQ ID NO: 65862 - DNA, 541 bp, Homo Sapiens; identical to SEQ ID NO: 2889

SEQ ID NO: 65863 - DNA, 922 bp, Homo Sapiens; identical to SEQ ID NO: 2903

SEQ ID NO: 65864 - DNA, 819 bp, Homo Sapiens; identical to SEQ ID NO: 2920

SEQ ID NO: 65865 - DNA, 203 bp, Homo Sapiens; identical to SEQ ID NO: 2927

SEQ ID NO: 65866 - DNA, 453 bp, Homo Sapiens; identical to SEQ ID NO: 2929

SEQ ID NO: 65867 - DNA, 527 bp, Homo Sapiens; identical to SEQ ID NO: 2932

SEQ ID NO: 65868 - DNA, 726 bp, Homo Sapiens; identical to SEQ ID NO: 2943
  misc_feature (41)..(56): n is a, c, g, or t
  misc_feature (64)..(218): n is a, c, g, or t

SEQ ID NO: 65869 - DNA, 791 bp, Homo Sapiens; identical to SEQ ID NO: 2950
  misc_feature (150)..(157): n is a, c, g, or t
  misc_feature (159)..(175): n is a, c, g, or t

SEQ ID NO: 65870 - DNA, 1538 bp, Homo Sapiens; identical to SEQ ID NO: 2955
  misc_feature (262)..(262): n is a, c, g, or t
  misc_feature (1330)..(1341): n is a, c, g, or t

SEQ ID NO: 65871 - DNA, 1177 bp, Homo Sapiens; identical to SEQ ID NO: 2956

SEQ ID NO: 65872 - DNA, 941 bp, Homo Sapiens; identical to SEQ ID NO: 2958

SEQ ID NO: 65873 - DNA, 391 bp, Homo Sapiens; identical to SEQ ID NO: 2971

SEQ ID NO: 65874 - DNA, 1444 bp, Homo Sapiens; identical to SEQ ID NO: 2989

SEQ ID NO: 65875 - DNA, 1565 bp, Homo Sapiens; identical to SEQ ID NO: 2990

SEQ ID NO: 65876 - DNA, 521 bp, Homo Sapiens; identical to SEQ ID NO: 2996

SEQ ID NO: 65877 - DNA, 519 bp, Homo Sapiens; identical to SEQ ID NO: 2997

SEQ ID NO: 65878 - DNA, 462 bp, Homo Sapiens; identical to SEQ ID NO: 3001

SEQ ID NO: 65879 - DNA, 524 bp, Homo Sapiens; identical to SEQ ID NO: 3021

SEQ ID NO: 65880 - DNA, 709 bp, Homo Sapiens; identical to SEQ ID NO: 3035
  misc_feature (279)..(315): n is a, c, g, or t
  misc_feature (320)..(320): n is a, c, g, or t

SEQ ID NO: 65881 - DNA, 300 bp, Homo Sapiens; identical to SEQ ID NO: 3044

SEQ ID NO: 65882 - DNA, 679 bp, Homo Sapiens; identical to SEQ ID NO: 3063

SEQ ID NO: 65883 - DNA, 483 bp, Homo Sapiens; identical to SEQ ID NO: 3075

SEQ ID NO: 65884 - DNA, 797 bp, Homo Sapiens; identical to SEQ ID NO: 3079
  misc_feature (554)..(585): n is a, c, g, or t

SEQ ID NO: 65885 - DNA, 707 bp, Homo Sapiens; identical to SEQ ID NO: 3080

SEQ ID NO: 65886 - DNA, 1805 bp, Homo Sapiens; identical to SEQ ID NO: 3081

SEQ ID NO: 65887 - DNA, 484 bp, Homo Sapiens; identical to SEQ ID NO: 3082

SEQ ID NO: 65888 - DNA, 637 bp, Homo Sapiens; identical to SEQ ID NO: 3084

SEQ ID NO: 65889 - DNA, 457 bp, Homo Sapiens; identical to SEQ ID NO: 3098
  misc_feature (179)..(223): n is a, c, g, or t

SEQ ID NO: 65890 - DNA, 307 bp, Homo Sapiens; identical to SEQ ID NO: 3103

SEQ ID NO: 65891 - DNA, 616 bp, Homo Sapiens; identical to SEQ ID NO: 3107
  misc_feature (15)..(15): n is a, c, g, or t
  misc_feature (36)..(36): n is a, c, g, or t
  misc_feature (73)..(73): n is a, c, g, or t

SEQ ID NO: 65892 - DNA, 567 bp, Homo Sapiens; identical to SEQ ID NO: 3108

SEQ ID NO: 65893 - DNA, 760 bp, Homo Sapiens; identical to SEQ ID NO: 3109

SEQ ID NO: 65894 - DNA, 1230 bp, Homo Sapiens; identical to SEQ ID NO: 3112

SEQ ID NO: 65895 - DNA, 608 bp, Homo Sapiens; identical to SEQ ID NO: 3119

SEQ ID NO: 65896 - DNA, 274 bp, Homo Sapiens; identical to SEQ ID NO: 3120

SEQ ID NO: 65897 - DNA, 1165 bp, Homo Sapiens; identical to SEQ ID NO: 3134

SEQ ID NO: 65898 - DNA, 1088 bp, Homo Sapiens; identical to SEQ ID NO: 3153
  misc_feature (752)..(752): n is a, c, g, or t

SEQ ID NO: 65899 - DNA, 497 bp, Homo Sapiens; identical to SEQ ID NO: 3159

SEQ ID NO: 65900 - DNA, 391 bp, Homo Sapiens; identical to SEQ ID NO: 3160

SEQ ID NO: 65901 - DNA, 612 bp, Homo Sapiens; identical to SEQ ID NO: 3161
  misc_feature (535)..(535): n is a, c, g, or t

SEQ ID NO: 65902 - DNA, 524 bp, Homo Sapiens; identical to SEQ ID NO: 3162

SEQ ID NO: 65903 - DNA, 507 bp, Homo Sapiens; identical to SEQ ID NO: 3166

SEQ ID NO: 65904 - DNA, 767 bp, Homo Sapiens; identical to SEQ ID NO: 3169

SEQ ID NO: 65905 - DNA, 690 bp, Homo Sapiens; identical to SEQ ID NO: 3176

SEQ ID NO: 65906 - DNA, 400 bp, Homo Sapiens; identical to SEQ ID NO: 3191
  misc_feature (21)..(21): n is a, c, g, or t
  misc_feature (314)..(314): n is a, c, g, or t

SEQ ID NO: 65907 - DNA, 455 bp, Homo Sapiens; identical to SEQ ID NO: 3197

SEQ ID NO: 65908 - DNA, 862 bp, Homo Sapiens; identical to SEQ ID NO: 3209
  misc_feature (30)..(30): n is a, c, g, or t
  misc_feature (182)..(226): n is a, c, g, or t
  misc_feature (269)..(324): n is a, c, g, or t
  misc_feature (349)..(363): n is a, c, g, or t
  misc_feature (497)..(507): n is a, c, g, or t

SEQ ID NO: 65909 - DNA, 500 bp, Homo Sapiens; identical to SEQ ID NO: 3214

SEQ ID NO: 65910 - DNA, 1806 bp, Homo Sapiens; identical to SEQ ID NO: 3216

SEQ ID NO: 65911 - DNA, 324 bp, Homo Sapiens; identical to SEQ ID NO: 3220

SEQ ID NO: 65912 - DNA, 461 bp, Homo Sapiens; identical to SEQ ID NO: 3226

SEQ ID NO: 65913 - DNA, 865 bp, Homo Sapiens; identical to SEQ ID NO: 3228

SEQ ID NO: 65914 - DNA, 940 bp, Homo Sapiens; identical to SEQ ID NO: 3230

SEQ ID NO: 65915 - DNA, 1620 bp, Homo Sapiens; identical to SEQ ID NO: 3237

SEQ ID NO: 65916 - DNA, 268 bp, Homo Sapiens; identical to SEQ ID NO: 3251

SEQ ID NO: 65917 - DNA, 1055 bp, Homo Sapiens; identical to SEQ ID NO: 3263

SEQ ID NO: 65918 - DNA, 1092 bp, Homo Sapiens; identical to SEQ ID NO: 3267

SEQ ID NO: 65919 - DNA, 460 bp, Homo Sapiens; identical to SEQ ID NO: 3273

SEQ ID NO: 65920 - DNA, 425 bp, Homo Sapiens; identical to SEQ ID NO: 3279

SEQ ID NO: 65921 - DNA, 880 bp, Homo Sapiens; identical to SEQ ID NO: 3288
  misc_feature (352)..(352): n is a, c, g, or t
  misc_feature (673)..(697): n is a, c, g, or t

SEQ ID NO: 65922 - DNA, 566 bp, Homo Sapiens; identical to SEQ ID NO: 3289

SEQ ID NO: 65923 - DNA, 1140 bp, Homo Sapiens; identical to SEQ ID NO: 3290
  misc_feature (60)..(60): n is a, c, g, or t

SEQ ID NO: 65924 - DNA, 765 bp, Homo Sapiens; identical to SEQ ID NO: 3305
  misc_feature (48)..(48): n is a, c, g, or t
  misc_feature (142)..(153): n is a, c, g, or t

SEQ ID NO: 65925 - DNA, 807 bp, Homo Sapiens; identical to SEQ ID NO: 3313

SEQ ID NO: 65926 - DNA, 435 bp, Homo Sapiens; identical to SEQ ID NO: 3317

SEQ ID NO: 65927 - DNA, 850 bp, Homo Sapiens; identical to SEQ ID NO: 3328

SEQ ID NO: 65928 - DNA, 529 bp, Homo Sapiens; identical to SEQ ID NO: 3329

SEQ ID NO: 65929 - DNA, 646 bp, Homo Sapiens; identical to SEQ ID NO: 3330

SEQ ID NO: 65930 - DNA, 1154 bp, Homo Sapiens; identical to SEQ ID NO: 3335
  misc_feature (109)..(109): n is a, c, g, or t
  misc_feature (287)..(287): n is a, c, g, or t
  misc_feature (447)..(447): n is a, c, g, or t
  misc_feature (461)..(461): n is a, c, g, or t

SEQ ID NO: 65931 - DNA, 1122 bp, Homo Sapiens; identical to SEQ ID NO: 3337
  misc_feature (764)..(799): n is a, c, g, or t

SEQ ID NO: 65932 - DNA, 824 bp, Homo Sapiens; identical to SEQ ID NO: 3339

SEQ ID NO: 65933 - DNA, 924 bp, Homo Sapiens; identical to SEQ ID NO: 3346

SEQ ID NO: 65934 - DNA, 638 bp, Homo Sapiens; identical to SEQ ID NO: 3355

SEQ ID NO: 65935 - DNA, 1063 bp, Homo Sapiens; identical to SEQ ID NO: 3359

SEQ ID NO: 65936 - DNA, 1260 bp, Homo Sapiens; identical to SEQ ID NO: 3362

SEQ ID NO: 65937 - DNA, 1186 bp, Homo Sapiens; identical to SEQ ID NO: 3367
  misc_feature (139)..(156): n is a, c, g, or t
  misc_feature (161)..(271): n is a, c, g, or t
  misc_feature (606)..(606): n is a, c, g, or t

SEQ ID NO: 65938 - DNA, 805 bp, Homo Sapiens; identical to SEQ ID NO: 3374
  misc_feature (349)..(350): n is a, c, g, or t
  misc_feature (466)..(466): n is a, c, g, or t
  misc_feature (470)..(470): n is a, c, g, or t
  misc_feature (505)..(505): n is a, c, g, or t
  misc_feature (540)..(540): n is a, c, g, or t
  misc_feature (649)..(649): n is a, c, g, or t
  misc_feature (748)..(748): n is a, c, g, or t

SEQ ID NO: 65939 - DNA, 426 bp, Homo Sapiens; identical to SEQ ID NO: 3386

SEQ ID NO: 65940 - DNA, 602 bp, Homo Sapiens; identical to SEQ ID NO: 3387

SEQ ID NO: 65941 - DNA, 790 bp, Homo Sapiens; identical to SEQ ID NO: 3391
  misc_feature (318)..(327): n is a, c, g, or t

SEQ ID NO: 65942 - DNA, 385 bp, Homo Sapiens; identical to SEQ ID NO: 3398

SEQ ID NO: 65943 - DNA, 383 bp, Homo Sapiens; identical to SEQ ID NO: 3401

SEQ ID NO: 65944 - DNA, 1309 bp, Homo Sapiens; identical to SEQ ID NO: 3402

SEQ ID NO: 65945 - DNA, 469 bp, Homo Sapiens; identical to SEQ ID NO: 3412

SEQ ID NO: 65946 - DNA, 789 bp, Homo Sapiens; identical to SEQ ID NO: 3418

SEQ ID NO: 65947 - DNA, 611 bp, Homo Sapiens; identical to SEQ ID NO: 3426

SEQ ID NO: 65948 - DNA, 803 bp, Homo Sapiens; identical to SEQ ID NO: 3433
  misc_feature (614)..(634): n is a, c, g, or t

SEQ ID NO: 65949 - DNA, 290 bp, Homo Sapiens; identical to SEQ ID NO: 3435

SEQ ID NO: 65950 - DNA, 1107 bp, Homo Sapiens; identical to SEQ ID NO: 3456

SEQ ID NO: 65951 - DNA, 1133 bp, Homo Sapiens; identical to SEQ ID NO: 3464
  misc_feature (172)..(172): n is a, c, g, or t
  misc_feature (182)..(197): n is a, c, g, or t
  misc_feature (291)..(301): n is a, c, g, or t
  misc_feature (771)..(771): n is a, c, g, or t

SEQ ID NO: 65952 - DNA, 1238 bp, Homo Sapiens; identical to SEQ ID NO: 3478
  misc_feature (155)..(164): n is a, c, g, or t
  misc_feature (728)..(736): n is a, c, g, or t

SEQ ID NO: 65953 - DNA, 674 bp, Homo Sapiens; identical to SEQ ID NO: 3480
  misc_feature (53)..(54): n is a, c, g, or t
  misc_feature (59)..(59): n is a, c, g, or t
  misc_feature (62)..(71): n is a, c, g, or t
  misc_feature (73)..(74): n is a, c, g, or t
  misc_feature (76)..(86): n is a, c, g, or t
  misc_feature (89)..(91): n is a, c, g, or t
  misc_feature (93)..(143): n is a, c, g, or t
  misc_feature (145)..(152): n is a, c, g, or t
  misc_feature (311)..(323): n is a, c, g, or t

SEQ ID NO: 65954 - DNA, 511 bp, Homo Sapiens; identical to SEQ ID NO: 3482

SEQ ID NO: 65955 - DNA, 413 bp, Homo Sapiens; identical to SEQ ID NO: 3490

SEQ ID NO: 65956 - DNA, 718 bp, Homo Sapiens; identical to SEQ ID NO: 3491

SEQ ID NO: 65957 - DNA, 1205 bp, Homo Sapiens; identical to SEQ ID NO: 3492
  misc_feature (725)..(725): n is a, c, g, or t

SEQ ID NO: 65958 - DNA, 623 bp, Homo Sapiens; identical to SEQ ID NO: 3494

SEQ ID NO: 65959 - DNA, 608 bp, Homo Sapiens; identical to SEQ ID NO: 3496
  misc_feature (284)..(284): n is a, c, g, or t
  misc_feature (286)..(286): n is a, c, g, or t
  misc_feature (289)..(289): n is a, c, g, or t
  misc_feature (291)..(292): n is a, c, g, or t
  misc_feature (396)..(396): n is a, c, g, or t

SEQ ID NO: 65960 - DNA, 1341 bp, Homo Sapiens; identical to SEQ ID NO: 3497
  misc_feature (191)..(191): n is a, c, g, or t
  misc_feature (233)..(233): n is a, c, g, or t
  misc_feature (393)..(393): n is a, c, g, or t
  misc_feature (461)..(461): n is a, c, g, or t
  misc_feature (778)..(793): n is a, c, g, or t
  misc_feature (809)..(947): n is a, c, g, or t
  misc_feature (1012)..(1028): n is a, c, g, or t

SEQ ID NO: 65961 - DNA, 570 bp, Homo Sapiens; identical to SEQ ID NO: 3499

SEQ ID NO: 65962 - DNA, 346 bp, Homo Sapiens; identical to SEQ ID NO: 3508

SEQ ID NO: 65963 - DNA, 797 bp, Homo Sapiens; identical to SEQ ID NO: 3514
  misc_feature (86)..(86): n is a, c, g, or t

SEQ ID NO: 65964 - DNA, 807 bp, Homo Sapiens; identical to SEQ ID NO: 3516

SEQ ID NO: 65965 - DNA, 1372 bp, Homo Sapiens; identical to SEQ ID NO: 3521

SEQ ID NO: 65966 - DNA, 498 bp, Homo Sapiens; identical to SEQ ID NO: 3528

SEQ ID NO: 65967 - DNA, 286 bp, Homo Sapiens; identical to SEQ ID NO: 3532

SEQ ID NO: 65968 - DNA, 1446 bp, Homo Sapiens; identical to SEQ ID NO: 3541
  misc_feature (115)..(115): n is a, c, g, or t
  misc_feature (1386)..(1399): n is a, c, g, or t

SEQ ID NO: 65969 - DNA, 1442 bp, Homo Sapiens; identical to SEQ ID NO: 3542

SEQ ID NO: 65970 - DNA, 1200 bp, Homo Sapiens; identical to SEQ ID NO: 3544
  misc_feature (80)..(80): n is a, c, g, or t
  misc_feature (90)..(90): n is a, c, g, or t
  misc_feature (213)..(213): n is a, c, g, or t

SEQ ID NO: 65971 - DNA, 1177 bp, Homo Sapiens; identical to SEQ ID NO: 3545
  misc_feature (101)..(101): n is a, c, g, or t
  misc_feature (166)..(166): n is a, c, g, or t
  misc_feature (247)..(247): n is a, c, g, or t
  misc_feature (330)..(330): n is a, c, g, or t
  misc_feature (342)..(342): n is a, c, g, or t

SEQ ID NO: 65972 - DNA, 753 bp, Homo Sapiens; identical to SEQ ID NO: 3547

SEQ ID NO: 65973 - DNA, 701 bp, Homo Sapiens; identical to SEQ ID NO: 3549

SEQ ID NO: 65974 - DNA, 386 bp, Homo Sapiens; identical to SEQ ID NO: 3551

SEQ ID NO: 65975 - DNA, 1418 bp, Homo Sapiens; identical to SEQ ID NO: 3572
  misc_feature (126)..(126): n is a, c, g, or t
  misc_feature (256)..(256): n is a, c, g, or t
  misc_feature (368)..(368): n is a, c, g, or t
  misc_feature (372)..(372): n is a, c, g, or t
  misc_feature (385)..(385): n is a, c, g, or t
  misc_feature (614)..(670): n is a, c, g, or t

SEQ ID NO: 65976 - DNA, 468 bp, Homo Sapiens; identical to SEQ ID NO: 3575

SEQ ID NO: 65977 - DNA, 1543 bp, Homo Sapiens; identical to SEQ ID NO: 3576
  misc_feature (394)..(414): n is a, c, g, or t

SEQ ID NO: 65978 - DNA, 1407 bp, Homo Sapiens; identical to SEQ ID NO: 3588

SEQ ID NO: 65979 - DNA, 795 bp, Homo Sapiens; identical to SEQ ID NO: 3589
  misc_feature (45)..(45): n is a, c, g, or t

SEQ ID NO: 65980 - DNA, 1087 bp, Homo Sapiens; identical to SEQ ID NO: 3595
  misc_feature (162)..(189): n is a, c, g, or t
  misc_feature (579)..(602): n is a, c, g, or t

SEQ ID NO: 65981 - DNA, 1233 bp, Homo Sapiens; identical to SEQ ID NO: 3598

SEQ ID NO: 65982 - DNA, 449 bp, Homo Sapiens; identical to SEQ ID NO: 3603

SEQ ID NO: 65983 - DNA, 533 bp, Homo Sapiens; identical to SEQ ID NO: 3604
  misc_feature (426)..(426): n is a, c, g, or t

SEQ ID NO: 65984 - DNA, 494 bp, Homo Sapiens; identical to SEQ ID NO: 3615
  misc_feature (86)..(95): n is a, c, g, or t

SEQ ID NO: 65985 - DNA, 520 bp, Homo Sapiens; identical to SEQ ID NO: 3617

SEQ ID NO: 65986 - DNA, 623 bp, Homo Sapiens; identical to SEQ ID NO: 3628
  misc_feature (537)..(537): n is a, c, g, or t
  misc_feature (555)..(555): n is a, c, g, or t

SEQ ID NO: 65987 - DNA, 420 bp, Homo Sapiens; identical to SEQ ID NO: 3629
  misc_feature (152)..(152): n is a, c, g, or t

SEQ ID NO: 65988 - DNA, 873 bp, Homo Sapiens; identical to SEQ ID NO: 3632

SEQ ID NO: 65989 - DNA, 429 bp, Homo Sapiens; identical to SEQ ID NO: 3636

SEQ ID NO: 65990 - DNA, 529 bp, Homo Sapiens; identical to SEQ ID NO: 3642

SEQ ID NO: 65991 - DNA, 575 bp, Homo Sapiens; identical to SEQ ID NO: 3647
  misc_feature (530)..(530): n is a, c, g, or t
  misc_feature (543)..(543): n is a, c, g, or t

SEQ ID NO: 65992 - DNA, 817 bp, Homo Sapiens; identical to SEQ ID NO: 3661

SEQ ID NO: 65993 - DNA, 600 bp, Homo Sapiens; identical to SEQ ID NO: 3669
  misc_feature (290)..(304): n is a, c, g, or t

SEQ ID NO: 65994 - DNA, 709 bp, Homo Sapiens; identical to SEQ ID NO: 3670
  misc_feature (518)..(581): n is a, c, g, or t

SEQ ID NO: 65995 - DNA, 816 bp, Homo Sapiens; identical to SEQ ID NO: 3682

SEQ ID NO: 65996 - DNA, 646 bp, Homo Sapiens; identical to SEQ ID NO: 3685

SEQ ID NO: 65997 - DNA, 454 bp, Homo Sapiens; identical to SEQ ID NO: 3702

SEQ ID NO: 65998 - DNA, 460 bp, Homo Sapiens; identical to SEQ ID NO: 3705

SEQ ID NO: 65999 - DNA, 430 bp, Homo Sapiens; identical to SEQ ID NO: 3706

SEQ ID NO: 66000 - DNA, 464 bp, Homo Sapiens; identical to SEQ ID NO: 3738

SEQ ID NO: 66001 - DNA, 1483 bp, Homo Sapiens; identical to SEQ ID NO: 3741
  misc_feature (1082)..(1123): n is a, c, g, or t

SEQ ID NO: 66002 - DNA, 2012 bp, Homo Sapiens; identical to SEQ ID NO: 3742

SEQ ID NO: 66003 - DNA, 422 bp, Homo Sapiens; identical to SEQ ID NO: 3759

SEQ ID NO: 66004 - DNA, 744 bp, Homo Sapiens; identical to SEQ ID NO: 3760

SEQ ID NO: 66005 - DNA, 711 bp, Homo Sapiens; identical to SEQ ID NO: 3761

SEQ ID NO: 66006 - DNA, 601 bp, Homo Sapiens; identical to SEQ ID NO: 3765

SEQ ID NO: 66007 - DNA, 536 bp, Homo Sapiens; identical to SEQ ID NO: 3766

SEQ ID NO: 66008 - DNA, 276 bp, Homo Sapiens; identical to SEQ ID NO: 3773

SEQ ID NO: 66009 - DNA, 554 bp, Homo Sapiens; identical to SEQ ID NO: 3776

SEQ ID NO: 66010 - DNA, 474 bp, Homo Sapiens; identical to SEQ ID NO: 3777

SEQ ID NO: 66011 - DNA, 449 bp, Homo Sapiens; identical to SEQ ID NO: 3779

SEQ ID NO: 66012 - DNA, 474 bp, Homo Sapiens; identical to SEQ ID NO: 3781

SEQ ID NO: 66013 - DNA, 598 bp, Homo Sapiens; identical to SEQ ID NO: 3784

SEQ ID NO: 66014 - DNA, 302 bp, Homo Sapiens; identical to SEQ ID NO: 3785

SEQ ID NO: 66015 - DNA, 1134 bp, Homo Sapiens; identical to SEQ ID NO: 3810
  misc_feature (71)..(71): n is a, c, g, or t

SEQ ID NO: 66016 - DNA, 1007 bp, Homo Sapiens; identical to SEQ ID NO: 3811
  misc_feature (413)..(433): n is a, c, g, or t
  misc_feature (888)..(921): n is a, c, g, or t

SEQ ID NO: 66017 - DNA, 1381 bp, Homo Sapiens; identical to SEQ ID NO: 3813
  misc_feature (29)..(29): n is a, c, g, or t
  misc_feature (33)..(33): n is a, c, g, or t
  misc_feature (372)..(372): n is a, c, g, or t
  misc_feature (396)..(396): n is a, c, g, or t
  misc_feature (585)..(599): n is a, c, g, or t
  misc_feature (834)..(835): n is a, c, g, or t
  misc_feature (837)..(838): n is a, c, g, or t

SEQ ID NO: 66018 - DNA, 358 bp, Homo Sapiens; identical to SEQ ID NO: 3818

SEQ ID NO: 66019 - DNA, 1244 bp, Homo Sapiens; identical to SEQ ID NO: 3820

SEQ ID NO: 66020 - DNA, 392 bp, Homo Sapiens; identical to SEQ ID NO: 3822

SEQ ID NO: 66021 - DNA, 826 bp, Homo Sapiens; identical to SEQ ID NO: 3832

SEQ ID NO: 66022 - DNA, 595 bp, Homo Sapiens; identical to SEQ ID NO: 3844

SEQ ID NO: 66023 - DNA, 1085 bp, Homo Sapiens; identical to SEQ ID NO: 3846

SEQ ID NO: 66024 - DNA, 512 bp, Homo Sapiens; identical to SEQ ID NO: 3848

SEQ ID NO: 66025 - DNA, 733 bp, Homo Sapiens; identical to SEQ ID NO: 3850

SEQ ID NO: 66026 - DNA, 471 bp, Homo Sapiens; identical to SEQ ID NO: 3853

SEQ ID NO: 66027 - DNA, 591 bp, Homo Sapiens; identical to SEQ ID NO: 3867

SEQ ID NO: 66028 - DNA, 993 bp, Homo Sapiens; identical to SEQ ID NO: 3874

SEQ ID NO: 66029 - DNA, 326 bp, Homo Sapiens; identical to SEQ ID NO: 3877
  misc_feature (32)..(32): n is a, c, g, or t

SEQ ID NO: 66030 - DNA, 1144 bp, Homo Sapiens; identical to SEQ ID NO: 3881
  misc_feature (448)..(448): n is a, c, g, or t

SEQ ID NO: 66031 - DNA, 703 bp, Homo Sapiens; identical to SEQ ID NO: 3883

SEQ ID NO: 66032 - DNA, 977 bp, Homo Sapiens; identical to SEQ ID NO: 3887
  misc_feature (325)..(325): n is a, c, g, or t

SEQ ID NO: 66033 - DNA, 926 bp, Homo Sapiens; identical to SEQ ID NO: 3892
  misc_feature (312)..(353): n is a, c, g, or t
  misc_feature (367)..(385): n is a, c, g, or t

SEQ ID NO: 66034 - DNA, 433 bp, Homo Sapiens; identical to SEQ ID NO: 3895

SEQ ID NO: 66035 - DNA, 331 bp, Homo Sapiens; identical to SEQ ID NO: 3897

SEQ ID NO: 66036 - DNA, 397 bp, Homo Sapiens; identical to SEQ ID NO: 3898

SEQ ID NO: 66037 - DNA, 907 bp, Homo Sapiens; identical to SEQ ID NO: 3906

SEQ ID NO: 66038 - DNA, 1083 bp, Homo Sapiens; identical to SEQ ID NO: 3907

SEQ ID NO: 66039 - DNA, 604 bp, Homo Sapiens; identical to SEQ ID NO: 3931
  misc_feature (342)..(350): n is a, c, g, or t

SEQ ID NO: 66040 - DNA, 893 bp, Homo Sapiens; identical to SEQ ID NO: 3942

SEQ ID NO: 66041 - DNA, 997 bp, Homo Sapiens; identical to SEQ ID NO: 3945

SEQ ID NO: 66042 - DNA, 424 bp, Homo Sapiens; identical to SEQ ID NO: 3951

SEQ ID NO: 66043 - DNA, 556 bp, Homo Sapiens; identical to SEQ ID NO: 3960

SEQ ID NO: 66044 - DNA, 1598 bp, Homo Sapiens; identical to SEQ ID NO: 3975
  misc_feature (321)..(321): n is a, c, g, or t
  misc_feature (358)..(358): n is a, c, g, or t
  misc_feature (396)..(404): n is a, c, g, or t
  misc_feature (422)..(422): n is a, c, g, or t
  misc_feature (438)..(438): n is a, c, g, or t
  misc_feature (440)..(440): n is a, c, g, or t
  misc_feature (447)..(447): n is a, c, g, or t
  misc_feature (450)..(450): n is a, c, g, or t
  misc_feature (452)..(454): n is a, c, g, or t
  misc_feature (456)..(456): n is a, c, g, or t
  misc_feature (460)..(460): n is a, c, g, or t

SEQ ID NO: 66045 - DNA, 903 bp, Homo Sapiens; identical to SEQ ID NO: 3976
  misc_feature (45)..(45): n is a, c, g, or t
  misc_feature (159)..(159): n is a, c, g, or t
  misc_feature (224)..(224): n is a, c, g, or t
  misc_feature (246)..(246): n is a, c, g, or t
  misc_feature (252)..(252): n is a, c, g, or t

SEQ ID NO: 66046 - DNA, 920 bp, Homo Sapiens; identical to SEQ ID NO: 3995
  misc_feature (31)..(31): n is a, c, g, or t
  misc_feature (73)..(73): n is a, c, g, or t
  misc_feature (182)..(182): n is a, c, g, or t
  misc_feature (289)..(289): n is a, c, g, or t
  misc_feature (373)..(373): n is a, c, g, or t

SEQ ID NO: 66047 - DNA, 1059 bp, Homo Sapiens; identical to SEQ ID NO: 4000
  misc_feature (285)..(285): n is a, c, g, or t
  misc_feature (403)..(403): n is a, c, g, or t

SEQ ID NO: 66048 - DNA, 1331 bp, Homo Sapiens; identical to SEQ ID NO: 4001
  misc_feature (115)..(115): n is a, c, g, or t
  misc_feature (205)..(215): n is a, c, g, or t

SEQ ID NO: 66049 - DNA, 1086 bp, Homo Sapiens; identical to SEQ ID NO: 4005
  misc_feature (104)..(105): n is a, c, g, or t
  misc_feature (176)..(176): n is a, c, g, or t
  misc_feature (971)..(971): n is a, c, g, or t

SEQ ID NO: 66050 - DNA, 419 bp, Homo Sapiens; identical to SEQ ID NO: 4014

SEQ ID NO: 66051 - DNA, 732 bp, Homo Sapiens; identical to SEQ ID NO: 4016

SEQ ID NO: 66052 - DNA, 884 bp, Homo Sapiens; identical to SEQ ID NO: 4019

SEQ ID NO: 66053 - DNA, 630 bp, Homo Sapiens; identical to SEQ ID NO: 4020
  misc_feature (618)..(618): n is a, c, g, or t

SEQ ID NO: 66054 - DNA, 1155 bp, Homo Sapiens; identical to SEQ ID NO: 4021

SEQ ID NO: 66055 - DNA, 1235 bp, Homo Sapiens; identical to SEQ ID NO: 4028
  misc_feature (187)..(187): n is a, c, g, or t
  misc_feature (189)..(194): n is a, c, g, or t
  misc_feature (340)..(340): n is a, c, g, or t
  misc_feature (378)..(378): n is a, c, g, or t

SEQ ID NO: 66056 - DNA, 1048 bp, Homo Sapiens; identical to SEQ ID NO: 4030

SEQ ID NO: 66057 - DNA, 816 bp, Homo Sapiens; identical to SEQ ID NO: 4033

SEQ ID NO: 66058 - DNA, 451 bp, Homo Sapiens; identical to SEQ ID NO: 4034

SEQ ID NO: 66059 - DNA, 1157 bp, Homo Sapiens; identical to SEQ ID NO: 4037
  misc_feature (38)..(38): n is a, c, g, or t

SEQ ID NO: 66060 - DNA, 628 bp, Homo Sapiens; identical to SEQ ID NO: 4039

SEQ ID NO: 66061 - DNA, 959 bp, Homo Sapiens; identical to SEQ ID NO: 4046

SEQ ID NO: 66062 - DNA, 1148 bp, Homo Sapiens; identical to SEQ ID NO: 4053
  misc_feature (79)..(88): n is a, c, g, or t
  misc_feature (113)..(127): n is a, c, g, or t
  misc_feature (135)..(141): n is a, c, g, or t
  misc_feature (143)..(265): n is a, c, g, or t

SEQ ID NO: 66063 - DNA, 1193 bp, Homo Sapiens; identical to SEQ ID NO: 4062
  misc_feature (861)..(877): n is a, c, g, or t
  misc_feature (891)..(985): n is a, c, g, or t

SEQ ID NO: 66064 - DNA, 358 bp, Homo Sapiens; identical to SEQ ID NO: 4067

SEQ ID NO: 66065 - DNA, 1123 bp, Homo Sapiens; identical to SEQ ID NO: 4098
  misc_feature (51)..(51): n is a, c, g, or t
  misc_feature (381)..(437): n is a, c, g, or t
  misc_feature (772)..(772): n is a, c, g, or t
  misc_feature (776)..(779): n is a, c, g, or t

SEQ ID NO: 66066 - DNA, 753 bp, Homo Sapiens; identical to SEQ ID NO: 4104
  misc_feature (89)..(115): n is a, c, g, or t

SEQ ID NO: 66067 - DNA, 1608 bp, Homo Sapiens; identical to SEQ ID NO: 4106
  misc_feature (620)..(638): n is a, c, g, or t
  misc_feature (858)..(879): n is a, c, g, or t
  misc_feature (899)..(946): n is a, c, g, or t

SEQ ID NO: 66068 - DNA, 304 bp, Homo Sapiens; identical to SEQ ID NO: 4112

SEQ ID NO: 66069 - DNA, 1007 bp, Homo Sapiens; identical to SEQ ID NO: 4114
  misc_feature (784)..(839): n is a, c, g, or t

SEQ ID NO: 66070 - DNA, 310 bp, Homo Sapiens; identical to SEQ ID NO: 4127

SEQ ID NO: 66071 - DNA, 567 bp, Homo Sapiens; identical to SEQ ID NO: 4128

SEQ ID NO: 66072 - DNA, 1166 bp, Homo Sapiens; identical to SEQ ID NO: 4130
  misc_feature (72)..(72): n is a, c, g, or t
  misc_feature (283)..(292): n is a, c, g, or t

SEQ ID NO: 66073 - DNA, 825 bp, Homo Sapiens; identical to SEQ ID NO: 4131
  misc_feature (157)..(176): n is a, c, g, or t
  misc_feature (281)..(318): n is a, c, g, or t

SEQ ID NO: 66074 - DNA, 672 bp, Homo Sapiens; identical to SEQ ID NO: 4143

SEQ ID NO: 66075 - DNA, 266 bp, Homo Sapiens; identical to SEQ ID NO: 4158

SEQ ID NO: 66076 - DNA, 1098 bp, Homo Sapiens; identical to SEQ ID NO: 4175

SEQ ID NO: 66077 - DNA, 973 bp, Homo Sapiens; identical to SEQ ID NO: 4197
  misc_feature (438)..(469): n is a, c, g, or t
  misc_feature (509)..(527): n is a, c, g, or t
  misc_feature (557)..(557): n is a, c, g, or t

SEQ ID NO: 66078 - DNA, 320 bp, Homo Sapiens; identical to SEQ ID NO: 4221

SEQ ID NO: 66079 - DNA, 371 bp, Homo Sapiens; identical to SEQ ID NO: 4225

SEQ ID NO: 66080 - DNA, 1280 bp, Homo Sapiens; identical to SEQ ID NO: 4232

SEQ ID NO: 66081 - DNA, 1081 bp, Homo Sapiens; identical to SEQ ID NO: 4234
  misc_feature (62)..(76): n is a, c, g, or t

SEQ ID NO: 66082 - DNA, 530 bp, Homo Sapiens; identical to SEQ ID NO: 4235

SEQ ID NO: 66083 - DNA, 494 bp, Homo Sapiens; identical to SEQ ID NO: 4246

SEQ ID NO: 66084 - DNA, 555 bp, Homo Sapiens; identical to SEQ ID NO: 4247
  misc_feature (455)..(455): n is a, c, g, or t

SEQ ID NO: 66085 - DNA, 291 bp, Homo Sapiens; identical to SEQ ID NO: 4249

SEQ ID NO: 66086 - DNA, 749 bp, Homo Sapiens; identical to SEQ ID NO: 4253

SEQ ID NO: 66087 - DNA, 591 bp, Homo Sapiens; identical to SEQ ID NO: 4254
  misc_feature (36)..(36): n is a, c, g, or t

SEQ ID NO: 66088 - DNA, 1248 bp, Homo Sapiens; identical to SEQ ID NO: 4258
  misc_feature (21)..(21): n is a, c, g, or t
  misc_feature (32)..(32): n is a, c, g, or t
  misc_feature (69)..(69): n is a, c, g, or t
  misc_feature (84)..(84): n is a, c, g, or t
  misc_feature (90)..(90): n is a, c, g, or t

SEQ ID NO: 66089 - DNA, 285 bp, Homo Sapiens; identical to SEQ ID NO: 4260

SEQ ID NO: 66090 - DNA, 328 bp, Homo Sapiens; identical to SEQ ID NO: 4262

SEQ ID NO: 66091 - DNA, 420 bp, Homo Sapiens; identical to SEQ ID NO: 4263

SEQ ID NO: 66092 - DNA, 875 bp, Homo Sapiens; identical to SEQ ID NO: 4265

SEQ ID NO: 66093 - DNA, 471 bp, Homo Sapiens; identical to SEQ ID NO: 4283

SEQ ID NO: 66094 - DNA, 605 bp, Homo Sapiens; identical to SEQ ID NO: 4289

SEQ ID NO: 66095 - DNA, 556 bp, Homo Sapiens; identical to SEQ ID NO: 4294

SEQ ID NO: 66096 - DNA, 986 bp, Homo Sapiens; identical to SEQ ID NO: 4299
  misc_feature (691)..(691): n is a, c, g, or t

SEQ ID NO: 66097 - DNA, 329 bp, Homo Sapiens; identical to SEQ ID NO: 4308

SEQ ID NO: 66098 - DNA, 454 bp, Homo Sapiens; identical to SEQ ID NO: 4310

SEQ ID NO: 66099 - DNA, 309 bp, Homo Sapiens; identical to SEQ ID NO: 4313

SEQ ID NO: 66100 - DNA, 967 bp, Homo Sapiens; identical to SEQ ID NO: 4315

SEQ ID NO: 66101 - DNA, 560 bp, Homo Sapiens; identical to SEQ ID NO: 4320
  misc_feature (503)..(516): n is a, c, g, or t

SEQ ID NO: 66102 - DNA, 257 bp, Homo Sapiens; identical to SEQ ID NO: 4322

SEQ ID NO: 66103 - DNA, 538 bp, Homo Sapiens; identical to SEQ ID NO: 4335
  misc_feature (419)..(419): n is a, c, g, or t

SEQ ID NO: 66104 - DNA, 597 bp, Homo Sapiens; identical to SEQ ID NO: 4345

SEQ ID NO: 66105 - DNA, 1240 bp, Homo Sapiens; identical to SEQ ID NO: 4350

SEQ ID NO: 66106 - DNA, 267 bp, Homo Sapiens; identical to SEQ ID NO: 4356

SEQ ID NO: 66107 - DNA, 533 bp, Homo Sapiens; identical to SEQ ID NO: 4360

SEQ ID NO: 66108 - DNA, 471 bp, Homo Sapiens; identical to SEQ ID NO: 4362

SEQ ID NO: 66109 - DNA, 423 bp, Homo Sapiens; identical to SEQ ID NO: 4363

SEQ ID NO: 66110 - DNA, 605 bp, Homo Sapiens; identical to SEQ ID NO: 4370

SEQ ID NO: 66111 - DNA, 339 bp, Homo Sapiens; identical to SEQ ID NO: 4371

SEQ ID NO: 66112 - DNA, 527 bp, Homo Sapiens; identical to SEQ ID NO: 4372
  misc_feature (93)..(106): n is a, c, g, or t

SEQ ID NO: 66113 - DNA, 310 bp, Homo Sapiens; identical to SEQ ID NO: 4373

SEQ ID NO: 66114 - DNA, 2347 bp, Homo Sapiens; identical to SEQ ID NO: 4375
  misc_feature (418)..(449): n is a, c, g, or t

SEQ ID NO: 66115 - DNA, 607 bp, Homo Sapiens; identical to SEQ ID NO: 4400

SEQ ID NO: 66116 - DNA, 592 bp, Homo Sapiens; identical to SEQ ID NO: 4436

SEQ ID NO: 66117 - DNA, 355 bp, Homo Sapiens; identical to SEQ ID NO: 4445

SEQ ID NO: 66118 - DNA, 641 bp, Homo Sapiens; identical to SEQ ID NO: 4452

SEQ ID NO: 66119 - DNA, 687 bp, Homo Sapiens; identical to SEQ ID NO: 4464
  misc_feature (60)..(73): n is a, c, g, or t
  misc_feature (84)..(84): n is a, c, g, or t

SEQ ID NO: 66120 - DNA, 770 bp, Homo Sapiens; identical to SEQ ID NO: 4498
  misc_feature (116)..(124): n is a, c, g, or t

SEQ ID NO: 66121 - DNA, 381 bp, Homo Sapiens; identical to SEQ ID NO: 4500

SEQ ID NO: 66122 - DNA, 443 bp, Homo Sapiens; identical to SEQ ID NO: 4512
  misc_feature (390)..(390): n is a, c, g, or t
  misc_feature (402)..(402): n is a, c, g, or t

SEQ ID NO: 66123 - DNA, 1259 bp, Homo Sapiens; identical to SEQ ID NO: 4525
  misc_feature (218)..(218): n is a, c, g, or t
  misc_feature (832)..(866): n is a, c, g, or t
  misc_feature (1088)..(1088): n is a, c, g, or t

SEQ ID NO: 66124 - DNA, 769 bp, Homo Sapiens; identical to SEQ ID NO: 4529

SEQ ID NO: 66125 - DNA, 794 bp, Homo Sapiens; identical to SEQ ID NO: 4539
  misc_feature (50)..(51): n is a, c, g, or t
  misc_feature (87)..(88): n is a, c, g, or t
  misc_feature (102)..(108): n is a, c, g, or t
  misc_feature (110)..(122): n is a, c, g, or t

SEQ ID NO: 66126 - DNA, 530 bp, Homo Sapiens; identical to SEQ ID NO: 4542
  misc_feature (468)..(468): n is a, c, g, or t

SEQ ID NO: 66127 - DNA, 675 bp, Homo Sapiens; identical to SEQ ID NO: 4544
  misc_feature (66)..(101): n is a, c, g, or t
  misc_feature (115)..(270): n is a, c, g, or t

SEQ ID NO: 66128 - DNA, 1196 bp, Homo Sapiens; identical to SEQ ID NO: 4545

SEQ ID NO: 66129 - DNA, 298 bp, Homo Sapiens; identical to SEQ ID NO: 4551

SEQ ID NO: 66130 - DNA, 321 bp, Homo Sapiens; identical to SEQ ID NO: 4552

SEQ ID NO: 66131 - DNA, 1761 bp, Homo Sapiens; identical to SEQ ID NO: 4558

SEQ ID NO: 66132 - DNA, 1671 bp, Homo Sapiens; identical to SEQ ID NO: 4562
  misc_feature (151)..(151): n is a, c, g, or t
  misc_feature (880)..(880): n is a, c, g, or t

SEQ ID NO: 66133 - DNA, 348 bp, Homo Sapiens; identical to SEQ ID NO: 4574

SEQ ID NO: 66134 - DNA, 803 bp, Homo Sapiens; identical to SEQ ID NO: 4590

SEQ ID NO: 66135 - DNA, 776 bp, Homo Sapiens; identical to SEQ ID NO: 4603

SEQ ID NO: 66136 - DNA, 765 bp, Homo Sapiens; identical to SEQ ID NO: 4617
  misc_feature (37)..(37): n is a, c, g, or t
  misc_feature (67)..(67): n is a, c, g, or t
  misc_feature (150)..(159): n is a, c, g, or t
  misc_feature (161)..(177): n is a, c, g, or t
  misc_feature (505)..(514): n is a, c, g, or t

SEQ ID NO: 66137 - DNA, 1181 bp, Homo Sapiens; identical to SEQ ID NO: 4627

SEQ ID NO: 66138 - DNA, 542 bp, Homo Sapiens; identical to SEQ ID NO: 4632
  misc_feature (128)..(138): n is a, c, g, or t

SEQ ID NO: 66139 - DNA, 453 bp, Homo Sapiens; identical to SEQ ID NO: 4636

SEQ ID NO: 66140 - DNA, 853 bp, Homo Sapiens; identical to SEQ ID NO: 4652
  misc_feature (102)..(102): n is a, c, g, or t

SEQ ID NO: 66141 - DNA, 909 bp, Homo Sapiens; identical to SEQ ID NO: 4662

SEQ ID NO: 66142 - DNA, 442 bp, Homo Sapiens; identical to SEQ ID NO: 4664

SEQ ID NO: 66143 - DNA, 446 bp, Homo Sapiens; identical to SEQ ID NO: 4668

SEQ ID NO: 66144 - DNA, 690 bp, Homo Sapiens; identical to SEQ ID NO: 4673
  misc_feature (660)..(660): n is a, c, g, or t

SEQ ID NO: 66145 - DNA, 260 bp, Homo Sapiens; identical to SEQ ID NO: 4678

SEQ ID NO: 66146 - DNA, 425 bp, Homo Sapiens; identical to SEQ ID NO: 4679

SEQ ID NO: 66147 - DNA, 701 bp, Homo Sapiens; identical to SEQ ID NO: 4688

SEQ ID NO: 66148 - DNA, 740 bp, Homo Sapiens; identical to SEQ ID NO: 4690
  misc_feature (150)..(171): n is a, c, g, or t

SEQ ID NO: 66149 - DNA, 426 bp, Homo Sapiens; identical to SEQ ID NO: 4692

SEQ ID NO: 66150 - DNA, 558 bp, Homo Sapiens; identical to SEQ ID NO: 4696

SEQ ID NO: 66151 - DNA, 543 bp, Homo Sapiens; identical to SEQ ID NO: 4703

SEQ ID NO: 66152 - DNA, 698 bp, Homo Sapiens; identical to SEQ ID NO: 4704

SEQ ID NO: 66153 - DNA, 520 bp, Homo Sapiens; identical to SEQ ID NO: 4705

SEQ ID NO: 66154 - DNA, 577 bp, Homo Sapiens; identical to SEQ ID NO: 4731

SEQ ID NO: 66155 - DNA, 312 bp, Homo Sapiens; identical to SEQ ID NO: 4736

SEQ ID NO: 66156 - DNA, 1111 bp, Homo Sapiens; identical to SEQ ID NO: 4737

SEQ ID NO: 66157 - DNA, 730 bp, Homo Sapiens; identical to SEQ ID NO: 4738

SEQ ID NO: 66158 - DNA, 583 bp, Homo Sapiens; identical to SEQ ID NO: 4741
  misc_feature (551)..(551): n is a, c, g, or t

SEQ ID NO: 66159 - DNA, 1225 bp, Homo Sapiens; identical to SEQ ID NO: 4742
  misc_feature (678)..(678): n is a, c, g, or t

SEQ ID NO: 66160 - DNA, 592 bp, Homo Sapiens; identical to SEQ ID NO: 4743

SEQ ID NO: 66161 - DNA, 599 bp, Homo Sapiens; identical to SEQ ID NO: 4753

SEQ ID NO: 66162 - DNA, 437 bp, Homo Sapiens; identical to SEQ ID NO: 4755

SEQ ID NO: 66163 - DNA, 496 bp, Homo Sapiens; identical to SEQ ID NO: 4760

SEQ ID NO: 66164 - DNA, 564 bp, Homo Sapiens; identical to SEQ ID NO: 4794
  misc_feature (43)..(43): n is a, c, g, or t

SEQ ID NO: 66165 - DNA, 588 bp, Homo Sapiens; identical to SEQ ID NO: 4818

SEQ ID NO: 66166 - DNA, 554 bp, Homo Sapiens; identical to SEQ ID NO: 4819

SEQ ID NO: 66167 - DNA, 290 bp, Homo Sapiens; identical to SEQ ID NO: 4838

SEQ ID NO: 66168 - DNA, 789 bp, Homo Sapiens; identical to SEQ ID NO: 4845
  misc_feature (672)..(672): n is a, c, g, or t

SEQ ID NO: 66169 - DNA, 427 bp, Homo Sapiens; identical to SEQ ID NO: 4850

SEQ ID NO: 66170 - DNA, 566 bp, Homo Sapiens; identical to SEQ ID NO: 4851

SEQ ID NO: 66171 - DNA, 474 bp, Homo Sapiens; identical to SEQ ID NO: 4870

SEQ ID NO: 66172 - DNA, 1158 bp, Homo Sapiens; identical to SEQ ID NO: 4878
  misc_feature (271)..(271): n is a, c, g, or t
  misc_feature (273)..(274): n is a, c, g, or t
  misc_feature (507)..(593): n is a, c, g, or t

SEQ ID NO: 66173 - DNA, 670 bp, Homo Sapiens; identical to SEQ ID NO: 4927

SEQ ID NO: 66174 - DNA, 895 bp, Homo Sapiens; identical to SEQ ID NO: 4930

SEQ ID NO: 66175 - DNA, 690 bp, Homo Sapiens; identical to SEQ ID NO: 4943

SEQ ID NO: 66176 - DNA, 665 bp, Homo Sapiens; identical to SEQ ID NO: 4944

SEQ ID NO: 66177 - DNA, 544 bp, Homo Sapiens; identical to SEQ ID NO: 4946

SEQ ID NO: 66178 - DNA, 967 bp, Homo Sapiens; identical to SEQ ID NO: 4955

SEQ ID NO: 66179 - DNA, 412 bp, Homo Sapiens; identical to SEQ ID NO: 4973
  misc_feature (117)..(117): n is a, c, g, or t

SEQ ID NO: 66180 - DNA, 366 bp, Homo Sapiens; identical to SEQ ID NO: 4985

SEQ ID NO: 66181 - DNA, 688 bp, Homo Sapiens; identical to SEQ ID NO: 4989
  misc_feature (197)..(220): n is a, c, g, or t

SEQ ID NO: 66182 - DNA, 974 bp, Homo Sapiens; identical to SEQ ID NO: 4995
  misc_feature (137)..(140): n is a, c, g, or t
  misc_feature (145)..(164): n is a, c, g, or t

SEQ ID NO: 66183 - DNA, 490 bp, Homo Sapiens; identical to SEQ ID NO: 4999

SEQ ID NO: 66184 - DNA, 474 bp, Homo Sapiens; identical to SEQ ID NO: 5007
  misc_feature (349)..(349): n is a, c, g, or t

SEQ ID NO: 66185 - DNA, 1252 bp, Homo Sapiens; identical to SEQ ID NO: 5009
  misc_feature (738)..(809): n is a, c, g, or t

SEQ ID NO: 66186 - DNA, 466 bp, Homo Sapiens; identical to SEQ ID NO: 5017

SEQ ID NO: 66187 - DNA, 807 bp, Homo Sapiens; identical to SEQ ID NO: 5021
  misc_feature (105)..(105): n is a, c, g, or t

SEQ ID NO: 66188 - DNA, 608 bp, Homo Sapiens; identical to SEQ ID NO: 5026
  misc_feature (555)..(555): n is a, c, g, or t

SEQ ID NO: 66189 - DNA, 414 bp, Homo Sapiens; identical to SEQ ID NO: 5031

SEQ ID NO: 66190 - DNA, 503 bp, Homo Sapiens; identical to SEQ ID NO: 5035

SEQ ID NO: 66191 - DNA, 529 bp, Homo Sapiens; identical to SEQ ID NO: 5053

SEQ ID NO: 66192 - DNA, 1076 bp, Homo Sapiens; identical to SEQ ID NO: 5071
  misc_feature (190)..(202): n is a, c, g, or t
  misc_feature (374)..(384): n is a, c, g, or t
  misc_feature (524)..(598): n is a, c, g, or t
  misc_feature (613)..(615): n is a, c, g, or t
  misc_feature (625)..(625): n is a, c, g, or t
  misc_feature (632)..(632): n is a, c, g, or t
  misc_feature (643)..(748): n is a, c, g, or t
  misc_feature (750)..(752): n is a, c, g, or t

SEQ ID NO: 66193 - DNA, 677 bp, Homo Sapiens; identical to SEQ ID NO: 5073

SEQ ID NO: 66194 - DNA, 1608 bp, Homo Sapiens; identical to SEQ ID NO: 5082
  misc_feature (68)..(68): n is a, c, g, or t
  misc_feature (147)..(147): n is a, c, g, or t
  misc_feature (162)..(162): n is a, c, g, or t
  misc_feature (186)..(199): n is a, c, g, or t
  misc_feature (476)..(476): n is a, c, g, or t
  misc_feature (702)..(758): n is a, c, g, or t
  misc_feature (943)..(974): n is a, c, g, or t

SEQ ID NO: 66195 - DNA, 276 bp, Homo Sapiens; identical to SEQ ID NO: 5086

SEQ ID NO: 66196 - DNA, 827 bp, Homo Sapiens; identical to SEQ ID NO: 5095

SEQ ID NO: 66197 - DNA, 573 bp, Homo Sapiens; identical to SEQ ID NO: 5096

SEQ ID NO: 66198 - DNA, 431 bp, Homo Sapiens; identical to SEQ ID NO: 5097

SEQ ID NO: 66199 - DNA, 669 bp, Homo Sapiens; identical to SEQ ID NO: 5102

SEQ ID NO: 66200 - DNA, 999 bp, Homo Sapiens; identical to SEQ ID NO: 5103

SEQ ID NO: 66201 - DNA, 497 bp, Homo Sapiens; identical to SEQ ID NO: 5122

SEQ ID NO: 66202 - DNA, 392 bp, Homo Sapiens; identical to SEQ ID NO: 5125

SEQ ID NO: 66203 - DNA, 598 bp, Homo Sapiens; identical to SEQ ID NO: 5132

SEQ ID NO: 66204 - DNA, 418 bp, Homo Sapiens; identical to SEQ ID NO: 5133

SEQ ID NO: 66205 - DNA, 574 bp, Homo Sapiens; identical to SEQ ID NO: 5139
  misc_feature (24)..(24): n is a, c, g, or t
  misc_feature (65)..(65): n is a, c, g, or t
  misc_feature (110)..(110): n is a, c, g, or t

SEQ ID NO: 66206 - DNA, 739 bp, Homo Sapiens; identical to SEQ ID NO: 5142

SEQ ID NO: 66207 - DNA, 818 bp, Homo Sapiens; identical to SEQ ID NO: 5143

SEQ ID NO: 66208 - DNA, 933 bp, Homo Sapiens; identical to SEQ ID NO: 5149

SEQ ID NO: 66209 - DNA, 531 bp, Homo Sapiens; identical to SEQ ID NO: 5150

SEQ ID NO: 66210 - DNA, 490 bp, Homo Sapiens; identical to SEQ ID NO: 5163

SEQ ID NO: 66211 - DNA, 451 bp, Homo Sapiens; identical to SEQ ID NO: 5164

SEQ ID NO: 66212 - DNA, 995 bp, Homo Sapiens; identical to SEQ ID NO: 5166

SEQ ID NO: 66213 - DNA, 280 bp, Homo Sapiens; identical to SEQ ID NO: 5169

SEQ ID NO: 66214 - DNA, 997 bp, Homo Sapiens; identical to SEQ ID NO: 5170

SEQ ID NO: 66215 - DNA, 403 bp, Homo Sapiens; identical to SEQ ID NO: 5185

SEQ ID NO: 66216 - DNA, 548 bp, Homo Sapiens; identical to SEQ ID NO: 5202

SEQ ID NO: 66217 - DNA, 311 bp, Homo Sapiens; identical to SEQ ID NO: 5212

SEQ ID NO: 66218 - DNA, 1550 bp, Homo Sapiens; identical to SEQ ID NO: 5241
  misc_feature (1428)..(1428): n is a, c, g, or t
  misc_feature (1461)..(1461): n is a, c, g, or t
  misc_feature (1465)..(1465): n is a, c, g, or t

SEQ ID NO: 66219 - DNA, 720 bp, Homo Sapiens; identical to SEQ ID NO: 5242
  misc_feature (145)..(153): n is a, c, g, or t

SEQ ID NO: 66220 - DNA, 3028 bp, Homo Sapiens; identical to SEQ ID NO: 5245
  misc_feature (27)..(27): n is a, c, g, or t
  misc_feature (55)..(55): n is a, c, g, or t
  misc_feature (171)..(171): n is a, c, g, or t
  misc_feature (278)..(278): n is a, c, g, or t
  misc_feature (326)..(326): n is a, c, g, or t
  misc_feature (420)..(420): n is a, c, g, or t
  misc_feature (518)..(518): n is a, c, g, or t
  misc_feature (523)..(523): n is a, c, g, or t

SEQ ID NO: 66221 - DNA, 632 bp, Homo Sapiens; identical to SEQ ID NO: 5263

SEQ ID NO: 66222 - DNA, 415 bp, Homo Sapiens; identical to SEQ ID NO: 5268

SEQ ID NO: 66223 - DNA, 503 bp, Homo Sapiens; identical to SEQ ID NO: 5269

SEQ ID NO: 66224 - DNA, 254 bp, Homo Sapiens; identical to SEQ ID NO: 5270

SEQ ID NO: 66225 - DNA, 444 bp, Homo Sapiens; identical to SEQ ID NO: 5308

SEQ ID NO: 66226 - DNA, 759 bp, Homo Sapiens; identical to SEQ ID NO: 5309

SEQ ID NO: 66227 - DNA, 887 bp, Homo Sapiens; identical to SEQ ID NO: 5331

SEQ ID NO: 66228 - DNA, 338 bp, Homo Sapiens; identical to SEQ ID NO: 5334

SEQ ID NO: 66229 - DNA, 977 bp, Homo Sapiens; identical to SEQ ID NO: 5336

SEQ ID NO: 66230 - DNA, 532 bp, Homo Sapiens; identical to SEQ ID NO: 5338

SEQ ID NO: 66231 - DNA, 565 bp, Homo Sapiens; identical to SEQ ID NO: 5339

SEQ ID NO: 66232 - DNA, 872 bp, Homo Sapiens; identical to SEQ ID NO: 5344

SEQ ID NO: 66233 - DNA, 646 bp, Homo Sapiens; identical to SEQ ID NO: 5350

SEQ ID NO: 66234 - DNA, 574 bp, Homo Sapiens; identical to SEQ ID NO: 5356

SEQ ID NO: 66235 - DNA, 639 bp, Homo Sapiens; identical to SEQ ID NO: 5357

SEQ ID NO: 66236 - DNA, 1186 bp, Homo Sapiens; identical to SEQ ID NO: 5361
  misc_feature (21)..(21): n is a, c, g, or t

SEQ ID NO: 66237 - DNA, 1084 bp, Homo Sapiens; identical to SEQ ID NO: 5362
  misc_feature (1040)..(1040): n is a, c, g, or t

SEQ ID NO: 66238 - DNA, 1163 bp, Homo Sapiens; identical to SEQ ID NO: 5363
  misc_feature (498)..(534): n is a, c, g, or t
  misc_feature (697)..(715): n is a, c, g, or t
  misc_feature (757)..(817): n is a, c, g, or t

SEQ ID NO: 66239 - DNA, 1243 bp, Homo Sapiens; identical to SEQ ID NO: 5367
  misc_feature (164)..(172): n is a, c, g, or t

SEQ ID NO: 66240 - DNA, 391 bp, Homo Sapiens; identical to SEQ ID NO: 5368

SEQ ID NO: 66241 - DNA, 621 bp, Homo Sapiens; identical to SEQ ID NO: 5372

SEQ ID NO: 66242 - DNA, 976 bp, Homo Sapiens; identical to SEQ ID NO: 5378

SEQ ID NO: 66243 - DNA, 552 bp, Homo Sapiens; identical to SEQ ID NO: 5393
  misc_feature (504)..(505): n is a, c, g, or t
  misc_feature (522)..(523): n is a, c, g, or t
  misc_feature (539)..(539): n is a, c, g, or t

SEQ ID NO: 66244 - DNA, 871 bp, Homo Sapiens; identical to SEQ ID NO: 5396

SEQ ID NO: 66245 - DNA, 1500 bp, Homo Sapiens; identical to SEQ ID NO: 5397

SEQ ID NO: 66246 - DNA, 500 bp, Homo Sapiens; identical to SEQ ID NO: 5402

SEQ ID NO: 66247 - DNA, 1451 bp, Homo Sapiens; identical to SEQ ID NO: 5404
  misc_feature (113)..(122): n is a, c, g, or t
  misc_feature (148)..(208): n is a, c, g, or t
  misc_feature (223)..(304): n is a, c, g, or t
  misc_feature (308)..(317): n is a, c, g, or t
  misc_feature (343)..(356): n is a, c, g, or t
  misc_feature (363)..(486): n is a, c, g, or t
  misc_feature (1178)..(1293): n is a, c, g, or t
  misc_feature (1387)..(1400): n is a, c, g, or t

SEQ ID NO: 66248 - DNA, 829 bp, Homo Sapiens; identical to SEQ ID NO: 5412

SEQ ID NO: 66249 - DNA, 592 bp, Homo Sapiens; identical to SEQ ID NO: 5414

SEQ ID NO: 66250 - DNA, 382 bp, Homo Sapiens; identical to SEQ ID NO: 5416

SEQ ID NO: 66251 - DNA, 790 bp, Homo Sapiens; identical to SEQ ID NO: 5421

SEQ ID NO: 66252 - DNA, 1182 bp, Homo Sapiens; identical to SEQ ID NO: 5430
  misc_feature (958)..(958): n is a, c, g, or t

SEQ ID NO: 66253 - DNA, 429 bp, Homo Sapiens; identical to SEQ ID NO: 5435

SEQ ID NO: 66254 - DNA, 797 bp, Homo Sapiens; identical to SEQ ID NO: 5445

SEQ ID NO: 66255 - DNA, 766 bp, Homo Sapiens; identical to SEQ ID NO: 5446

SEQ ID NO: 66256 - DNA, 524 bp, Homo Sapiens; identical to SEQ ID NO: 5448

SEQ ID NO: 66257 - DNA, 845 bp, Homo Sapiens; identical to SEQ ID NO: 5468
  misc_feature (78)..(78): n is a, c, g, or t
  misc_feature (80)..(133): n is a, c, g, or t

SEQ ID NO: 66258 - DNA, 960 bp, Homo Sapiens; identical to SEQ ID NO: 5471

SEQ ID NO: 66259 - DNA, 841 bp, Homo Sapiens; identical to SEQ ID NO: 5472

SEQ ID NO: 66260 - DNA, 625 bp, Homo Sapiens; identical to SEQ ID NO: 5473

SEQ ID NO: 66261 - DNA, 1132 bp, Homo Sapiens; identical to SEQ ID NO: 5475

SEQ ID NO: 66262 - DNA, 765 bp, Homo Sapiens; identical to SEQ ID NO: 5481
  misc_feature (123)..(123): n is a, c, g, or t
  misc_feature (594)..(617): n is a, c, g, or t

SEQ ID NO: 66263 - DNA, 839 bp, Homo Sapiens; identical to SEQ ID NO: 5482
  misc_feature (771)..(784): n is a, c, g, or t

SEQ ID NO: 66264 - DNA, 1092 bp, Homo Sapiens; identical to SEQ ID NO: 5484
  misc_feature (43)..(43): n is a, c, g, or t
  misc_feature (817)..(830): n is a, c, g, or t
  misc_feature (840)..(840): n is a, c, g, or t
  misc_feature (979)..(979): n is a, c, g, or t
  misc_feature (1004)..(1004): n is a, c, g, or t

SEQ ID NO: 66265 - DNA, 613 bp, Homo Sapiens; identical to SEQ ID NO: 5485

SEQ ID NO: 66266 - DNA, 864 bp, Homo Sapiens; identical to SEQ ID NO: 5489

SEQ ID NO: 66267 - DNA, 529 bp, Homo Sapiens; identical to SEQ ID NO: 5490

SEQ ID NO: 66268 - DNA, 1440 bp, Homo Sapiens; identical to SEQ ID NO: 5499
  misc_feature (143)..(151): n is a, c, g, or t
  misc_feature (634)..(634): n is a, c, g, or t
  misc_feature (662)..(662): n is a, c, g, or t
  misc_feature (843)..(854): n is a, c, g, or t

SEQ ID NO: 66269 - DNA, 625 bp, Homo Sapiens; identical to SEQ ID NO: 5503

SEQ ID NO: 66270 - DNA, 730 bp, Homo Sapiens; identical to SEQ ID NO: 5508

SEQ ID NO: 66271 - DNA, 533 bp, Homo Sapiens; identical to SEQ ID NO: 5509

SEQ ID NO: 66272 - DNA, 755 bp, Homo Sapiens; identical to SEQ ID NO: 5518
  misc_feature (44)..(44): n is a, c, g, or t

SEQ ID NO: 66273 - DNA, 822 bp, Homo Sapiens; identical to SEQ ID NO: 5530

SEQ ID NO: 66274 - DNA, 616 bp, Homo Sapiens; identical to SEQ ID NO: 5531

SEQ ID NO: 66275 - DNA, 717 bp, Homo Sapiens; identical to SEQ ID NO: 5532

SEQ ID NO: 66276 - DNA, 614 bp, Homo Sapiens; identical to SEQ ID NO: 5540
  misc_feature (367)..(407): n is a, c, g, or t

SEQ ID NO: 66277 - DNA, 444 bp, Homo Sapiens; identical to SEQ ID NO: 5550
  misc_feature (321)..(377): n is a, c, g, or t

SEQ ID NO: 66278 - DNA, 1398 bp, Homo Sapiens; identical to SEQ ID NO: 5556
  misc_feature (113)..(124): n is a, c, g, or t
  misc_feature (1118)..(1270): n is a, c, g, or t

SEQ ID NO: 66279 - DNA, 537 bp, Homo Sapiens; identical to SEQ ID NO: 5564

SEQ ID NO: 66280 - DNA, 805 bp, Homo Sapiens; identical to SEQ ID NO: 5598

SEQ ID NO: 66281 - DNA, 526 bp, Homo Sapiens; identical to SEQ ID NO: 5600

SEQ ID NO: 66282 - DNA, 1185 bp, Homo Sapiens; identical to SEQ ID NO: 5613
  misc_feature (145)..(145): n is a, c, g, or t
  misc_feature (147)..(155): n is a, c, g, or t
  misc_feature (157)..(165): n is a, c, g, or t
  misc_feature (167)..(167): n is a, c, g, or t
  misc_feature (169)..(176): n is a, c, g, or t
  misc_feature (267)..(336): n is a, c, g, or t
  misc_feature (375)..(401): n is a, c, g, or t

SEQ ID NO: 66283 - DNA, 580 bp, Homo Sapiens; identical to SEQ ID NO: 5629

SEQ ID NO: 66284 - DNA, 616 bp, Homo Sapiens; identical to SEQ ID NO: 5630

SEQ ID NO: 66285 - DNA, 480 bp, Homo Sapiens; identical to SEQ ID NO: 5633

SEQ ID NO: 66286 - DNA, 420 bp, Homo Sapiens; identical to SEQ ID NO: 5647

SEQ ID NO: 66287 - DNA, 636 bp, Homo Sapiens; identical to SEQ ID NO: 5648

SEQ ID NO: 66288 - DNA, 717 bp, Homo Sapiens; identical to SEQ ID NO: 5651

SEQ ID NO: 66289 - DNA, 644 bp, Homo Sapiens; identical to SEQ ID NO: 5658

SEQ ID NO: 66290 - DNA, 565 bp, Homo Sapiens; identical to SEQ ID NO: 5668

SEQ ID NO: 66291 - DNA, 1190 bp, Homo Sapiens; identical to SEQ ID NO: 5671
  misc_feature (716)..(716): n is a, c, g, or t

SEQ ID NO: 66292 - DNA, 661 bp, Homo Sapiens; identical to SEQ ID NO: 5682

SEQ ID NO: 66293 - DNA, 465 bp, Homo Sapiens; identical to SEQ ID NO: 5690

SEQ ID NO: 66294 - DNA, 403 bp, Homo Sapiens; identical to SEQ ID NO: 5694

SEQ ID NO: 66295 - DNA, 524 bp, Homo Sapiens; identical to SEQ ID NO: 5716

SEQ ID NO: 66296 - DNA, 602 bp, Homo Sapiens; identical to SEQ ID NO: 5726
  misc_feature (327)..(406): n is a, c, g, or t
  misc_feature (408)..(408): n is a, c, g, or t

SEQ ID NO: 66297 - DNA, 889 bp, Homo Sapiens; identical to SEQ ID NO: 5727

SEQ ID NO: 66298 - DNA, 1087 bp, Homo Sapiens; identical to SEQ ID NO: 5738

SEQ ID NO: 66299 - DNA, 671 bp, Homo Sapiens; identical to SEQ ID NO: 5747

SEQ ID NO: 66300 - DNA, 726 bp, Homo Sapiens; identical to SEQ ID NO: 5750

SEQ ID NO: 66301 - DNA, 835 bp, Homo Sapiens; identical to SEQ ID NO: 5751

SEQ ID NO: 66302 - DNA, 423 bp, Homo Sapiens; identical to SEQ ID NO: 5755

SEQ ID NO: 66303 - DNA, 405 bp, Homo Sapiens; identical to SEQ ID NO: 5761

SEQ ID NO: 66304 - DNA, 809 bp, Homo Sapiens; identical to SEQ ID NO: 5768
  misc_feature (95)..(105): n is a, c, g, or t
  misc_feature (161)..(161): n is a, c, g, or t
  misc_feature (163)..(165): n is a, c, g, or t
  misc_feature (176)..(176): n is a, c, g, or t
  misc_feature (178)..(178): n is a, c, g, or t
  misc_feature (182)..(182): n is a, c, g, or t
  misc_feature (186)..(189): n is a, c, g, or t

SEQ ID NO: 66305 - DNA, 1709 bp, Homo Sapiens; identical to SEQ ID NO: 5773

SEQ ID NO: 66306 - DNA, 572 bp, Homo Sapiens; identical to SEQ ID NO: 5791

SEQ ID NO: 66307 - DNA, 570 bp, Homo Sapiens; identical to SEQ ID NO: 5796
  misc_feature (71)..(103): n is a, c, g, or t
  misc_feature (517)..(517): n is a, c, g, or t
  misc_feature (551)..(551): n is a, c, g, or t

SEQ ID NO: 66308 - DNA, 302 bp, Homo Sapiens; identical to SEQ ID NO: 5800

SEQ ID NO: 66309 - DNA, 1270 bp, Homo Sapiens; identical to SEQ ID NO: 5805
  misc_feature (109)..(290): n is a, c, g, or t
  misc_feature (1029)..(1029): n is a, c, g, or t
  misc_feature (1204)..(1204): n is a, c, g, or t

SEQ ID NO: 66310 - DNA, 712 bp, Homo Sapiens; identical to SEQ ID NO: 5841

SEQ ID NO: 66311 - DNA, 699 bp, Homo Sapiens; identical to SEQ ID NO: 5845

SEQ ID NO: 66312 - DNA, 549 bp, Homo Sapiens; identical to SEQ ID NO: 5854
  misc_feature (471)..(471): n is a, c, g, or t

SEQ ID NO: 66313 - DNA, 414 bp, Homo Sapiens; identical to SEQ ID NO: 5857

SEQ ID NO: 66314 - DNA, 403 bp, Homo Sapiens; identical to SEQ ID NO: 5860

SEQ ID NO: 66315 - DNA, 299 bp, Homo Sapiens; identical to SEQ ID NO: 5861

SEQ ID NO: 66316 - DNA, 590 bp, Homo Sapiens; identical to SEQ ID NO: 5862

SEQ ID NO: 66317 - DNA, 858 bp, Homo Sapiens; identical to SEQ ID NO: 5866

SEQ ID NO: 66318 - DNA, 1055 bp, Homo Sapiens; identical to SEQ ID NO: 5876

SEQ ID NO: 66319 - DNA, 565 bp, Homo Sapiens; identical to SEQ ID NO: 5909
  misc_feature (100)..(100): n is a, c, g, or t

SEQ ID NO: 66320 - DNA, 428 bp, Homo Sapiens; identical to SEQ ID NO: 5915

SEQ ID NO: 66321 - DNA, 1203 bp, Homo Sapiens; identical to SEQ ID NO: 5926
  misc_feature (189)..(189): n is a, c, g, or t
  misc_feature (265)..(265): n is a, c, g, or t
  misc_feature (346)..(346): n is a, c, g, or t
  misc_feature (418)..(418): n is a, c, g, or t
  misc_feature (1170)..(1170): n is a, c, g, or t

SEQ ID NO: 66322 - DNA, 963 bp, Homo Sapiens; identical to SEQ ID NO: 5928

SEQ ID NO: 66323 - DNA, 1253 bp, Homo Sapiens; identical to SEQ ID NO: 5943

SEQ ID NO: 66324 - DNA, 856 bp, Homo Sapiens; identical to SEQ ID NO: 5945

SEQ ID NO: 66325 - DNA, 709 bp, Homo Sapiens; identical to SEQ ID NO: 5951

SEQ ID NO: 66326 - DNA, 1241 bp, Homo Sapiens; identical to SEQ ID NO: 5958
  misc_feature (36)..(36): n is a, c, g, or t
  misc_feature (116)..(116): n is a, c, g, or t
  misc_feature (140)..(140): n is a, c, g, or t
  misc_feature (145)..(145): n is a, c, g, or t
  misc_feature (148)..(152): n is a, c, g, or t
  misc_feature (154)..(155): n is a, c, g, or t
  misc_feature (347)..(674): n is a, c, g, or t
  misc_feature (676)..(682): n is a, c, g, or t
  misc_feature (684)..(694): n is a, c, g, or t
  misc_feature (696)..(696): n is a, c, g, or t
  misc_feature (698)..(700): n is a, c, g, or t

SEQ ID NO: 66327 - DNA, 1065 bp, Homo Sapiens; identical to SEQ ID NO: 5959

SEQ ID NO: 66328 - DNA, 973 bp, Homo Sapiens; identical to SEQ ID NO: 5963
  misc_feature (355)..(355): n is a, c, g, or t
  misc_feature (765)..(765): n is a, c, g, or t

SEQ ID NO: 66329 - DNA, 359 bp, Homo Sapiens; identical to SEQ ID NO: 5965

SEQ ID NO: 66330 - DNA, 674 bp, Homo Sapiens; identical to SEQ ID NO: 5976
  misc_feature (150)..(171): n is a, c, g, or t
  misc_feature (659)..(659): n is a, c, g, or t

SEQ ID NO: 66331 - DNA, 836 bp, Homo Sapiens; identical to SEQ ID NO: 5991
  misc_feature (750)..(750): n is a, c, g, or t

SEQ ID NO: 66332 - DNA, 560 bp, Homo Sapiens; identical to SEQ ID NO: 5998

SEQ ID NO: 66333 - DNA, 672 bp, Homo Sapiens; identical to SEQ ID NO: 5999

SEQ ID NO: 66334 - DNA, 413 bp, Homo Sapiens; identical to SEQ ID NO: 6001

SEQ ID NO: 66335 - DNA, 1195 bp, Homo Sapiens; identical to SEQ ID NO: 6008
  misc_feature (163)..(163): n is a, c, g, or t
  misc_feature (341)..(426): n is a, c, g, or t
  misc_feature (1022)..(1022): n is a, c, g, or t
  misc_feature (1025)..(1025): n is a, c, g, or t
  misc_feature (1061)..(1061): n is a, c, g, or t
  misc_feature (1064)..(1064): n is a, c, g, or t
  misc_feature (1084)..(1084): n is a, c, g, or t
  misc_feature (1125)..(1125): n is a, c, g, or t

SEQ ID NO: 66336 - DNA, 277 bp, Homo Sapiens; identical to SEQ ID NO: 6013

SEQ ID NO: 66337 - DNA, 557 bp, Homo Sapiens; identical to SEQ ID NO: 6019

SEQ ID NO: 66338 - DNA, 435 bp, Homo Sapiens; identical to SEQ ID NO: 6020
  misc_feature (287)..(313): n is a, c, g, or t

SEQ ID NO: 66339 - DNA, 570 bp, Homo Sapiens; identical to SEQ ID NO: 6021

SEQ ID NO: 66340 - DNA, 437 bp, Homo Sapiens; identical to SEQ ID NO: 6027

SEQ ID NO: 66341 - DNA, 753 bp, Homo Sapiens; identical to SEQ ID NO: 6031

SEQ ID NO: 66342 - DNA, 1186 bp, Homo Sapiens; identical to SEQ ID NO: 6032

SEQ ID NO: 66343 - DNA, 1188 bp, Homo Sapiens; identical to SEQ ID NO: 6034

SEQ ID NO: 66344 - DNA, 493 bp, Homo Sapiens; identical to SEQ ID NO: 6037

SEQ ID NO: 66345 - DNA, 666 bp, Homo Sapiens; identical to SEQ ID NO: 6039

SEQ ID NO: 66346 - DNA, 889 bp, Homo Sapiens; identical to SEQ ID NO: 6042

SEQ ID NO: 66347 - DNA, 553 bp, Homo Sapiens; identical to SEQ ID NO: 6044

SEQ ID NO: 66348 - DNA, 797 bp, Homo Sapiens; identical to SEQ ID NO: 6049
  misc_feature (76)..(87): n is a, c, g, or t

SEQ ID NO: 66349 - DNA, 788 bp, Homo Sapiens; identical to SEQ ID NO: 6052

SEQ ID NO: 66350 - DNA, 1068 bp, Homo Sapiens; identical to SEQ ID NO: 6053

SEQ ID NO: 66351 - DNA, 820 bp, Homo Sapiens; identical to SEQ ID NO: 6063
  misc_feature (186)..(186): n is a, c, g, or t

SEQ ID NO: 66352 - DNA, 1413 bp, Homo Sapiens; identical to SEQ ID NO: 6064
  misc_feature (121)..(121): n is a, c, g, or t
  misc_feature (177)..(177): n is a, c, g, or t
  misc_feature (187)..(187): n is a, c, g, or t
  misc_feature (209)..(209): n is a, c, g, or t
  misc_feature (283)..(283): n is a, c, g, or t

SEQ ID NO: 66353 - DNA, 850 bp, Homo Sapiens; identical to SEQ ID NO: 6065
  misc_feature (109)..(237): n is a, c, g, or t
  misc_feature (394)..(481): n is a, c, g, or t

SEQ ID NO: 66354 - DNA, 959 bp, Homo Sapiens; identical to SEQ ID NO: 6066
  misc_feature (70)..(70): n is a, c, g, or t
  misc_feature (87)..(87): n is a, c, g, or t
  misc_feature (112)..(171): n is a, c, g, or t
  misc_feature (228)..(228): n is a, c, g, or t

SEQ ID NO: 66355 - DNA, 557 bp, Homo Sapiens; identical to SEQ ID NO: 6073

SEQ ID NO: 66356 - DNA, 654 bp, Homo Sapiens; identical to SEQ ID NO: 6074
  misc_feature (461)..(527): n is a, c, g, or t

SEQ ID NO: 66357 - DNA, 854 bp, Homo Sapiens; identical to SEQ ID NO: 6078
  misc_feature (135)..(147): n is a, c, g, or t

SEQ ID NO: 66358 - DNA, 559 bp, Homo Sapiens; identical to SEQ ID NO: 6083
  misc_feature (300)..(338): n is a, c, g, or t

SEQ ID NO: 66359 - DNA, 1048 bp, Homo Sapiens; identical to SEQ ID NO: 6085
  misc_feature (23)..(23): n is a, c, g, or t
  misc_feature (304)..(304): n is a, c, g, or t

SEQ ID NO: 66360 - DNA, 411 bp, Homo Sapiens; identical to SEQ ID NO: 6086

SEQ ID NO: 66361 - DNA, 833 bp, Homo Sapiens; identical to SEQ ID NO: 6091

SEQ ID NO: 66362 - DNA, 765 bp, Homo Sapiens; identical to SEQ ID NO: 6092

SEQ ID NO: 66363 - DNA, 427 bp, Homo Sapiens; identical to SEQ ID NO: 6099
  misc_feature (416)..(416): n is a, c, g, or t

SEQ ID NO: 66364 - DNA, 508 bp, Homo Sapiens; identical to SEQ ID NO: 6100

SEQ ID NO: 66365 - DNA, 411 bp, Homo Sapiens; identical to SEQ ID NO: 6101

SEQ ID NO: 66366 - DNA, 996 bp, Homo Sapiens; identical to SEQ ID NO: 6109
  misc_feature (160)..(178): n is a, c, g, or t

SEQ ID NO: 66367 - DNA, 1147 bp, Homo Sapiens; identical to SEQ ID NO: 6110

SEQ ID NO: 66368 - DNA, 715 bp, Homo Sapiens; identical to SEQ ID NO: 6111

SEQ ID NO: 66369 - DNA, 935 bp, Homo Sapiens; identical to SEQ ID NO: 6112

SEQ ID NO: 66370 - DNA, 863 bp, Homo Sapiens; identical to SEQ ID NO: 6114

SEQ ID NO: 66371 - DNA, 480 bp, Homo Sapiens; identical to SEQ ID NO: 6118

SEQ ID NO: 66372 - DNA, 851 bp, Homo Sapiens; identical to SEQ ID NO: 6127

SEQ ID NO: 66373 - DNA, 1388 bp, Homo Sapiens; identical to SEQ ID NO: 6128
  misc_feature (143)..(143): n is a, c, g, or t
  misc_feature (248)..(248): n is a, c, g, or t
  misc_feature (260)..(260): n is a, c, g, or t
  misc_feature (278)..(278): n is a, c, g, or t
  misc_feature (288)..(288): n is a, c, g, or t
  misc_feature (401)..(401): n is a, c, g, or t
  misc_feature (579)..(579): n is a, c, g, or t

SEQ ID NO: 66374 - DNA, 1257 bp, Homo Sapiens; identical to SEQ ID NO: 6129
  misc_feature (135)..(158): n is a, c, g, or t
  misc_feature (181)..(223): n is a, c, g, or t

SEQ ID NO: 66375 - DNA, 1549 bp, Homo Sapiens; identical to SEQ ID NO: 6132
  misc_feature (192)..(212): n is a, c, g, or t
  misc_feature (544)..(552): n is a, c, g, or t
  misc_feature (600)..(600): n is a, c, g, or t
  misc_feature (626)..(774): n is a, c, g, or t
  misc_feature (1422)..(1430): n is a, c, g, or t

SEQ ID NO: 66376 - DNA, 905 bp, Homo Sapiens; identical to SEQ ID NO: 6153
  misc_feature (393)..(436): n is a, c, g, or t
  misc_feature (544)..(553): n is a, c, g, or t

SEQ ID NO: 66377 - DNA, 721 bp, Homo Sapiens; identical to SEQ ID NO: 6167

SEQ ID NO: 66378 - DNA, 464 bp, Homo Sapiens; identical to SEQ ID NO: 6190

SEQ ID NO: 66379 - DNA, 317 bp, Homo Sapiens; identical to SEQ ID NO: 6191

SEQ ID NO: 66380 - DNA, 394 bp, Homo Sapiens; identical to SEQ ID NO: 6196

SEQ ID NO: 66381 - DNA, 449 bp, Homo Sapiens; identical to SEQ ID NO: 6200
  misc_feature (92)..(109): n is a, c, g, or t

SEQ ID NO: 66382 - DNA, 359 bp, Homo Sapiens; identical to SEQ ID NO: 6204
  misc_feature (23)..(23): n is a, c, g, or t

SEQ ID NO: 66383 - DNA, 432 bp, Homo Sapiens; identical to SEQ ID NO: 6207

SEQ ID NO: 66384 - DNA, 254 bp, Homo Sapiens; identical to SEQ ID NO: 6221

SEQ ID NO: 66385 - DNA, 231 bp, Homo Sapiens; identical to SEQ ID NO: 6232

SEQ ID NO: 66386 - DNA, 417 bp, Homo Sapiens; identical to SEQ ID NO: 6234

SEQ ID NO: 66387 - DNA, 536 bp, Homo Sapiens; identical to SEQ ID NO: 6236

SEQ ID NO: 66388 - DNA, 209 bp, Homo Sapiens; identical to SEQ ID NO: 6246

SEQ ID NO: 66389 - DNA, 355 bp, Homo Sapiens; identical to SEQ ID NO: 6265

SEQ ID NO: 66390 - DNA, 295 bp, Homo Sapiens; identical to SEQ ID NO: 6271

SEQ ID NO: 66391 - DNA, 235 bp, Homo Sapiens; identical to SEQ ID NO: 6273

SEQ ID NO: 66392 - DNA, 389 bp, Homo Sapiens; identical to SEQ ID NO: 6275

SEQ ID NO: 66393 - DNA, 531 bp, Homo Sapiens; identical to SEQ ID NO: 6282
  misc_feature (106)..(106): n is a, c, g, or t

SEQ ID NO: 66394 - DNA, 331 bp, Homo Sapiens; identical to SEQ ID NO: 6284

SEQ ID NO: 66395 - DNA, 341 bp, Homo Sapiens; identical to SEQ ID NO: 6290

SEQ ID NO: 66396 - DNA, 352 bp, Homo Sapiens; identical to SEQ ID NO: 6296

SEQ ID NO: 66397 - DNA, 178 bp, Homo Sapiens; identical to SEQ ID NO: 6300

SEQ ID NO: 66398 - DNA, 289 bp, Homo Sapiens; identical to SEQ ID NO: 6302

SEQ ID NO: 66399 - DNA, 862 bp, Homo Sapiens; identical to SEQ ID NO: 6306

SEQ ID NO: 66400 - DNA, 552 bp, Homo Sapiens; identical to SEQ ID NO: 6311

SEQ ID NO: 66401 - DNA, 240 bp, Homo Sapiens; identical to SEQ ID NO: 6323

SEQ ID NO: 66402 - DNA, 324 bp, Homo Sapiens; identical to SEQ ID NO: 6328

SEQ ID NO: 66403 - DNA, 576 bp, Homo Sapiens; identical to SEQ ID NO: 6330

SEQ ID NO: 66404 - DNA, 1682 bp, Homo Sapiens; identical to SEQ ID NO: 6347

SEQ ID NO: 66405 - DNA, 399 bp, Homo Sapiens; identical to SEQ ID NO: 6350

SEQ ID NO: 66406 - DNA, 333 bp, Homo Sapiens; identical to SEQ ID NO: 6351

SEQ ID NO: 66407 - DNA, 729 bp, Homo Sapiens; identical to SEQ ID NO: 6355
  misc_feature (71)..(217): n is a, c, g, or t
  misc_feature (489)..(489): n is a, c, g, or t

SEQ ID NO: 66408 - DNA, 906 bp, Homo Sapiens; identical to SEQ ID NO: 6365
  misc_feature (206)..(206): n is a, c, g, or t
  misc_feature (681)..(713): n is a, c, g, or t
  misc_feature (730)..(730): n is a, c, g, or t
  misc_feature (752)..(752): n is a, c, g, or t
  misc_feature (825)..(825): n is a, c, g, or t

SEQ ID NO: 66409 - DNA, 523 bp, Homo Sapiens; identical to SEQ ID NO: 6372

SEQ ID NO: 66410 - DNA, 1001 bp, Homo Sapiens; identical to SEQ ID NO: 6375

SEQ ID NO: 66411 - DNA, 553 bp, Homo Sapiens; identical to SEQ ID NO: 6381

SEQ ID NO: 66412 - DNA, 1742 bp, Homo Sapiens; identical to SEQ ID NO: 6383

SEQ ID NO: 66413 - DNA, 740 bp, Homo Sapiens; identical to SEQ ID NO: 6398
  misc_feature (44)..(44): n is a, c, g, or t
  misc_feature (291)..(344): n is a, c, g, or t

SEQ ID NO: 66414 - DNA, 483 bp, Homo Sapiens; identical to SEQ ID NO: 6401

SEQ ID NO: 66415 - DNA, 736 bp, Homo Sapiens; identical to SEQ ID NO: 6403

SEQ ID NO: 66416 - DNA, 679 bp, Homo Sapiens; identical to SEQ ID NO: 6408

SEQ ID NO: 66417 - DNA, 864 bp, Homo Sapiens; identical to SEQ ID NO: 6411

SEQ ID NO: 66418 - DNA, 481 bp, Homo Sapiens; identical to SEQ ID NO: 6439

SEQ ID NO: 66419 - DNA, 945 bp, Homo Sapiens; identical to SEQ ID NO: 6448

SEQ ID NO: 66420 - DNA, 1032 bp, Homo Sapiens; identical to SEQ ID NO: 6458

SEQ ID NO: 66421 - DNA, 516 bp, Homo Sapiens; identical to SEQ ID NO: 6460

SEQ ID NO: 66422 - DNA, 1715 bp, Homo Sapiens; identical to SEQ ID NO: 6483
  misc_feature (945)..(973): n is a, c, g, or t
  misc_feature (1460)..(1519): n is a, c, g, or t

SEQ ID NO: 66423 - DNA, 1137 bp, Homo Sapiens; identical to SEQ ID NO: 6489

SEQ ID NO: 66424 - DNA, 1475 bp, Homo Sapiens; identical to SEQ ID NO: 6492
  misc_feature (83)..(83): n is a, c, g, or t
  misc_feature (113)..(113): n is a, c, g, or t

SEQ ID NO: 66425 - DNA, 839 bp, Homo Sapiens; identical to SEQ ID NO: 6499
  misc_feature (141)..(149): n is a, c, g, or t

SEQ ID NO: 66426 - DNA, 443 bp, Homo Sapiens; identical to SEQ ID NO: 6500
  misc_feature (89)..(120): n is a, c, g, or t

SEQ ID NO: 66427 - DNA, 538 bp, Homo Sapiens; identical to SEQ ID NO: 6515

SEQ ID NO: 66428 - DNA, 1053 bp, Homo Sapiens; identical to SEQ ID NO: 6520

SEQ ID NO: 66429 - DNA, 664 bp, Homo Sapiens; identical to SEQ ID NO: 6527
  misc_feature (103)..(111): n is a, c, g, or t

SEQ ID NO: 66430 - DNA, 505 bp, Homo Sapiens; identical to SEQ ID NO: 6530
  misc_feature (102)..(112): n is a, c, g, or t

SEQ ID NO: 66431 - DNA, 765 bp, Homo Sapiens; identical to SEQ ID NO: 6532
  misc_feature (85)..(104): n is a, c, g, or t
  misc_feature (111)..(124): n is a, c, g, or t
  misc_feature (136)..(260): n is a, c, g, or t

SEQ ID NO: 66432 - DNA, 898 bp, Homo Sapiens; identical to SEQ ID NO: 6548

SEQ ID NO: 66433 - DNA, 555 bp, Homo Sapiens; identical to SEQ ID NO: 6549

SEQ ID NO: 66434 - DNA, 1034 bp, Homo Sapiens; identical to SEQ ID NO: 6552

SEQ ID NO: 66435 - DNA, 608 bp, Homo Sapiens; identical to SEQ ID NO: 6553

SEQ ID NO: 66436 - DNA, 570 bp, Homo Sapiens; identical to SEQ ID NO: 6554

SEQ ID NO: 66437 - DNA, 404 bp, Homo Sapiens; identical to SEQ ID NO: 6558

SEQ ID NO: 66438 - DNA, 658 bp, Homo Sapiens; identical to SEQ ID NO: 6560
  misc_feature (566)..(566): n is a, c, g, or t

SEQ ID NO: 66439 - DNA, 481 bp, Homo Sapiens; identical to SEQ ID NO: 6573
  misc_feature (445)..(445): n is a, c, g, or t

SEQ ID NO: 66440 - DNA, 488 bp, Homo Sapiens; identical to SEQ ID NO: 6575

SEQ ID NO: 66441 - DNA, 525 bp, Homo Sapiens; identical to SEQ ID NO: 6578

SEQ ID NO: 66442 - DNA, 414 bp, Homo Sapiens; identical to SEQ ID NO: 6580

SEQ ID NO: 66443 - DNA, 821 bp, Homo Sapiens; identical to SEQ ID NO: 6584

SEQ ID NO: 66444 - DNA, 598 bp, Homo Sapiens; identical to SEQ ID NO: 6594

SEQ ID NO: 66445 - DNA, 826 bp, Homo Sapiens; identical to SEQ ID NO: 6597
  misc_feature (74)..(107): n is a, c, g, or t

SEQ ID NO: 66446 - DNA, 378 bp, Homo Sapiens; identical to SEQ ID NO: 6600

SEQ ID NO: 66447 - DNA, 466 bp, Homo Sapiens; identical to SEQ ID NO: 6608

SEQ ID NO: 66448 - DNA, 495 bp, Homo Sapiens; identical to SEQ ID NO: 6620
  misc_feature (34)..(34): n is a, c, g, or t

SEQ ID NO: 66449 - DNA, 952 bp, Homo Sapiens; identical to SEQ ID NO: 6636

SEQ ID NO: 66450 - DNA, 401 bp, Homo Sapiens; identical to SEQ ID NO: 6638

SEQ ID NO: 66451 - DNA, 519 bp, Homo Sapiens; identical to SEQ ID NO: 6642

SEQ ID NO: 66452 - DNA, 985 bp, Homo Sapiens; identical to SEQ ID NO: 6644
  misc_feature (19)..(19): n is a, c, g, or t
  misc_feature (23)..(23): n is a, c, g, or t

SEQ ID NO: 66453 - DNA, 652 bp, Homo Sapiens; identical to SEQ ID NO: 6650

SEQ ID NO: 66454 - DNA, 429 bp, Homo Sapiens; identical to SEQ ID NO: 6654

SEQ ID NO: 66455 - DNA, 730 bp, Homo Sapiens; identical to SEQ ID NO: 6658

SEQ ID NO: 66456 - DNA, 502 bp, Homo Sapiens; identical to SEQ ID NO: 6661

SEQ ID NO: 66457 - DNA, 426 bp, Homo Sapiens; identical to SEQ ID NO: 6665

SEQ ID NO: 66458 - DNA, 601 bp, Homo Sapiens; identical to SEQ ID NO: 6666

SEQ ID NO: 66459 - DNA, 1733 bp, Homo Sapiens; identical to SEQ ID NO: 6695

SEQ ID NO: 66460 - DNA, 1032 bp, Homo Sapiens; identical to SEQ ID NO: 6697

SEQ ID NO: 66461 - DNA, 387 bp, Homo Sapiens; identical to SEQ ID NO: 6706

SEQ ID NO: 66462 - DNA, 532 bp, Homo Sapiens; identical to SEQ ID NO: 6707

SEQ ID NO: 66463 - DNA, 422 bp, Homo Sapiens; identical to SEQ ID NO: 6708

SEQ ID NO: 66464 - DNA, 581 bp, Homo Sapiens; identical to SEQ ID NO: 6717

SEQ ID NO: 66465 - DNA, 504 bp, Homo Sapiens; identical to SEQ ID NO: 6723

SEQ ID NO: 66466 - DNA, 700 bp, Homo Sapiens; identical to SEQ ID NO: 6724

SEQ ID NO: 66467 - DNA, 570 bp, Homo Sapiens; identical to SEQ ID NO: 6731

SEQ ID NO: 66468 - DNA, 715 bp, Homo Sapiens; identical to SEQ ID NO: 6732

SEQ ID NO: 66469 - DNA, 301 bp, Homo Sapiens; identical to SEQ ID NO: 6739

SEQ ID NO: 66470 - DNA, 640 bp, Homo Sapiens; identical to SEQ ID NO: 6742
  misc_feature (108)..(155): n is a, c, g, or t
  misc_feature (167)..(175): n is a, c, g, or t
  misc_feature (308)..(308): n is a, c, g, or t
  misc_feature (432)..(481): n is a, c, g, or t

SEQ ID NO: 66471 - DNA, 351 bp, Homo Sapiens; identical to SEQ ID NO: 6756

SEQ ID NO: 66472 - DNA, 1016 bp, Homo Sapiens; identical to SEQ ID NO: 6759

SEQ ID NO: 66473 - DNA, 1046 bp, Homo Sapiens; identical to SEQ ID NO: 6760

SEQ ID NO: 66474 - DNA, 505 bp, Homo Sapiens; identical to SEQ ID NO: 6768

SEQ ID NO: 66475 - DNA, 470 bp, Homo Sapiens; identical to SEQ ID NO: 6769

SEQ ID NO: 66476 - DNA, 308 bp, Homo Sapiens; identical to SEQ ID NO: 6775

SEQ ID NO: 66477 - DNA, 567 bp, Homo Sapiens; identical to SEQ ID NO: 6780

SEQ ID NO: 66478 - DNA, 811 bp, Homo Sapiens; identical to SEQ ID NO: 6781

SEQ ID NO: 66479 - DNA, 957 bp, Homo Sapiens; identical to SEQ ID NO: 6786

SEQ ID NO: 66480 - DNA, 930 bp, Homo Sapiens; identical to SEQ ID NO: 6804

SEQ ID NO: 66481 - DNA, 160 bp, Homo Sapiens; identical to SEQ ID NO: 6810

SEQ ID NO: 66482 - DNA, 758 bp, Homo Sapiens; identical to SEQ ID NO: 6812

SEQ ID NO: 66483 - DNA, 464 bp, Homo Sapiens; identical to SEQ ID NO: 6817

SEQ ID NO: 66484 - DNA, 1010 bp, Homo Sapiens; identical to SEQ ID NO: 6823

SEQ ID NO: 66485 - DNA, 1124 bp, Homo Sapiens; identical to SEQ ID NO: 6830

SEQ ID NO: 66486 - DNA, 672 bp, Homo Sapiens; identical to SEQ ID NO: 6832
  misc_feature (408)..(408): n is a, c, g, or t
  misc_feature (466)..(466): n is a, c, g, or t

SEQ ID NO: 66487 - DNA, 402 bp, Homo Sapiens; identical to SEQ ID NO: 6847

SEQ ID NO: 66488 - DNA, 605 bp, Homo Sapiens; identical to SEQ ID NO: 6848

SEQ ID NO: 66489 - DNA, 436 bp, Homo Sapiens; identical to SEQ ID NO: 6849

SEQ ID NO: 66490 - DNA, 441 bp, Homo Sapiens; identical to SEQ ID NO: 6850
  misc_feature (313)..(321): n is a, c, g, or t

SEQ ID NO: 66491 - DNA, 355 bp, Homo Sapiens; identical to SEQ ID NO: 6851

SEQ ID NO: 66492 - DNA, 412 bp, Homo Sapiens; identical to SEQ ID NO: 6852

SEQ ID NO: 66493 - DNA, 509 bp, Homo Sapiens; identical to SEQ ID NO: 6861

SEQ ID NO: 66494 - DNA, 525 bp, Homo Sapiens; identical to SEQ ID NO: 6870
  misc_feature (162)..(162): n is a, c, g, or t

SEQ ID NO: 66495 - DNA, 733 bp, Homo Sapiens; identical to SEQ ID NO: 6876
  misc_feature (530)..(543): n is a, c, g, or t
  misc_feature (652)..(652): n is a, c, g, or t

SEQ ID NO: 66496 - DNA, 587 bp, Homo Sapiens; identical to SEQ ID NO: 6877

SEQ ID NO: 66497 - DNA, 1095 bp, Homo Sapiens; identical to SEQ ID NO: 6881
  misc_feature (37)..(37): n is a, c, g, or t
  misc_feature (78)..(89): n is a, c, g, or t
  misc_feature (122)..(184): n is a, c, g, or t
  misc_feature (213)..(213): n is a, c, g, or t

SEQ ID NO: 66498 - DNA, 1214 bp, Homo Sapiens; identical to SEQ ID NO: 6891
  misc_feature (116)..(341): n is a, c, g, or t
  misc_feature (345)..(345): n is a, c, g, or t
  misc_feature (441)..(449): n is a, c, g, or t
  misc_feature (524)..(571): n is a, c, g, or t

SEQ ID NO: 66499 - DNA, 1144 bp, Homo Sapiens; identical to SEQ ID NO: 6896
  misc_feature (19)..(19): n is a, c, g, or t
  misc_feature (738)..(741): n is a, c, g, or t
  misc_feature (743)..(744): n is a, c, g, or t
  misc_feature (747)..(750): n is a, c, g, or t
  misc_feature (804)..(864): n is a, c, g, or t
  misc_feature (896)..(914): n is a, c, g, or t

SEQ ID NO: 66500 - DNA, 1306 bp, Homo Sapiens; identical to SEQ ID NO: 6901

SEQ ID NO: 66501 - DNA, 527 bp, Homo Sapiens; identical to SEQ ID NO: 6916
  misc_feature (87)..(112): n is a, c, g, or t
  misc_feature (153)..(193): n is a, c, g, or t

SEQ ID NO: 66502 - DNA, 532 bp, Homo Sapiens; identical to SEQ ID NO: 6917

SEQ ID NO: 66503 - DNA, 458 bp, Homo Sapiens; identical to SEQ ID NO: 6919

SEQ ID NO: 66504 - DNA, 752 bp, Homo Sapiens; identical to SEQ ID NO: 6923
  misc_feature (21)..(21): n is a, c, g, or t

SEQ ID NO: 66505 - DNA, 607 bp, Homo Sapiens; identical to SEQ ID NO: 6924
  misc_feature (99)..(99): n is a, c, g, or t

SEQ ID NO: 66506 - DNA, 2391 bp, Homo Sapiens; identical to SEQ ID NO: 6928
  misc_feature (74)..(74): n is a, c, g, or t
  misc_feature (109)..(109): n is a, c, g, or t
  misc_feature (124)..(124): n is a, c, g, or t
  misc_feature (138)..(138): n is a, c, g, or t
  misc_feature (263)..(263): n is a, c, g, or t
  misc_feature (406)..(406): n is a, c, g, or t
  misc_feature (436)..(436): n is a, c, g, or t
  misc_feature (550)..(550): n is a, c, g, or t
  misc_feature (555)..(555): n is a, c, g, or t
  misc_feature (750)..(758): n is a, c, g, or t
  misc_feature (1014)..(1088): n is a, c, g, or t
  misc_feature (1215)..(1225): n is a, c, g, or t
  misc_feature (1506)..(1515): n is a, c, g, or t
  misc_feature (1595)..(1616): n is a, c, g, or t
  misc_feature (1774)..(1782): n is a, c, g, or t
  misc_feature (2043)..(2057): n is a, c, g, or t
  misc_feature (2097)..(2106): n is a, c, g, or t

SEQ ID NO: 66507 - DNA, 378 bp, Homo Sapiens; identical to SEQ ID NO: 6931

SEQ ID NO: 66508 - DNA, 857 bp, Homo Sapiens; identical to SEQ ID NO: 6933

SEQ ID NO: 66509 - DNA, 633 bp, Homo Sapiens; identical to SEQ ID NO: 6935
  misc_feature (192)..(214): n is a, c, g, or t

SEQ ID NO: 66510 - DNA, 926 bp, Homo Sapiens; identical to SEQ ID NO: 6952

SEQ ID NO: 66511 - DNA, 766 bp, Homo Sapiens; identical to SEQ ID NO: 6975
  misc_feature (535)..(535): n is a, c, g, or t

SEQ ID NO: 66512 - DNA, 1267 bp, Homo Sapiens; identical to SEQ ID NO: 6977
  misc_feature (19)..(19): n is a, c, g, or t
  misc_feature (42)..(42): n is a, c, g, or t
  misc_feature (124)..(124): n is a, c, g, or t
  misc_feature (895)..(928): n is a, c, g, or t

SEQ ID NO: 66513 - DNA, 340 bp, Homo Sapiens; identical to SEQ ID NO: 6978

SEQ ID NO: 66514 - DNA, 598 bp, Homo Sapiens; identical to SEQ ID NO: 6980
  misc_feature (49)..(57): n is a, c, g, or t
  misc_feature (279)..(453): n is a, c, g, or t
  misc_feature (458)..(534): n is a, c, g, or t

SEQ ID NO: 66515 - DNA, 1636 bp, Homo Sapiens; identical to SEQ ID NO: 6981
  misc_feature (97)..(106): n is a, c, g, or t
  misc_feature (197)..(233): n is a, c, g, or t

SEQ ID NO: 66516 - DNA, 664 bp, Homo Sapiens; identical to SEQ ID NO: 6987

SEQ ID NO: 66517 - DNA, 463 bp, Homo Sapiens; identical to SEQ ID NO: 6991

SEQ ID NO: 66518 - DNA, 425 bp, Homo Sapiens; identical to SEQ ID NO: 7014

SEQ ID NO: 66519 - DNA, 1454 bp, Homo Sapiens; identical to SEQ ID NO: 7018

SEQ ID NO: 66520 - DNA, 216 bp, Homo Sapiens; identical to SEQ ID NO: 7019

SEQ ID NO: 66521 - DNA, 374 bp, Homo Sapiens; identical to SEQ ID NO: 7031

SEQ ID NO: 66522 - DNA, 657 bp, Homo Sapiens; identical to SEQ ID NO: 7042

SEQ ID NO: 66523 - DNA, 425 bp, Homo Sapiens; identical to SEQ ID NO: 7050
  misc_feature (164)..(190): n is a, c, g, or t
  misc_feature (196)..(197): n is a, c, g, or t
  misc_feature (203)..(207): n is a, c, g, or t

SEQ ID NO: 66524 - DNA, 517 bp, Homo Sapiens; identical to SEQ ID NO: 7051

SEQ ID NO: 66525 - DNA, 367 bp, Homo Sapiens; identical to SEQ ID NO: 7055

SEQ ID NO: 66526 - DNA, 1442 bp, Homo Sapiens; identical to SEQ ID NO: 7064

SEQ ID NO: 66527 - DNA, 1127 bp, Homo Sapiens; identical to SEQ ID NO: 7078

SEQ ID NO: 66528 - DNA, 496 bp, Homo Sapiens; identical to SEQ ID NO: 7082

SEQ ID NO: 66529 - DNA, 393 bp, Homo Sapiens; identical to SEQ ID NO: 7084

SEQ ID NO: 66530 - DNA, 382 bp, Homo Sapiens; identical to SEQ ID NO: 7089

SEQ ID NO: 66531 - DNA, 678 bp, Homo Sapiens; identical to SEQ ID NO: 7091
  misc_feature (415)..(427): n is a, c, g, or t

SEQ ID NO: 66532 - DNA, 426 bp, Homo Sapiens; identical to SEQ ID NO: 7092
  misc_feature (20)..(20): n is a, c, g, or t
  misc_feature (260)..(260): n is a, c, g, or t

SEQ ID NO: 66533 - DNA, 490 bp, Homo Sapiens; identical to SEQ ID NO: 7102

SEQ ID NO: 66534 - DNA, 877 bp, Homo Sapiens; identical to SEQ ID NO: 7109

SEQ ID NO: 66535 - DNA, 825 bp, Homo Sapiens; identical to SEQ ID NO: 7113
  misc_feature (13)..(13): n is a, c, g, or t
  misc_feature (100)..(100): n is a, c, g, or t

SEQ ID NO: 66536 - DNA, 562 bp, Homo Sapiens; identical to SEQ ID NO: 7133
  misc_feature (254)..(269): n is a, c, g, or t

SEQ ID NO: 66537 - DNA, 1427 bp, Homo Sapiens; identical to SEQ ID NO: 7137

SEQ ID NO: 66538 - DNA, 411 bp, Homo Sapiens; identical to SEQ ID NO: 7143

SEQ ID NO: 66539 - DNA, 706 bp, Homo Sapiens; identical to SEQ ID NO: 7145
  misc_feature (307)..(315): n is a, c, g, or t

SEQ ID NO: 66540 - DNA, 622 bp, Homo Sapiens; identical to SEQ ID NO: 7149
  misc_feature (29)..(29): n is a, c, g, or t

SEQ ID NO: 66541 - DNA, 952 bp, Homo Sapiens; identical to SEQ ID NO: 7154
  misc_feature (37)..(37): n is a, c, g, or t
  misc_feature (47)..(47): n is a, c, g, or t
  misc_feature (248)..(248): n is a, c, g, or t
  misc_feature (332)..(332): n is a, c, g, or t

SEQ ID NO: 66542 - DNA, 565 bp, Homo Sapiens; identical to SEQ ID NO: 7160

SEQ ID NO: 66543 - DNA, 813 bp, Homo Sapiens; identical to SEQ ID NO: 7161
  misc_feature (198)..(458): n is a, c, g, or t

SEQ ID NO: 66544 - DNA, 1072 bp, Homo Sapiens; identical to SEQ ID NO: 7165

SEQ ID NO: 66545 - DNA, 573 bp, Homo Sapiens; identical to SEQ ID NO: 7176
  misc_feature (377)..(377): n is a, c, g, or t
  misc_feature (409)..(409): n is a, c, g, or t
  misc_feature (418)..(418): n is a, c, g, or t
  misc_feature (426)..(426): n is a, c, g, or t
  misc_feature (482)..(482): n is a, c, g, or t
  misc_feature (493)..(493): n is a, c, g, or t
  misc_feature (513)..(513): n is a, c, g, or t
  misc_feature (520)..(520): n is a, c, g, or t

SEQ ID NO: 66546 - DNA, 479 bp, Homo Sapiens; identical to SEQ ID NO: 7183

SEQ ID NO: 66547 - DNA, 435 bp, Homo Sapiens; identical to SEQ ID NO: 7187

SEQ ID NO: 66548 - DNA, 1266 bp, Homo Sapiens; identical to SEQ ID NO: 7190

SEQ ID NO: 66549 - DNA, 396 bp, Homo Sapiens; identical to SEQ ID NO: 7192
  misc_feature (232)..(271): n is a, c, g, or t

SEQ ID NO: 66550 - DNA, 504 bp, Homo Sapiens; identical to SEQ ID NO: 7196

SEQ ID NO: 66551 - DNA, 1241 bp, Homo Sapiens; identical to SEQ ID NO: 7205

SEQ ID NO: 66552 - DNA, 789 bp, Homo Sapiens; identical to SEQ ID NO: 7206

SEQ ID NO: 66553 - DNA, 408 bp, Homo Sapiens; identical to SEQ ID NO: 7210

SEQ ID NO: 66554 - DNA, 271 bp, Homo Sapiens; identical to SEQ ID NO: 7216

SEQ ID NO: 66555 - DNA, 582 bp, Homo Sapiens; identical to SEQ ID NO: 7219

SEQ ID NO: 66556 - DNA, 526 bp, Homo Sapiens; identical to SEQ ID NO: 7223

SEQ ID NO: 66557 - DNA, 1017 bp, Homo Sapiens; identical to SEQ ID NO: 7234

SEQ ID NO: 66558 - DNA, 759 bp, Homo Sapiens; identical to SEQ ID NO: 7237
  misc_feature (282)..(377): n is a, c, g, or t

SEQ ID NO: 66559 - DNA, 575 bp, Homo Sapiens; identical to SEQ ID NO: 7239

SEQ ID NO: 66560 - DNA, 698 bp, Homo Sapiens; identical to SEQ ID NO: 7259

SEQ ID NO: 66561 - DNA, 326 bp, Homo Sapiens; identical to SEQ ID NO: 7264

SEQ ID NO: 66562 - DNA, 437 bp, Homo Sapiens; identical to SEQ ID NO: 7275

SEQ ID NO: 66563 - DNA, 567 bp, Homo Sapiens; identical to SEQ ID NO: 7279

SEQ ID NO: 66564 - DNA, 738 bp, Homo Sapiens; identical to SEQ ID NO: 7287

SEQ ID NO: 66565 - DNA, 836 bp, Homo Sapiens; identical to SEQ ID NO: 7294

SEQ ID NO: 66566 - DNA, 498 bp, Homo Sapiens; identical to SEQ ID NO: 7296

SEQ ID NO: 66567 - DNA, 658 bp, Homo Sapiens; identical to SEQ ID NO: 7303

SEQ ID NO: 66568 - DNA, 456 bp, Homo Sapiens; identical to SEQ ID NO: 7311

SEQ ID NO: 66569 - DNA, 658 bp, Homo Sapiens; identical to SEQ ID NO: 7312

SEQ ID NO: 66570 - DNA, 473 bp, Homo Sapiens; identical to SEQ ID NO: 7339

SEQ ID NO: 66571 - DNA, 758 bp, Homo Sapiens; identical to SEQ ID NO: 7348

SEQ ID NO: 66572 - DNA, 243 bp, Homo Sapiens; identical to SEQ ID NO: 7353

SEQ ID NO: 66573 - DNA, 379 bp, Homo Sapiens; identical to SEQ ID NO: 7379

SEQ ID NO: 66574 - DNA, 489 bp, Homo Sapiens; identical to SEQ ID NO: 7402

SEQ ID NO: 66575 - DNA, 593 bp, Homo Sapiens; identical to SEQ ID NO: 7406

SEQ ID NO: 66576 - DNA, 378 bp, Homo Sapiens; identical to SEQ ID NO: 7410

SEQ ID NO: 66577 - DNA, 681 bp, Homo Sapiens; identical to SEQ ID NO: 7416

SEQ ID NO: 66578 - DNA, 473 bp, Homo Sapiens; identical to SEQ ID NO: 7427

SEQ ID NO: 66579 - DNA, 541 bp, Homo Sapiens; identical to SEQ ID NO: 7428
  misc_feature (240)..(309): n is a, c, g, or t

SEQ ID NO: 66580 - DNA, 422 bp, Homo Sapiens; identical to SEQ ID NO: 7432

SEQ ID NO: 66581 - DNA, 472 bp, Homo Sapiens; identical to SEQ ID NO: 7439

SEQ ID NO: 66582 - DNA, 671 bp, Homo Sapiens; identical to SEQ ID NO: 7444

SEQ ID NO: 66583 - DNA, 464 bp, Homo Sapiens; identical to SEQ ID NO: 7450
  misc_feature (327)..(340): n is a, c, g, or t

SEQ ID NO: 66584 - DNA, 1117 bp, Homo Sapiens; identical to SEQ ID NO: 7467
  misc_feature (99)..(117): n is a, c, g, or t

SEQ ID NO: 66585 - DNA, 565 bp, Homo Sapiens; identical to SEQ ID NO: 7468
  misc_feature (416)..(469): n is a, c, g, or t

SEQ ID NO: 66586 - DNA, 472 bp, Homo Sapiens; identical to SEQ ID NO: 7473

SEQ ID NO: 66587 - DNA, 420 bp, Homo Sapiens; identical to SEQ ID NO: 7474
  misc_feature (20)..(20): n is a, c, g, or t
  misc_feature (28)..(28): n is a, c, g, or t
  misc_feature (40)..(40): n is a, c, g, or t
  misc_feature (80)..(80): n is a, c, g, or t
  misc_feature (166)..(166): n is a, c, g, or t

SEQ ID NO: 66588 - DNA, 1034 bp, Homo Sapiens; identical to SEQ ID NO: 7475

SEQ ID NO: 66589 - DNA, 370 bp, Homo Sapiens; identical to SEQ ID NO: 7477

SEQ ID NO: 66590 - DNA, 470 bp, Homo Sapiens; identical to SEQ ID NO: 7489
  misc_feature (250)..(250): n is a, c, g, or t

SEQ ID NO: 66591 - DNA, 527 bp, Homo Sapiens; identical to SEQ ID NO: 7494

SEQ ID NO: 66592 - DNA, 695 bp, Homo Sapiens; identical to SEQ ID NO: 7497
  misc_feature (33)..(33): n is a, c, g, or t

SEQ ID NO: 66593 - DNA, 411 bp, Homo Sapiens; identical to SEQ ID NO: 7509

SEQ ID NO: 66594 - DNA, 367 bp, Homo Sapiens; identical to SEQ ID NO: 7528

SEQ ID NO: 66595 - DNA, 566 bp, Homo Sapiens; identical to SEQ ID NO: 7539

SEQ ID NO: 66596 - DNA, 1393 bp, Homo Sapiens; identical to SEQ ID NO: 7547
  misc_feature (265)..(274): n is a, c, g, or t
  misc_feature (531)..(548): n is a, c, g, or t
  misc_feature (597)..(644): n is a, c, g, or t

SEQ ID NO: 66597 - DNA, 535 bp, Homo Sapiens; identical to SEQ ID NO: 7552

SEQ ID NO: 66598 - DNA, 1326 bp, Homo Sapiens; identical to SEQ ID NO: 7559

SEQ ID NO: 66599 - DNA, 792 bp, Homo Sapiens; identical to SEQ ID NO: 7581

SEQ ID NO: 66600 - DNA, 395 bp, Homo Sapiens; identical to SEQ ID NO: 7586

SEQ ID NO: 66601 - DNA, 224 bp, Homo Sapiens; identical to SEQ ID NO: 7588

SEQ ID NO: 66602 - DNA, 1055 bp, Homo Sapiens; identical to SEQ ID NO: 7600
  misc_feature (55)..(55): n is a, c, g, or t
  misc_feature (59)..(59): n is a, c, g, or t
  misc_feature (279)..(287): n is a, c, g, or t
  misc_feature (390)..(412): n is a, c, g, or t
  misc_feature (432)..(495): n is a, c, g, or t

SEQ ID NO: 66603 - DNA, 446 bp, Homo Sapiens; identical to SEQ ID NO: 7611
  misc_feature (19)..(19): n is a, c, g, or t

SEQ ID NO: 66604 - DNA, 985 bp, Homo Sapiens; identical to SEQ ID NO: 7617

SEQ ID NO: 66605 - DNA, 741 bp, Homo Sapiens; identical to SEQ ID NO: 7619

SEQ ID NO: 66606 - DNA, 832 bp, Homo Sapiens; identical to SEQ ID NO: 7621

SEQ ID NO: 66607 - DNA, 1164 bp, Homo Sapiens; identical to SEQ ID NO: 7623
  misc_feature (1128)..(1128): n is a, c, g, or t

SEQ ID NO: 66608 - DNA, 572 bp, Homo Sapiens; identical to SEQ ID NO: 7633

SEQ ID NO: 66609 - DNA, 688 bp, Homo Sapiens; identical to SEQ ID NO: 7643

SEQ ID NO: 66610 - DNA, 589 bp, Homo Sapiens; identical to SEQ ID NO: 7653

SEQ ID NO: 66611 - DNA, 1113 bp, Homo Sapiens; identical to SEQ ID NO: 7655

SEQ ID NO: 66612 - DNA, 794 bp, Homo Sapiens; identical to SEQ ID NO: 7657

SEQ ID NO: 66613 - DNA, 1071 bp, Homo Sapiens; identical to SEQ ID NO: 7664

SEQ ID NO: 66614 - DNA, 363 bp, Homo Sapiens; identical to SEQ ID NO: 7678

SEQ ID NO: 66615 - DNA, 1068 bp, Homo Sapiens; identical to SEQ ID NO: 7698
  misc_feature (264)..(274): n is a, c, g, or t
  misc_feature (371)..(383): n is a, c, g, or t
  misc_feature (421)..(429): n is a, c, g, or t
  misc_feature (441)..(457): n is a, c, g, or t

SEQ ID NO: 66616 - DNA, 339 bp, Homo Sapiens; identical to SEQ ID NO: 7703

SEQ ID NO: 66617 - DNA, 174 bp, Homo Sapiens; identical to SEQ ID NO: 7704

SEQ ID NO: 66618 - DNA, 406 bp, Homo Sapiens; identical to SEQ ID NO: 7708

SEQ ID NO: 66619 - DNA, 395 bp, Homo Sapiens; identical to SEQ ID NO: 7709

SEQ ID NO: 66620 - DNA, 428 bp, Homo Sapiens; identical to SEQ ID NO: 7710

SEQ ID NO: 66621 - DNA, 539 bp, Homo Sapiens; identical to SEQ ID NO: 7711

SEQ ID NO: 66622 - DNA, 294 bp, Homo Sapiens; identical to SEQ ID NO: 7713

SEQ ID NO: 66623 - DNA, 658 bp, Homo Sapiens; identical to SEQ ID NO: 7734

SEQ ID NO: 66624 - DNA, 544 bp, Homo Sapiens; identical to SEQ ID NO: 7737
  misc_feature (117)..(117): n is a, c, g, or t
  misc_feature (405)..(406): n is a, c, g, or t
  misc_feature (459)..(459): n is a, c, g, or t
  misc_feature (485)..(485): n is a, c, g, or t
  misc_feature (519)..(519): n is a, c, g, or t
  misc_feature (521)..(521): n is a, c, g, or t

SEQ ID NO: 66625 - DNA, 207 bp, Homo Sapiens; identical to SEQ ID NO: 7739

SEQ ID NO: 66626 - DNA, 272 bp, Homo Sapiens; identical to SEQ ID NO: 7740

SEQ ID NO: 66627 - DNA, 474 bp, Homo Sapiens; identical to SEQ ID NO: 7753

SEQ ID NO: 66628 - DNA, 656 bp, Homo Sapiens; identical to SEQ ID NO: 7772

SEQ ID NO: 66629 - DNA, 874 bp, Homo Sapiens; identical to SEQ ID NO: 7773
  misc_feature (455)..(455): n is a, c, g, or t
  misc_feature (611)..(619): n is a, c, g, or t

SEQ ID NO: 66630 - DNA, 569 bp, Homo Sapiens; identical to SEQ ID NO: 7785

SEQ ID NO: 66631 - DNA, 258 bp, Homo Sapiens; identical to SEQ ID NO: 7803

SEQ ID NO: 66632 - DNA, 918 bp, Homo Sapiens; identical to SEQ ID NO: 7805

SEQ ID NO: 66633 - DNA, 273 bp, Homo Sapiens; identical to SEQ ID NO: 7806
  misc_feature (256)..(256): n is a, c, g, or t

SEQ ID NO: 66634 - DNA, 713 bp, Homo Sapiens; identical to SEQ ID NO: 7808

SEQ ID NO: 66635 - DNA, 410 bp, Homo Sapiens; identical to SEQ ID NO: 7809

SEQ ID NO: 66636 - DNA, 537 bp, Homo Sapiens; identical to SEQ ID NO: 7819
  misc_feature (68)..(81): n is a, c, g, or t

SEQ ID NO: 66637 - DNA, 602 bp, Homo Sapiens; identical to SEQ ID NO: 7826

SEQ ID NO: 66638 - DNA, 455 bp, Homo Sapiens; identical to SEQ ID NO: 7832
  misc_feature (436)..(436): n is a, c, g, or t

SEQ ID NO: 66639 - DNA, 495 bp, Homo Sapiens; identical to SEQ ID NO: 7834

SEQ ID NO: 66640 - DNA, 659 bp, Homo Sapiens; identical to SEQ ID NO: 7837
  misc_feature (545)..(578): n is a, c, g, or t

SEQ ID NO: 66641 - DNA, 563 bp, Homo Sapiens; identical to SEQ ID NO: 7841

SEQ ID NO: 66642 - DNA, 421 bp, Homo Sapiens; identical to SEQ ID NO: 7852

SEQ ID NO: 66643 - DNA, 834 bp, Homo Sapiens; identical to SEQ ID NO: 7858

SEQ ID NO: 66644 - DNA, 526 bp, Homo Sapiens; identical to SEQ ID NO: 7869

SEQ ID NO: 66645 - DNA, 785 bp, Homo Sapiens; identical to SEQ ID NO: 7871
  misc_feature (304)..(304): n is a, c, g, or t
  misc_feature (320)..(320): n is a, c, g, or t
  misc_feature (341)..(341): n is a, c, g, or t
  misc_feature (366)..(366): n is a, c, g, or t

SEQ ID NO: 66646 - DNA, 591 bp, Homo Sapiens; identical to SEQ ID NO: 7872

SEQ ID NO: 66647 - DNA, 416 bp, Homo Sapiens; identical to SEQ ID NO: 7873

SEQ ID NO: 66648 - DNA, 528 bp, Homo Sapiens; identical to SEQ ID NO: 7877

SEQ ID NO: 66649 - DNA, 598 bp, Homo Sapiens; identical to SEQ ID NO: 7879

SEQ ID NO: 66650 - DNA, 460 bp, Homo Sapiens; identical to SEQ ID NO: 7887

SEQ ID NO: 66651 - DNA, 232 bp, Homo Sapiens; identical to SEQ ID NO: 7894
  misc_feature (184)..(184): n is a, c, g, or t

SEQ ID NO: 66652 - DNA, 461 bp, Homo Sapiens; identical to SEQ ID NO: 7901

SEQ ID NO: 66653 - DNA, 578 bp, Homo Sapiens; identical to SEQ ID NO: 7914

SEQ ID NO: 66654 - DNA, 759 bp, Homo Sapiens; identical to SEQ ID NO: 7932
  misc_feature (731)..(731): n is a, c, g, or t

SEQ ID NO: 66655 - DNA, 457 bp, Homo Sapiens; identical to SEQ ID NO: 7933

SEQ ID NO: 66656 - DNA, 534 bp, Homo Sapiens; identical to SEQ ID NO: 7943

SEQ ID NO: 66657 - DNA, 710 bp, Homo Sapiens; identical to SEQ ID NO: 7958

SEQ ID NO: 66658 - DNA, 948 bp, Homo Sapiens; identical to SEQ ID NO: 7959
  misc_feature (13)..(13): n is a, c, g, or t

SEQ ID NO: 66659 - DNA, 892 bp, Homo Sapiens; identical to SEQ ID NO: 7960
  misc_feature (65)..(103): n is a, c, g, or t

SEQ ID NO: 66660 - DNA, 945 bp, Homo Sapiens; identical to SEQ ID NO: 7991

SEQ ID NO: 66661 - DNA, 1053 bp, Homo Sapiens; identical to SEQ ID NO: 8002

SEQ ID NO: 66662 - DNA, 897 bp, Homo Sapiens; identical to SEQ ID NO: 8005

SEQ ID NO: 66663 - DNA, 368 bp, Homo Sapiens; identical to SEQ ID NO: 8006

SEQ ID NO: 66664 - DNA, 1004 bp, Homo Sapiens; identical to SEQ ID NO: 8008
  misc_feature (421)..(599): n is a, c, g, or t
  misc_feature (608)..(621): n is a, c, g, or t
  misc_feature (661)..(816): n is a, c, g, or t
  misc_feature (840)..(857): n is a, c, g, or t
  misc_feature (904)..(912): n is a, c, g, or t

SEQ ID NO: 66665 - DNA, 1840 bp, Homo Sapiens; identical to SEQ ID NO: 8011
  misc_feature (130)..(130): n is a, c, g, or t
  misc_feature (143)..(143): n is a, c, g, or t
  misc_feature (152)..(152): n is a, c, g, or t
  misc_feature (280)..(280): n is a, c, g, or t
  misc_feature (305)..(305): n is a, c, g, or t
  misc_feature (784)..(792): n is a, c, g, or t
  misc_feature (839)..(879): n is a, c, g, or t
  misc_feature (1494)..(1518): n is a, c, g, or t

SEQ ID NO: 66666 - DNA, 676 bp, Homo Sapiens; identical to SEQ ID NO: 8013

SEQ ID NO: 66667 - DNA, 912 bp, Homo Sapiens; identical to SEQ ID NO: 8019

SEQ ID NO: 66668 - DNA, 618 bp, Homo Sapiens; identical to SEQ ID NO: 8030

SEQ ID NO: 66669 - DNA, 1364 bp, Homo Sapiens; identical to SEQ ID NO: 8042
  misc_feature (99)..(110): n is a, c, g, or t
  misc_feature (152)..(171): n is a, c, g, or t
  misc_feature (173)..(321): n is a, c, g, or t
  misc_feature (385)..(393): n is a, c, g, or t

SEQ ID NO: 66670 - DNA, 1029 bp, Homo Sapiens; identical to SEQ ID NO: 8057

SEQ ID NO: 66671 - DNA, 718 bp, Homo Sapiens; identical to SEQ ID NO: 8065

SEQ ID NO: 66672 - DNA, 487 bp, Homo Sapiens; identical to SEQ ID NO: 8099

SEQ ID NO: 66673 - DNA, 426 bp, Homo Sapiens; identical to SEQ ID NO: 8103

SEQ ID NO: 66674 - DNA, 263 bp, Homo Sapiens; identical to SEQ ID NO: 8112

SEQ ID NO: 66675 - DNA, 1438 bp, Homo Sapiens; identical to SEQ ID NO: 8118
  misc_feature (1418)..(1418): n is a, c, g, or t

SEQ ID NO: 66676 - DNA, 1136 bp, Homo Sapiens; identical to SEQ ID NO: 8124
  misc_feature (32)..(33): n is a, c, g, or t
  misc_feature (35)..(35): n is a, c, g, or t
  misc_feature (156)..(156): n is a, c, g, or t
  misc_feature (633)..(646): n is a, c, g, or t

SEQ ID NO: 66677 - DNA, 477 bp, Homo Sapiens; identical to SEQ ID NO: 8130

SEQ ID NO: 66678 - DNA, 339 bp, Homo Sapiens; identical to SEQ ID NO: 8148

SEQ ID NO: 66679 - DNA, 426 bp, Homo Sapiens; identical to SEQ ID NO: 8163
  misc_feature (389)..(389): n is a, c, g, or t

SEQ ID NO: 66680 - DNA, 539 bp, Homo Sapiens; identical to SEQ ID NO: 8165
  misc_feature (35)..(37): n is a, c, g, or t
  misc_feature (44)..(44): n is a, c, g, or t
  misc_feature (49)..(49): n is a, c, g, or t
  misc_feature (52)..(52): n is a, c, g, or t
  misc_feature (473)..(494): n is a, c, g, or t

SEQ ID NO: 66681 - DNA, 370 bp, Homo Sapiens; identical to SEQ ID NO: 8172

SEQ ID NO: 66682 - DNA, 336 bp, Homo Sapiens; identical to SEQ ID NO: 8181

SEQ ID NO: 66683 - DNA, 273 bp, Homo Sapiens; identical to SEQ ID NO: 8183

SEQ ID NO: 66684 - DNA, 471 bp, Homo Sapiens; identical to SEQ ID NO: 8184

SEQ ID NO: 66685 - DNA, 419 bp, Homo Sapiens; identical to SEQ ID NO: 8186

SEQ ID NO: 66686 - DNA, 524 bp, Homo Sapiens; identical to SEQ ID NO: 8193

SEQ ID NO: 66687 - DNA, 372 bp, Homo Sapiens; identical to SEQ ID NO: 8200

SEQ ID NO: 66688 - DNA, 223 bp, Homo Sapiens; identical to SEQ ID NO: 8201

SEQ ID NO: 66689 - DNA, 409 bp, Homo Sapiens; identical to SEQ ID NO: 8205

SEQ ID NO: 66690 - DNA, 875 bp, Homo Sapiens; identical to SEQ ID NO: 8206
  misc_feature (95)..(104): n is a, c, g, or t

SEQ ID NO: 66691 - DNA, 543 bp, Homo Sapiens; identical to SEQ ID NO: 8221

SEQ ID NO: 66692 - DNA, 413 bp, Homo Sapiens; identical to SEQ ID NO: 8222

SEQ ID NO: 66693 - DNA, 479 bp, Homo Sapiens; identical to SEQ ID NO: 8223

SEQ ID NO: 66694 - DNA, 441 bp, Homo Sapiens; identical to SEQ ID NO: 8226

SEQ ID NO: 66695 - DNA, 440 bp, Homo Sapiens; identical to SEQ ID NO: 8228

SEQ ID NO: 66696 - DNA, 1049 bp, Homo Sapiens; identical to SEQ ID NO: 8229
  misc_feature (99)..(99): n is a, c, g, or t
  misc_feature (518)..(564): n is a, c, g, or t

SEQ ID NO: 66697 - DNA, 422 bp, Homo Sapiens; identical to SEQ ID NO: 8251

SEQ ID NO: 66698 - DNA, 649 bp, Homo Sapiens; identical to SEQ ID NO: 8262

SEQ ID NO: 66699 - DNA, 1073 bp, Homo Sapiens; identical to SEQ ID NO: 8263

SEQ ID NO: 66700 - DNA, 501 bp, Homo Sapiens; identical to SEQ ID NO: 8267

SEQ ID NO: 66701 - DNA, 405 bp, Homo Sapiens; identical to SEQ ID NO: 8270
  misc_feature (278)..(278): n is a, c, g, or t

SEQ ID NO: 66702 - DNA, 685 bp, Homo Sapiens; identical to SEQ ID NO: 8290
  misc_feature (585)..(585): n is a, c, g, or t

SEQ ID NO: 66703 - DNA, 849 bp, Homo Sapiens; identical to SEQ ID NO: 8292

SEQ ID NO: 66704 - DNA, 1152 bp, Homo Sapiens; identical to SEQ ID NO: 8306

SEQ ID NO: 66705 - DNA, 817 bp, Homo Sapiens; identical to SEQ ID NO: 8307
  misc_feature (758)..(758): n is a, c, g, or t
  misc_feature (783)..(783): n is a, c, g, or t

SEQ ID NO: 66706 - DNA, 732 bp, Homo Sapiens; identical to SEQ ID NO: 8310

SEQ ID NO: 66707 - DNA, 873 bp, Homo Sapiens; identical to SEQ ID NO: 8314

SEQ ID NO: 66708 - DNA, 405 bp, Homo Sapiens; identical to SEQ ID NO: 8315
  misc_feature (106)..(130): n is a, c, g, or t

SEQ ID NO: 66709 - DNA, 640 bp, Homo Sapiens; identical to SEQ ID NO: 8320

SEQ ID NO: 66710 - DNA, 478 bp, Homo Sapiens; identical to SEQ ID NO: 8323
  misc_feature (46)..(66): n is a, c, g, or t

SEQ ID NO: 66711 - DNA, 361 bp, Homo Sapiens; identical to SEQ ID NO: 8333

SEQ ID NO: 66712 - DNA, 941 bp, Homo Sapiens; identical to SEQ ID NO: 8338
  misc_feature (854)..(854): n is a, c, g, or t

SEQ ID NO: 66713 - DNA, 907 bp, Homo Sapiens; identical to SEQ ID NO: 8364
  misc_feature (406)..(406): n is a, c, g, or t
  misc_feature (413)..(413): n is a, c, g, or t
  misc_feature (418)..(418): n is a, c, g, or t
  misc_feature (425)..(428): n is a, c, g, or t

SEQ ID NO: 66714 - DNA, 501 bp, Homo Sapiens; identical to SEQ ID NO: 8366

SEQ ID NO: 66715 - DNA, 488 bp, Homo Sapiens; identical to SEQ ID NO: 8387

SEQ ID NO: 66716 - DNA, 277 bp, Homo Sapiens; identical to SEQ ID NO: 8407
  misc_feature (265)..(265): n is a, c, g, or t

SEQ ID NO: 66717 - DNA, 486 bp, Homo Sapiens; identical to SEQ ID NO: 8408

SEQ ID NO: 66718 - DNA, 244 bp, Homo Sapiens; identical to SEQ ID NO: 8413

SEQ ID NO: 66719 - DNA, 489 bp, Homo Sapiens; identical to SEQ ID NO: 8421

SEQ ID NO: 66720 - DNA, 451 bp, Homo Sapiens; identical to SEQ ID NO: 8425

SEQ ID NO: 66721 - DNA, 605 bp, Homo Sapiens; identical to SEQ ID NO: 8447

SEQ ID NO: 66722 - DNA, 323 bp, Homo Sapiens; identical to SEQ ID NO: 8453

SEQ ID NO: 66723 - DNA, 902 bp, Homo Sapiens; identical to SEQ ID NO: 8456

SEQ ID NO: 66724 - DNA, 664 bp, Homo Sapiens; identical to SEQ ID NO: 8466

SEQ ID NO: 66725 - DNA, 635 bp, Homo Sapiens; identical to SEQ ID NO: 8470

SEQ ID NO: 66726 - DNA, 324 bp, Homo Sapiens; identical to SEQ ID NO: 8483

SEQ ID NO: 66727 - DNA, 639 bp, Homo Sapiens; identical to SEQ ID NO: 8491
  misc_feature (571)..(571): n is a, c, g, or t
  misc_feature (601)..(601): n is a, c, g, or t
  misc_feature (605)..(605): n is a, c, g, or t
  misc_feature (608)..(608): n is a, c, g, or t

SEQ ID NO: 66728 - DNA, 516 bp, Homo Sapiens; identical to SEQ ID NO: 8502

SEQ ID NO: 66729 - DNA, 429 bp, Homo Sapiens; identical to SEQ ID NO: 8504
  misc_feature (290)..(374): n is a, c, g, or t

SEQ ID NO: 66730 - DNA, 567 bp, Homo Sapiens; identical to SEQ ID NO: 8521

SEQ ID NO: 66731 - DNA, 456 bp, Homo Sapiens; identical to SEQ ID NO: 8538

SEQ ID NO: 66732 - DNA, 679 bp, Homo Sapiens; identical to SEQ ID NO: 8555

SEQ ID NO: 66733 - DNA, 591 bp, Homo Sapiens; identical to SEQ ID NO: 8566
  misc_feature (26)..(26): n is a, c, g, or t
  misc_feature (38)..(38): n is a, c, g, or t
  misc_feature (99)..(99): n is a, c, g, or t
  misc_feature (415)..(415): n is a, c, g, or t

SEQ ID NO: 66734 - DNA, 1172 bp, Homo Sapiens; identical to SEQ ID NO: 8568
  misc_feature (1013)..(1075): n is a, c, g, or t

SEQ ID NO: 66735 - DNA, 452 bp, Homo Sapiens; identical to SEQ ID NO: 8574
  misc_feature (356)..(380): n is a, c, g, or t

SEQ ID NO: 66736 - DNA, 862 bp, Homo Sapiens; identical to SEQ ID NO: 8575

SEQ ID NO: 66737 - DNA, 430 bp, Homo Sapiens; identical to SEQ ID NO: 8577

SEQ ID NO: 66738 - DNA, 557 bp, Homo Sapiens; identical to SEQ ID NO: 8585

SEQ ID NO: 66739 - DNA, 696 bp, Homo Sapiens; identical to SEQ ID NO: 8608

SEQ ID NO: 66740 - DNA, 520 bp, Homo Sapiens; identical to SEQ ID NO: 8624

SEQ ID NO: 66741 - DNA, 1085 bp, Homo Sapiens; identical to SEQ ID NO: 8632

SEQ ID NO: 66742 - DNA, 785 bp, Homo Sapiens; identical to SEQ ID NO: 8646

SEQ ID NO: 66743 - DNA, 1404 bp, Homo Sapiens; identical to SEQ ID NO: 8648
  misc_feature (102)..(102): n is a, c, g, or t
  misc_feature (116)..(116): n is a, c, g, or t

SEQ ID NO: 66744 - DNA, 874 bp, Homo Sapiens; identical to SEQ ID NO: 8649

SEQ ID NO: 66745 - DNA, 849 bp, Homo Sapiens; identical to SEQ ID NO: 8667

SEQ ID NO: 66746 - DNA, 304 bp, Homo Sapiens; identical to SEQ ID NO: 8671

SEQ ID NO: 66747 - DNA, 384 bp, Homo Sapiens; identical to SEQ ID NO: 8680

SEQ ID NO: 66748 - DNA, 915 bp, Homo Sapiens; identical to SEQ ID NO: 8687
  misc_feature (732)..(787): n is a, c, g, or t

SEQ ID NO: 66749 - DNA, 223 bp, Homo Sapiens; identical to SEQ ID NO: 8690

SEQ ID NO: 66750 - DNA, 1371 bp, Homo Sapiens; identical to SEQ ID NO: 8691
  misc_feature (99)..(99): n is a, c, g, or t
  misc_feature (101)..(103): n is a, c, g, or t
  misc_feature (107)..(107): n is a, c, g, or t
  misc_feature (109)..(110): n is a, c, g, or t
  misc_feature (112)..(113): n is a, c, g, or t
  misc_feature (115)..(115): n is a, c, g, or t
  misc_feature (117)..(410): n is a, c, g, or t

SEQ ID NO: 66751 - DNA, 634 bp, Homo Sapiens; identical to SEQ ID NO: 8701

SEQ ID NO: 66752 - DNA, 346 bp, Homo Sapiens; identical to SEQ ID NO: 8705

SEQ ID NO: 66753 - DNA, 395 bp, Homo Sapiens; identical to SEQ ID NO: 8709

SEQ ID NO: 66754 - DNA, 1285 bp, Homo Sapiens; identical to SEQ ID NO: 8719
  misc_feature (53)..(53): n is a, c, g, or t
  misc_feature (107)..(107): n is a, c, g, or t
  misc_feature (178)..(178): n is a, c, g, or t
  misc_feature (891)..(903): n is a, c, g, or t
  misc_feature (907)..(961): n is a, c, g, or t
  misc_feature (1129)..(1129): n is a, c, g, or t

SEQ ID NO: 66755 - DNA, 470 bp, Homo Sapiens; identical to SEQ ID NO: 8726

SEQ ID NO: 66756 - DNA, 1217 bp, Homo Sapiens; identical to SEQ ID NO: 8727
  misc_feature (699)..(766): n is a, c, g, or t
  misc_feature (925)..(925): n is a, c, g, or t
  misc_feature (979)..(992): n is a, c, g, or t
  misc_feature (1096)..(1096): n is a, c, g, or t
  misc_feature (1187)..(1187): n is a, c, g, or t

SEQ ID NO: 66757 - DNA, 506 bp, Homo Sapiens; identical to SEQ ID NO: 8728

SEQ ID NO: 66758 - DNA, 358 bp, Homo Sapiens; identical to SEQ ID NO: 8731
  misc_feature (229)..(229): n is a, c, g, or t

SEQ ID NO: 66759 - DNA, 628 bp, Homo Sapiens; identical to SEQ ID NO: 8732

SEQ ID NO: 66760 - DNA, 340 bp, Homo Sapiens; identical to SEQ ID NO: 8737

SEQ ID NO: 66761 - DNA, 329 bp, Homo Sapiens; identical to SEQ ID NO: 8739

SEQ ID NO: 66762 - DNA, 435 bp, Homo Sapiens; identical to SEQ ID NO: 8740

SEQ ID NO: 66763 - DNA, 430 bp, Homo Sapiens; identical to SEQ ID NO: 8758

SEQ ID NO: 66764 - DNA, 394 bp, Homo Sapiens; identical to SEQ ID NO: 8759

SEQ ID NO: 66765 - DNA, 479 bp, Homo Sapiens; identical to SEQ ID NO: 8761

SEQ ID NO: 66766 - DNA, 951 bp, Homo Sapiens; identical to SEQ ID NO: 8762

SEQ ID NO: 66767 - DNA, 521 bp, Homo Sapiens; identical to SEQ ID NO: 8764

SEQ ID NO: 66768 - DNA, 542 bp, Homo Sapiens; identical to SEQ ID NO: 8773

SEQ ID NO: 66769 - DNA, 185 bp, Homo Sapiens; identical to SEQ ID NO: 8780

SEQ ID NO: 66770 - DNA, 1447 bp, Homo Sapiens; identical to SEQ ID NO: 8784
  misc_feature (379)..(379): n is a, c, g, or t
  misc_feature (385)..(385): n is a, c, g, or t
  misc_feature (956)..(956): n is a, c, g, or t
  misc_feature (1009)..(1142): n is a, c, g, or t

SEQ ID NO: 66771 - DNA, 877 bp, Homo Sapiens; identical to SEQ ID NO: 8786
  misc_feature (283)..(283): n is a, c, g, or t
  misc_feature (588)..(588): n is a, c, g, or t
  misc_feature (593)..(593): n is a, c, g, or t

SEQ ID NO: 66772 - DNA, 829 bp, Homo Sapiens; identical to SEQ ID NO: 8790
  misc_feature (691)..(704): n is a, c, g, or t

SEQ ID NO: 66773 - DNA, 951 bp, Homo Sapiens; identical to SEQ ID NO: 8791
  misc_feature (19)..(19): n is a, c, g, or t
  misc_feature (306)..(368): n is a, c, g, or t
  misc_feature (397)..(474): n is a, c, g, or t
  misc_feature (641)..(690): n is a, c, g, or t

SEQ ID NO: 66774 - DNA, 1085 bp, Homo Sapiens; identical to SEQ ID NO: 8795
  misc_feature (147)..(147): n is a, c, g, or t

SEQ ID NO: 66775 - DNA, 530 bp, Homo Sapiens; identical to SEQ ID NO: 8797

SEQ ID NO: 66776 - DNA, 337 bp, Homo Sapiens; identical to SEQ ID NO: 8798

SEQ ID NO: 66777 - DNA, 574 bp, Homo Sapiens; identical to SEQ ID NO: 8799

SEQ ID NO: 66778 - DNA, 627 bp, Homo Sapiens; identical to SEQ ID NO: 8812
  misc_feature (241)..(258): n is a, c, g, or t

SEQ ID NO: 66779 - DNA, 741 bp, Homo Sapiens; identical to SEQ ID NO: 8813
  misc_feature (152)..(152): n is a, c, g, or t

SEQ ID NO: 66780 - DNA, 498 bp, Homo Sapiens; identical to SEQ ID NO: 8814
  misc_feature (32)..(32): n is a, c, g, or t

SEQ ID NO: 66781 - DNA, 326 bp, Homo Sapiens; identical to SEQ ID NO: 8815

SEQ ID NO: 66782 - DNA, 777 bp, Homo Sapiens; identical to SEQ ID NO: 8818
  misc_feature (16)..(16): n is a, c, g, or t
  misc_feature (55)..(55): n is a, c, g, or t
  misc_feature (107)..(107): n is a, c, g, or t
  misc_feature (286)..(286): n is a, c, g, or t

SEQ ID NO: 66783 - DNA, 397 bp, Homo Sapiens; identical to SEQ ID NO: 8826

SEQ ID NO: 66784 - DNA, 430 bp, Homo Sapiens; identical to SEQ ID NO: 8838

SEQ ID NO: 66785 - DNA, 401 bp, Homo Sapiens; identical to SEQ ID NO: 8840
  misc_feature (364)..(364): n is a, c, g, or t

SEQ ID NO: 66786 - DNA, 508 bp, Homo Sapiens; identical to SEQ ID NO: 8847

SEQ ID NO: 66787 - DNA, 464 bp, Homo Sapiens; identical to SEQ ID NO: 8851

SEQ ID NO: 66788 - DNA, 413 bp, Homo Sapiens; identical to SEQ ID NO: 8854

SEQ ID NO: 66789 - DNA, 498 bp, Homo Sapiens; identical to SEQ ID NO: 8873

SEQ ID NO: 66790 - DNA, 425 bp, Homo Sapiens; identical to SEQ ID NO: 8874
  misc_feature (235)..(235): n is a, c, g, or t

SEQ ID NO: 66791 - DNA, 510 bp, Homo Sapiens; identical to SEQ ID NO: 8875
  misc_feature (54)..(54): n is a, c, g, or t

SEQ ID NO: 66792 - DNA, 545 bp, Homo Sapiens; identical to SEQ ID NO: 8881

SEQ ID NO: 66793 - DNA, 629 bp, Homo Sapiens; identical to SEQ ID NO: 8885
  misc_feature (17)..(17): n is a, c, g, or t

SEQ ID NO: 66794 - DNA, 398 bp, Homo Sapiens; identical to SEQ ID NO: 8895

SEQ ID NO: 66795 - DNA, 531 bp, Homo Sapiens; identical to SEQ ID NO: 8896
  misc_feature (34)..(34): n is a, c, g, or t
  misc_feature (49)..(49): n is a, c, g, or t
  misc_feature (74)..(109): n is a, c, g, or t
  misc_feature (115)..(115): n is a, c, g, or t
  misc_feature (179)..(179): n is a, c, g, or t

SEQ ID NO: 66796 - DNA, 620 bp, Homo Sapiens; identical to SEQ ID NO: 8902
  misc_feature (400)..(400): n is a, c, g, or t
  misc_feature (494)..(494): n is a, c, g, or t
  misc_feature (596)..(596): n is a, c, g, or t

SEQ ID NO: 66797 - DNA, 384 bp, Homo Sapiens; identical to SEQ ID NO: 8905

SEQ ID NO: 66798 - DNA, 213 bp, Homo Sapiens; identical to SEQ ID NO: 8907

SEQ ID NO: 66799 - DNA, 387 bp, Homo Sapiens; identical to SEQ ID NO: 8909

SEQ ID NO: 66800 - DNA, 410 bp, Homo Sapiens; identical to SEQ ID NO: 8919

SEQ ID NO: 66801 - DNA, 595 bp, Homo Sapiens; identical to SEQ ID NO: 8928

SEQ ID NO: 66802 - DNA, 635 bp, Homo Sapiens; identical to SEQ ID NO: 8935

SEQ ID NO: 66803 - DNA, 238 bp, Homo Sapiens; identical to SEQ ID NO: 8936

SEQ ID NO: 66804 - DNA, 435 bp, Homo Sapiens; identical to SEQ ID NO: 8937

SEQ ID NO: 66805 - DNA, 528 bp, Homo Sapiens; identical to SEQ ID NO: 8941

SEQ ID NO: 66806 - DNA, 607 bp, Homo Sapiens; identical to SEQ ID NO: 8942

SEQ ID NO: 66807 - DNA, 410 bp, Homo Sapiens; identical to SEQ ID NO: 8943

SEQ ID NO: 66808 - DNA, 427 bp, Homo Sapiens; identical to SEQ ID NO: 8946

SEQ ID NO: 66809 - DNA, 913 bp, Homo Sapiens; identical to SEQ ID NO: 8954
  misc_feature (199)..(253): n is a, c, g, or t
  misc_feature (389)..(443): n is a, c, g, or t

SEQ ID NO: 66810 - DNA, 362 bp, Homo Sapiens; identical to SEQ ID NO: 8960

SEQ ID NO: 66811 - DNA, 437 bp, Homo Sapiens; identical to SEQ ID NO: 8962

SEQ ID NO: 66812 - DNA, 498 bp, Homo Sapiens; identical to SEQ ID NO: 8963

SEQ ID NO: 66813 - DNA, 992 bp, Homo Sapiens; identical to SEQ ID NO: 8965

SEQ ID NO: 66814 - DNA, 469 bp, Homo Sapiens; identical to SEQ ID NO: 8970
  misc_feature (349)..(349): n is a, c, g, or t
  misc_feature (431)..(431): n is a, c, g, or t

SEQ ID NO: 66815 - DNA, 435 bp, Homo Sapiens; identical to SEQ ID NO: 8972
  misc_feature (29)..(29): n is a, c, g, or t
  misc_feature (39)..(39): n is a, c, g, or t
  misc_feature (111)..(111): n is a, c, g, or t
  misc_feature (126)..(126): n is a, c, g, or t
  misc_feature (183)..(183): n is a, c, g, or t

SEQ ID NO: 66816 - DNA, 307 bp, Homo Sapiens; identical to SEQ ID NO: 8977

SEQ ID NO: 66817 - DNA, 590 bp, Homo Sapiens; identical to SEQ ID NO: 8983
  misc_feature (363)..(376): n is a, c, g, or t

SEQ ID NO: 66818 - DNA, 852 bp, Homo Sapiens; identical to SEQ ID NO: 8989

SEQ ID NO: 66819 - DNA, 678 bp, Homo Sapiens; identical to SEQ ID NO: 8991
  misc_feature (127)..(127): n is a, c, g, or t

SEQ ID NO: 66820 - DNA, 432 bp, Homo Sapiens; identical to SEQ ID NO: 9006
  misc_feature (27)..(27): n is a, c, g, or t
  misc_feature (58)..(58): n is a, c, g, or t
  misc_feature (66)..(66): n is a, c, g, or t
  misc_feature (88)..(88): n is a, c, g, or t
  misc_feature (112)..(112): n is a, c, g, or t
  misc_feature (140)..(140): n is a, c, g, or t
  misc_feature (196)..(232): n is a, c, g, or t

SEQ ID NO: 66821 - DNA, 424 bp, Homo Sapiens; identical to SEQ ID NO: 9009
  misc_feature (214)..(214): n is a, c, g, or t

SEQ ID NO: 66822 - DNA, 1123 bp, Homo Sapiens; identical to SEQ ID NO: 9011
  misc_feature (30)..(30): n is a, c, g, or t

SEQ ID NO: 66823 - DNA, 456 bp, Homo Sapiens; identical to SEQ ID NO: 9013
  misc_feature (232)..(232): n is a, c, g, or t
  misc_feature (332)..(332): n is a, c, g, or t
  misc_feature (355)..(355): n is a, c, g, or t
  misc_feature (391)..(391): n is a, c, g, or t
  misc_feature (402)..(402): n is a, c, g, or t
  misc_feature (413)..(413): n is a, c, g, or t
  misc_feature (430)..(430): n is a, c, g, or t
  misc_feature (443)..(443): n is a, c, g, or t

SEQ ID NO: 66824 - DNA, 499 bp, Homo Sapiens; identical to SEQ ID NO: 9016

SEQ ID NO: 66825 - DNA, 1264 bp, Homo Sapiens; identical to SEQ ID NO: 9020
  misc_feature (109)..(109): n is a, c, g, or t
  misc_feature (465)..(497): n is a, c, g, or t
  misc_feature (500)..(509): n is a, c, g, or t

SEQ ID NO: 66826 - DNA, 705 bp, Homo Sapiens; identical to SEQ ID NO: 9042

SEQ ID NO: 66827 - DNA, 530 bp, Homo Sapiens; identical to SEQ ID NO: 9044
  misc_feature (37)..(37): n is a, c, g, or t

SEQ ID NO: 66828 - DNA, 977 bp, Homo Sapiens; identical to SEQ ID NO: 9053

SEQ ID NO: 66829 - DNA, 404 bp, Homo Sapiens; identical to SEQ ID NO: 9057
  misc_feature (23)..(23): n is a, c, g, or t
  misc_feature (101)..(101): n is a, c, g, or t
  misc_feature (148)..(148): n is a, c, g, or t
  misc_feature (167)..(167): n is a, c, g, or t

SEQ ID NO: 66830 - DNA, 526 bp, Homo Sapiens; identical to SEQ ID NO: 9058

SEQ ID NO: 66831 - DNA, 796 bp, Homo Sapiens; identical to SEQ ID NO: 9081

SEQ ID NO: 66832 - DNA, 732 bp, Homo Sapiens; identical to SEQ ID NO: 9089
  misc_feature (106)..(139): n is a, c, g, or t

SEQ ID NO: 66833 - DNA, 285 bp, Homo Sapiens; identical to SEQ ID NO: 9090

SEQ ID NO: 66834 - DNA, 425 bp, Homo Sapiens; identical to SEQ ID NO: 9097

SEQ ID NO: 66835 - DNA, 848 bp, Homo Sapiens; identical to SEQ ID NO: 9103
  misc_feature (161)..(161): n is a, c, g, or t
  misc_feature (803)..(803): n is a, c, g, or t

SEQ ID NO: 66836 - DNA, 1557 bp, Homo Sapiens; identical to SEQ ID NO: 9119
  misc_feature (12)..(12): n is a, c, g, or t
  misc_feature (63)..(63): n is a, c, g, or t
  misc_feature (66)..(67): n is a, c, g, or t
  misc_feature (98)..(98): n is a, c, g, or t
  misc_feature (144)..(144): n is a, c, g, or t
  misc_feature (182)..(182): n is a, c, g, or t
  misc_feature (244)..(245): n is a, c, g, or t
  misc_feature (327)..(328): n is a, c, g, or t
  misc_feature (399)..(399): n is a, c, g, or t
  misc_feature (402)..(402): n is a, c, g, or t
  misc_feature (434)..(434): n is a, c, g, or t
  misc_feature (504)..(504): n is a, c, g, or t
  misc_feature (531)..(531): n is a, c, g, or t
  misc_feature (543)..(543): n is a, c, g, or t
  misc_feature (556)..(556): n is a, c, g, or t
  misc_feature (666)..(666): n is a, c, g, or t
  misc_feature (669)..(669): n is a, c, g, or t
  misc_feature (804)..(804): n is a, c, g, or t

SEQ ID NO: 66837 - DNA, 1045 bp, Homo Sapiens; identical to SEQ ID NO: 9142

SEQ ID NO: 66838 - DNA, 896 bp, Homo Sapiens; identical to SEQ ID NO: 9153

SEQ ID NO: 66839 - DNA, 968 bp, Homo Sapiens; identical to SEQ ID NO: 9156
  misc_feature (706)..(745): n is a, c, g, or t

SEQ ID NO: 66840 - DNA, 1261 bp, Homo Sapiens; identical to SEQ ID NO: 9157
  misc_feature (89)..(89): n is a, c, g, or t
  misc_feature (229)..(229): n is a, c, g, or t

SEQ ID NO: 66841 - DNA, 436 bp, Homo Sapiens; identical to SEQ ID NO: 9172

SEQ ID NO: 66842 - DNA, 253 bp, Homo Sapiens; identical to SEQ ID NO: 9180

SEQ ID NO: 66843 - DNA, 650 bp, Homo Sapiens; identical to SEQ ID NO: 9182
  misc_feature (616)..(616): n is a, c, g, or t

SEQ ID NO: 66844 - DNA, 936 bp, Homo Sapiens; identical to SEQ ID NO: 9184

SEQ ID NO: 66845 - DNA, 456 bp, Homo Sapiens; identical to SEQ ID NO: 9188

SEQ ID NO: 66846 - DNA, 441 bp, Homo Sapiens; identical to SEQ ID NO: 9191

SEQ ID NO: 66847 - DNA, 1064 bp, Homo Sapiens; identical to SEQ ID NO: 9193
  misc_feature (42)..(42): n is a, c, g, or t

SEQ ID NO: 66848 - DNA, 1002 bp, Homo Sapiens; identical to SEQ ID NO: 9195
  misc_feature (413)..(413): n is a, c, g, or t

SEQ ID NO: 66849 - DNA, 881 bp, Homo Sapiens; identical to SEQ ID NO: 9196
  misc_feature (139)..(139): n is a, c, g, or t

SEQ ID NO: 66850 - DNA, 515 bp, Homo Sapiens; identical to SEQ ID NO: 9212

SEQ ID NO: 66851 - DNA, 887 bp, Homo Sapiens; identical to SEQ ID NO: 9222

SEQ ID NO: 66852 - DNA, 1097 bp, Homo Sapiens; identical to SEQ ID NO: 9229
  misc_feature (75)..(75): n is a, c, g, or t
  misc_feature (81)..(81): n is a, c, g, or t
  misc_feature (87)..(87): n is a, c, g, or t
  misc_feature (91)..(91): n is a, c, g, or t

SEQ ID NO: 66853 - DNA, 188 bp, Homo Sapiens; identical to SEQ ID NO: 9231

SEQ ID NO: 66854 - DNA, 346 bp, Homo Sapiens; identical to SEQ ID NO: 9243

SEQ ID NO: 66855 - DNA, 473 bp, Homo Sapiens; identical to SEQ ID NO: 9245

SEQ ID NO: 66856 - DNA, 942 bp, Homo Sapiens; identical to SEQ ID NO: 9258
  misc_feature (88)..(88): n is a, c, g, or t
  misc_feature (319)..(362): n is a, c, g, or t
  misc_feature (483)..(491): n is a, c, g, or t
  misc_feature (585)..(598): n is a, c, g, or t
  misc_feature (626)..(626): n is a, c, g, or t
  misc_feature (668)..(676): n is a, c, g, or t
  misc_feature (709)..(709): n is a, c, g, or t
  misc_feature (715)..(716): n is a, c, g, or t
  misc_feature (722)..(723): n is a, c, g, or t
  misc_feature (727)..(727): n is a, c, g, or t

SEQ ID NO: 66857 - DNA, 1140 bp, Homo Sapiens; identical to SEQ ID NO: 9261
  misc_feature (170)..(170): n is a, c, g, or t

SEQ ID NO: 66858 - DNA, 918 bp, Homo Sapiens; identical to SEQ ID NO: 9267
  misc_feature (486)..(504): n is a, c, g, or t

SEQ ID NO: 66859 - DNA, 828 bp, Homo Sapiens; identical to SEQ ID NO: 9274

SEQ ID NO: 66860 - DNA, 358 bp, Homo Sapiens; identical to SEQ ID NO: 9275

SEQ ID NO: 66861 - DNA, 585 bp, Homo Sapiens; identical to SEQ ID NO: 9278

SEQ ID NO: 66862 - DNA, 421 bp, Homo Sapiens; identical to SEQ ID NO: 9280

SEQ ID NO: 66863 - DNA, 264 bp, Homo Sapiens; identical to SEQ ID NO: 9281

SEQ ID NO: 66864 - DNA, 1039 bp, Homo Sapiens; identical to SEQ ID NO: 9315

SEQ ID NO: 66865 - DNA, 824 bp, Homo Sapiens; identical to SEQ ID NO: 9321
  misc_feature (311)..(350): n is a, c, g, or t

SEQ ID NO: 66866 - DNA, 1169 bp, Homo Sapiens; identical to SEQ ID NO: 9329

SEQ ID NO: 66867 - DNA, 235 bp, Homo Sapiens; identical to SEQ ID NO: 9335

SEQ ID NO: 66868 - DNA, 1610 bp, Homo Sapiens; identical to SEQ ID NO: 9336
  misc_feature (41)..(41): n is a, c, g, or t
  misc_feature (159)..(159): n is a, c, g, or t
  misc_feature (164)..(165): n is a, c, g, or t
  misc_feature (204)..(204): n is a, c, g, or t
  misc_feature (401)..(401): n is a, c, g, or t
  misc_feature (537)..(537): n is a, c, g, or t
  misc_feature (545)..(545): n is a, c, g, or t
  misc_feature (577)..(577): n is a, c, g, or t
  misc_feature (685)..(685): n is a, c, g, or t
  misc_feature (745)..(745): n is a, c, g, or t
  misc_feature (906)..(966): n is a, c, g, or t
  misc_feature (1030)..(1038): n is a, c, g, or t

SEQ ID NO: 66869 - DNA, 599 bp, Homo Sapiens; identical to SEQ ID NO: 9346

SEQ ID NO: 66870 - DNA, 557 bp, Homo Sapiens; identical to SEQ ID NO: 9349

SEQ ID NO: 66871 - DNA, 1634 bp, Homo Sapiens; identical to SEQ ID NO: 9355
  misc_feature (142)..(142): n is a, c, g, or t
  misc_feature (256)..(256): n is a, c, g, or t
  misc_feature (494)..(506): n is a, c, g, or t
  misc_feature (625)..(648): n is a, c, g, or t
  misc_feature (1034)..(1066): n is a, c, g, or t

SEQ ID NO: 66872 - DNA, 541 bp, Homo Sapiens; identical to SEQ ID NO: 9357

SEQ ID NO: 66873 - DNA, 671 bp, Homo Sapiens; identical to SEQ ID NO: 9374

SEQ ID NO: 66874 - DNA, 551 bp, Homo Sapiens; identical to SEQ ID NO: 9386

SEQ ID NO: 66875 - DNA, 938 bp, Homo Sapiens; identical to SEQ ID NO: 9392
  misc_feature (490)..(521): n is a, c, g, or t
  misc_feature (881)..(881): n is a, c, g, or t

SEQ ID NO: 66876 - DNA, 522 bp, Homo Sapiens; identical to SEQ ID NO: 9393
  misc_feature (337)..(350): n is a, c, g, or t

SEQ ID NO: 66877 - DNA, 735 bp, Homo Sapiens; identical to SEQ ID NO: 9399

SEQ ID NO: 66878 - DNA, 379 bp, Homo Sapiens; identical to SEQ ID NO: 9403

SEQ ID NO: 66879 - DNA, 356 bp, Homo Sapiens; identical to SEQ ID NO: 9405

SEQ ID NO: 66880 - DNA, 671 bp, Homo Sapiens; identical to SEQ ID NO: 9407
  misc_feature (440)..(480): n is a, c, g, or t

SEQ ID NO: 66881 - DNA, 926 bp, Homo Sapiens; identical to SEQ ID NO: 9413

SEQ ID NO: 66882 - DNA, 758 bp, Homo Sapiens; identical to SEQ ID NO: 9421

SEQ ID NO: 66883 - DNA, 766 bp, Homo Sapiens; identical to SEQ ID NO: 9425

SEQ ID NO: 66884 - DNA, 985 bp, Homo Sapiens; identical to SEQ ID NO: 9427
  misc_feature (20)..(20): n is a, c, g, or t
  misc_feature (32)..(32): n is a, c, g, or t
  misc_feature (53)..(53): n is a, c, g, or t
  misc_feature (73)..(73): n is a, c, g, or t
  misc_feature (170)..(170): n is a, c, g, or t

SEQ ID NO: 66885 - DNA, 567 bp, Homo Sapiens; identical to SEQ ID NO: 9428

SEQ ID NO: 66886 - DNA, 355 bp, Homo Sapiens; identical to SEQ ID NO: 9435

SEQ ID NO: 66887 - DNA, 502 bp, Homo Sapiens; identical to SEQ ID NO: 9441

SEQ ID NO: 66888 - DNA, 1008 bp, Homo Sapiens; identical to SEQ ID NO: 9452

SEQ ID NO: 66889 - DNA, 475 bp, Homo Sapiens; identical to SEQ ID NO: 9463

SEQ ID NO: 66890 - DNA, 2040 bp, Homo Sapiens; identical to SEQ ID NO: 9469
  misc_feature (29)..(29): n is a, c, g, or t
  misc_feature (58)..(58): n is a, c, g, or t
  misc_feature (93)..(93): n is a, c, g, or t
  misc_feature (118)..(118): n is a, c, g, or t
  misc_feature (126)..(126): n is a, c, g, or t
  misc_feature (217)..(217): n is a, c, g, or t
  misc_feature (243)..(243): n is a, c, g, or t
  misc_feature (247)..(247): n is a, c, g, or t
  misc_feature (277)..(277): n is a, c, g, or t
  misc_feature (288)..(288): n is a, c, g, or t
  misc_feature (346)..(346): n is a, c, g, or t
  misc_feature (350)..(350): n is a, c, g, or t
  misc_feature (577)..(577): n is a, c, g, or t
  misc_feature (582)..(582): n is a, c, g, or t
  misc_feature (645)..(645): n is a, c, g, or t
  misc_feature (659)..(659): n is a, c, g, or t
  misc_feature (726)..(726): n is a, c, g, or t
  misc_feature (735)..(735): n is a, c, g, or t
  misc_feature (1041)..(1111): n is a, c, g, or t

SEQ ID NO: 66891 - DNA, 368 bp, Homo Sapiens; identical to SEQ ID NO: 9479

SEQ ID NO: 66892 - DNA, 460 bp, Homo Sapiens; identical to SEQ ID NO: 9481

SEQ ID NO: 66893 - DNA, 1155 bp, Homo Sapiens; identical to SEQ ID NO: 9491
  misc_feature (303)..(303): n is a, c, g, or t
  misc_feature (1075)..(1075): n is a, c, g, or t
  misc_feature (1143)..(1143): n is a, c, g, or t

SEQ ID NO: 66894 - DNA, 540 bp, Homo Sapiens; identical to SEQ ID NO: 9500

SEQ ID NO: 66895 - DNA, 487 bp, Homo Sapiens; identical to SEQ ID NO: 9519

SEQ ID NO: 66896 - DNA, 1120 bp, Homo Sapiens; identical to SEQ ID NO: 9536
  misc_feature (43)..(56): n is a, c, g, or t
  misc_feature (98)..(107): n is a, c, g, or t

SEQ ID NO: 66897 - DNA, 442 bp, Homo Sapiens; identical to SEQ ID NO: 9543

SEQ ID NO: 66898 - DNA, 383 bp, Homo Sapiens; identical to SEQ ID NO: 9548

SEQ ID NO: 66899 - DNA, 442 bp, Homo Sapiens; identical to SEQ ID NO: 9554

SEQ ID NO: 66900 - DNA, 547 bp, Homo Sapiens; identical to SEQ ID NO: 9557
  misc_feature (536)..(536): n is a, c, g, or t

SEQ ID NO: 66901 - DNA, 491 bp, Homo Sapiens; identical to SEQ ID NO: 9568
  misc_feature (446)..(446): n is a, c, g, or t
  misc_feature (470)..(470): n is a, c, g, or t

SEQ ID NO: 66902 - DNA, 600 bp, Homo Sapiens; identical to SEQ ID NO: 9573

SEQ ID NO: 66903 - DNA, 673 bp, Homo Sapiens; identical to SEQ ID NO: 9580

SEQ ID NO: 66904 - DNA, 332 bp, Homo Sapiens; identical to SEQ ID NO: 9589

SEQ ID NO: 66905 - DNA, 676 bp, Homo Sapiens; identical to SEQ ID NO: 9590

SEQ ID NO: 66906 - DNA, 513 bp, Homo Sapiens; identical to SEQ ID NO: 9592

SEQ ID NO: 66907 - DNA, 607 bp, Homo Sapiens; identical to SEQ ID NO: 9605

SEQ ID NO: 66908 - DNA, 449 bp, Homo Sapiens; identical to SEQ ID NO: 9616
  misc_feature (47)..(69): n is a, c, g, or t

SEQ ID NO: 66909 - DNA, 653 bp, Homo Sapiens; identical to SEQ ID NO: 9617

SEQ ID NO: 66910 - DNA, 845 bp, Homo Sapiens; identical to SEQ ID NO: 9618
  misc_feature (162)..(162): n is a, c, g, or t

SEQ ID NO: 66911 - DNA, 680 bp, Homo Sapiens; identical to SEQ ID NO: 9620

SEQ ID NO: 66912 - DNA, 273 bp, Homo Sapiens; identical to SEQ ID NO: 9621

SEQ ID NO: 66913 - DNA, 359 bp, Homo Sapiens; identical to SEQ ID NO: 9624

SEQ ID NO: 66914 - DNA, 853 bp, Homo Sapiens; identical to SEQ ID NO: 9625

SEQ ID NO: 66915 - DNA, 383 bp, Homo Sapiens; identical to SEQ ID NO: 9642

SEQ ID NO: 66916 - DNA, 1019 bp, Homo Sapiens; identical to SEQ ID NO: 9651

SEQ ID NO: 66917 - DNA, 1225 bp, Homo Sapiens; identical to SEQ ID NO: 9663
  misc_feature (445)..(445): n is a, c, g, or t

SEQ ID NO: 66918 - DNA, 381 bp, Homo Sapiens; identical to SEQ ID NO: 9682

SEQ ID NO: 66919 - DNA, 546 bp, Homo Sapiens; identical to SEQ ID NO: 9689

SEQ ID NO: 66920 - DNA, 1113 bp, Homo Sapiens; identical to SEQ ID NO: 9696

SEQ ID NO: 66921 - DNA, 301 bp, Homo Sapiens; identical to SEQ ID NO: 9704

SEQ ID NO: 66922 - DNA, 827 bp, Homo Sapiens; identical to SEQ ID NO: 9706
  misc_feature (38)..(38): n is a, c, g, or t

SEQ ID NO: 66923 - DNA, 714 bp, Homo Sapiens; identical to SEQ ID NO: 9709

SEQ ID NO: 66924 - DNA, 386 bp, Homo Sapiens; identical to SEQ ID NO: 9710

SEQ ID NO: 66925 - DNA, 753 bp, Homo Sapiens; identical to SEQ ID NO: 9715

SEQ ID NO: 66926 - DNA, 340 bp, Homo Sapiens; identical to SEQ ID NO: 9716

SEQ ID NO: 66927 - DNA, 442 bp, Homo Sapiens; identical to SEQ ID NO: 9728

SEQ ID NO: 66928 - DNA, 1627 bp, Homo Sapiens; identical to SEQ ID NO: 9734

SEQ ID NO: 66929 - DNA, 467 bp, Homo Sapiens; identical to SEQ ID NO: 9735

SEQ ID NO: 66930 - DNA, 319 bp, Homo Sapiens; identical to SEQ ID NO: 9738

SEQ ID NO: 66931 - DNA, 527 bp, Homo Sapiens; identical to SEQ ID NO: 9741

SEQ ID NO: 66932 - DNA, 1015 bp, Homo Sapiens; identical to SEQ ID NO: 9754
  misc_feature (50)..(200): n is a, c, g, or t

SEQ ID NO: 66933 - DNA, 776 bp, Homo Sapiens; identical to SEQ ID NO: 9761

SEQ ID NO: 66934 - DNA, 1169 bp, Homo Sapiens; identical to SEQ ID NO: 9765
  misc_feature (1132)..(1132): n is a, c, g, or t

SEQ ID NO: 66935 - DNA, 514 bp, Homo Sapiens; identical to SEQ ID NO: 9770
  misc_feature (244)..(311): n is a, c, g, or t

SEQ ID NO: 66936 - DNA, 245 bp, Homo Sapiens; identical to SEQ ID NO: 9771

SEQ ID NO: 66937 - DNA, 658 bp, Homo Sapiens; identical to SEQ ID NO: 9774
  misc_feature (225)..(225): n is a, c, g, or t

SEQ ID NO: 66938 - DNA, 554 bp, Homo Sapiens; identical to SEQ ID NO: 9782

SEQ ID NO: 66939 - DNA, 1149 bp, Homo Sapiens; identical to SEQ ID NO: 9787

SEQ ID NO: 66940 - DNA, 870 bp, Homo Sapiens; identical to SEQ ID NO: 9795
  misc_feature (31)..(31): n is a, c, g, or t
  misc_feature (33)..(33): n is a, c, g, or t
  misc_feature (43)..(43): n is a, c, g, or t

SEQ ID NO: 66941 - DNA, 415 bp, Homo Sapiens; identical to SEQ ID NO: 9811

SEQ ID NO: 66942 - DNA, 290 bp, Homo Sapiens; identical to SEQ ID NO: 9826

SEQ ID NO: 66943 - DNA, 714 bp, Homo Sapiens; identical to SEQ ID NO: 9832

SEQ ID NO: 66944 - DNA, 678 bp, Homo Sapiens; identical to SEQ ID NO: 9857

SEQ ID NO: 66945 - DNA, 647 bp, Homo Sapiens; identical to SEQ ID NO: 9863
  misc_feature (466)..(466): n is a, c, g, or t

SEQ ID NO: 66946 - DNA, 1065 bp, Homo Sapiens; identical to SEQ ID NO: 9867
  misc_feature (765)..(797): n is a, c, g, or t
  misc_feature (843)..(843): n is a, c, g, or t

SEQ ID NO: 66947 - DNA, 906 bp, Homo Sapiens; identical to SEQ ID NO: 9869

SEQ ID NO: 66948 - DNA, 1929 bp, Homo Sapiens; identical to SEQ ID NO: 9873

SEQ ID NO: 66949 - DNA, 1677 bp, Homo Sapiens; identical to SEQ ID NO: 9879
  misc_feature (409)..(409): n is a, c, g, or t
  misc_feature (665)..(674): n is a, c, g, or t

SEQ ID NO: 66950 - DNA, 1165 bp, Homo Sapiens; identical to SEQ ID NO: 9886
  misc_feature (193)..(209): n is a, c, g, or t
  misc_feature (334)..(373): n is a, c, g, or t
  misc_feature (975)..(1038): n is a, c, g, or t

SEQ ID NO: 66951 - DNA, 364 bp, Homo Sapiens; identical to SEQ ID NO: 9896

SEQ ID NO: 66952 - DNA, 535 bp, Homo Sapiens; identical to SEQ ID NO: 9898
  misc_feature (92)..(141): n is a, c, g, or t
  misc_feature (149)..(149): n is a, c, g, or t

SEQ ID NO: 66953 - DNA, 1002 bp, Homo Sapiens; identical to SEQ ID NO: 9907
  misc_feature (121)..(121): n is a, c, g, or t
  misc_feature (876)..(884): n is a, c, g, or t

SEQ ID NO: 66954 - DNA, 914 bp, Homo Sapiens; identical to SEQ ID NO: 9911

SEQ ID NO: 66955 - DNA, 710 bp, Homo Sapiens; identical to SEQ ID NO: 9917

SEQ ID NO: 66956 - DNA, 758 bp, Homo Sapiens; identical to SEQ ID NO: 9920

SEQ ID NO: 66957 - DNA, 670 bp, Homo Sapiens; identical to SEQ ID NO: 9921

SEQ ID NO: 66958 - DNA, 1025 bp, Homo Sapiens; identical to SEQ ID NO: 9922
  misc_feature (26)..(26): n is a, c, g, or t

SEQ ID NO: 66959 - DNA, 792 bp, Homo Sapiens; identical to SEQ ID NO: 9924
  misc_feature (655)..(669): n is a, c, g, or t

SEQ ID NO: 66960 - DNA, 588 bp, Homo Sapiens; identical to SEQ ID NO: 9925
  misc_feature (535)..(535): n is a, c, g, or t

SEQ ID NO: 66961 - DNA, 599 bp, Homo Sapiens; identical to SEQ ID NO: 9926

SEQ ID NO: 66962 - DNA, 804 bp, Homo Sapiens; identical to SEQ ID NO: 9927

SEQ ID NO: 66963 - DNA, 682 bp, Homo Sapiens; identical to SEQ ID NO: 9928

SEQ ID NO: 66964 - DNA, 490 bp, Homo Sapiens; identical to SEQ ID NO: 9929

SEQ ID NO: 66965 - DNA, 966 bp, Homo Sapiens; identical to SEQ ID NO: 9938
  misc_feature (639)..(639): n is a, c, g, or t
  misc_feature (849)..(849): n is a, c, g, or t
  misc_feature (934)..(934): n is a, c, g, or t
  misc_feature (936)..(936): n is a, c, g, or t
  misc_feature (939)..(939): n is a, c, g, or t

SEQ ID NO: 66966 - DNA, 952 bp, Homo Sapiens; identical to SEQ ID NO: 9940
  misc_feature (176)..(176): n is a, c, g, or t
  misc_feature (867)..(867): n is a, c, g, or t
  misc_feature (885)..(885): n is a, c, g, or t
  misc_feature (887)..(887): n is a, c, g, or t
  misc_feature (889)..(889): n is a, c, g, or t
  misc_feature (929)..(929): n is a, c, g, or t

SEQ ID NO: 66967 - DNA, 541 bp, Homo Sapiens; identical to SEQ ID NO: 9949

SEQ ID NO: 66968 - DNA, 676 bp, Homo Sapiens; identical to SEQ ID NO: 9950

SEQ ID NO: 66969 - DNA, 1048 bp, Homo Sapiens; identical to SEQ ID NO: 9954

SEQ ID NO: 66970 - DNA, 593 bp, Homo Sapiens; identical to SEQ ID NO: 9961

SEQ ID NO: 66971 - DNA, 414 bp, Homo Sapiens; identical to SEQ ID NO: 9962
  misc_feature (28)..(28): n is a, c, g, or t
  misc_feature (87)..(87): n is a, c, g, or t

SEQ ID NO: 66972 - DNA, 456 bp, Homo Sapiens; identical to SEQ ID NO: 9963
  misc_feature (348)..(401): n is a, c, g, or t

SEQ ID NO: 66973 - DNA, 170 bp, Homo Sapiens; identical to SEQ ID NO: 9964

SEQ ID NO: 66974 - DNA, 607 bp, Homo Sapiens; identical to SEQ ID NO: 9966
  misc_feature (70)..(70): n is a, c, g, or t
  misc_feature (99)..(99): n is a, c, g, or t

SEQ ID NO: 66975 - DNA, 1033 bp, Homo Sapiens; identical to SEQ ID NO: 9968
  misc_feature (42)..(46): n is a, c, g, or t
  misc_feature (48)..(48): n is a, c, g, or t
  misc_feature (63)..(63): n is a, c, g, or t

SEQ ID NO: 66976 - DNA, 1274 bp, Homo Sapiens; identical to SEQ ID NO: 9972
  misc_feature (70)..(78): n is a, c, g, or t
  misc_feature (381)..(405): n is a, c, g, or t
  misc_feature (694)..(714): n is a, c, g, or t

SEQ ID NO: 66977 - DNA, 1204 bp, Homo Sapiens; identical to SEQ ID NO: 9973

SEQ ID NO: 66978 - DNA, 431 bp, Homo Sapiens; identical to SEQ ID NO: 9978

SEQ ID NO: 66979 - DNA, 1213 bp, Homo Sapiens; identical to SEQ ID NO: 9991
  misc_feature (507)..(557): n is a, c, g, or t
  misc_feature (691)..(786): n is a, c, g, or t
  misc_feature (1106)..(1114): n is a, c, g, or t

SEQ ID NO: 66980 - DNA, 389 bp, Homo Sapiens; identical to SEQ ID NO: 10001

SEQ ID NO: 66981 - DNA, 539 bp, Homo Sapiens; identical to SEQ ID NO: 10003

SEQ ID NO: 66982 - DNA, 822 bp, Homo Sapiens; identical to SEQ ID NO: 10005

SEQ ID NO: 66983 - DNA, 449 bp, Homo Sapiens; identical to SEQ ID NO: 10032

SEQ ID NO: 66984 - DNA, 619 bp, Homo Sapiens; identical to SEQ ID NO: 10039

SEQ ID NO: 66985 - DNA, 355 bp, Homo Sapiens; identical to SEQ ID NO: 10041

SEQ ID NO: 66986 - DNA, 302 bp, Homo Sapiens; identical to SEQ ID NO: 10049

SEQ ID NO: 66987 - DNA, 542 bp, Homo Sapiens; identical to SEQ ID NO: 10051

SEQ ID NO: 66988 - DNA, 872 bp, Homo Sapiens; identical to SEQ ID NO: 10058

SEQ ID NO: 66989 - DNA, 1182 bp, Homo Sapiens; identical to SEQ ID NO: 10062
  misc_feature (125)..(125): n is a, c, g, or t
  misc_feature (615)..(679): n is a, c, g, or t

SEQ ID NO: 66990 - DNA, 449 bp, Homo Sapiens; identical to SEQ ID NO: 10073

SEQ ID NO: 66991 - DNA, 530 bp, Homo Sapiens; identical to SEQ ID NO: 10074

SEQ ID NO: 66992 - DNA, 499 bp, Homo Sapiens; identical to SEQ ID NO: 10079

SEQ ID NO: 66993 - DNA, 486 bp, Homo Sapiens; identical to SEQ ID NO: 10095

SEQ ID NO: 66994 - DNA, 692 bp, Homo Sapiens; identical to SEQ ID NO: 10122

SEQ ID NO: 66995 - DNA, 822 bp, Homo Sapiens; identical to SEQ ID NO: 10135
  misc_feature (392)..(429): n is a, c, g, or t

SEQ ID NO: 66996 - DNA, 457 bp, Homo Sapiens; identical to SEQ ID NO: 10140

SEQ ID NO: 66997 - DNA, 485 bp, Homo Sapiens; identical to SEQ ID NO: 10142
  misc_feature (281)..(366): n is a, c, g, or t

SEQ ID NO: 66998 - DNA, 1712 bp, Homo Sapiens; identical to SEQ ID NO: 10143
  misc_feature (103)..(103): n is a, c, g, or t
  misc_feature (166)..(166): n is a, c, g, or t
  misc_feature (213)..(213): n is a, c, g, or t
  misc_feature (630)..(630): n is a, c, g, or t
  misc_feature (1270)..(1270): n is a, c, g, or t

SEQ ID NO: 66999 - DNA, 781 bp, Homo Sapiens; identical to SEQ ID NO: 10146
  misc_feature (222)..(232): n is a, c, g, or t
  misc_feature (546)..(546): n is a, c, g, or t

SEQ ID NO: 67000 - DNA, 352 bp, Homo Sapiens; identical to SEQ ID NO: 10166

SEQ ID NO: 67001 - DNA, 161 bp, Homo Sapiens; identical to SEQ ID NO: 10181

SEQ ID NO: 67002 - DNA, 633 bp, Homo Sapiens; identical to SEQ ID NO: 10204

SEQ ID NO: 67003 - DNA, 1753 bp, Homo Sapiens; identical to SEQ ID NO: 10214
  misc_feature (27)..(27): n is a, c, g, or t
  misc_feature (198)..(198): n is a, c, g, or t
  misc_feature (480)..(754): n is a, c, g, or t
  misc_feature (893)..(935): n is a, c, g, or t
  misc_feature (943)..(956): n is a, c, g, or t
  misc_feature (1229)..(1238): n is a, c, g, or t

SEQ ID NO: 67004 - DNA, 287 bp, Homo Sapiens; identical to SEQ ID NO: 10217

SEQ ID NO: 67005 - DNA, 453 bp, Homo Sapiens; identical to SEQ ID NO: 10219

SEQ ID NO: 67006 - DNA, 464 bp, Homo Sapiens; identical to SEQ ID NO: 10224
  misc_feature (158)..(420): n is a, c, g, or t

SEQ ID NO: 67007 - DNA, 394 bp, Homo Sapiens; identical to SEQ ID NO: 10225

SEQ ID NO: 67008 - DNA, 446 bp, Homo Sapiens; identical to SEQ ID NO: 10239

SEQ ID NO: 67009 - DNA, 370 bp, Homo Sapiens; identical to SEQ ID NO: 10242

SEQ ID NO: 67010 - DNA, 359 bp, Homo Sapiens; identical to SEQ ID NO: 10244

SEQ ID NO: 67011 - DNA, 1078 bp, Homo Sapiens; identical to SEQ ID NO: 10245

SEQ ID NO: 67012 - DNA, 691 bp, Homo Sapiens; identical to SEQ ID NO: 10250
  misc_feature (46)..(60): n is a, c, g, or t
  misc_feature (669)..(669): n is a, c, g, or t

SEQ ID NO: 67013 - DNA, 447 bp, Homo Sapiens; identical to SEQ ID NO: 10256

SEQ ID NO: 67014 - DNA, 617 bp, Homo Sapiens; identical to SEQ ID NO: 10262
  misc_feature (246)..(256): n is a, c, g, or t

SEQ ID NO: 67015 - DNA, 546 bp, Homo Sapiens; identical to SEQ ID NO: 10271

SEQ ID NO: 67016 - DNA, 198 bp, Homo Sapiens; identical to SEQ ID NO: 10277

SEQ ID NO: 67017 - DNA, 1083 bp, Homo Sapiens; identical to SEQ ID NO: 10290

SEQ ID NO: 67018 - DNA, 345 bp, Homo Sapiens; identical to SEQ ID NO: 10292

SEQ ID NO: 67019 - DNA, 484 bp, Homo Sapiens; identical to SEQ ID NO: 10295

SEQ ID NO: 67020 - DNA, 309 bp, Homo Sapiens; identical to SEQ ID NO: 10298

SEQ ID NO: 67021 - DNA, 452 bp, Homo Sapiens; identical to SEQ ID NO: 10305

SEQ ID NO: 67022 - DNA, 257 bp, Homo Sapiens; identical to SEQ ID NO: 10309

SEQ ID NO: 67023 - DNA, 339 bp, Homo Sapiens; identical to SEQ ID NO: 10310
  misc_feature (214)..(228): n is a, c, g, or t

SEQ ID NO: 67024 - DNA, 366 bp, Homo Sapiens; identical to SEQ ID NO: 10312

SEQ ID NO: 67025 - DNA, 227 bp, Homo Sapiens; identical to SEQ ID NO: 10333

SEQ ID NO: 67026 - DNA, 566 bp, Homo Sapiens; identical to SEQ ID NO: 10336
  misc_feature (73)..(81): n is a, c, g, or t
  misc_feature (272)..(301): n is a, c, g, or t

SEQ ID NO: 67027 - DNA, 735 bp, Homo Sapiens; identical to SEQ ID NO: 10359

SEQ ID NO: 67028 - DNA, 438 bp, Homo Sapiens; identical to SEQ ID NO: 10372

SEQ ID NO: 67029 - DNA, 396 bp, Homo Sapiens; identical to SEQ ID NO: 10380

SEQ ID NO: 67030 - DNA, 816 bp, Homo Sapiens; identical to SEQ ID NO: 10384
  misc_feature (203)..(203): n is a, c, g, or t

SEQ ID NO: 67031 - DNA, 268 bp, Homo Sapiens; identical to SEQ ID NO: 10401

SEQ ID NO: 67032 - DNA, 294 bp, Homo Sapiens; identical to SEQ ID NO: 10409

SEQ ID NO: 67033 - DNA, 513 bp, Homo Sapiens; identical to SEQ ID NO: 10410

SEQ ID NO: 67034 - DNA, 899 bp, Homo Sapiens; identical to SEQ ID NO: 10423

SEQ ID NO: 67035 - DNA, 990 bp, Homo Sapiens; identical to SEQ ID NO: 10425
  misc_feature (180)..(188): n is a, c, g, or t
  misc_feature (764)..(764): n is a, c, g, or t

SEQ ID NO: 67036 - DNA, 817 bp, Homo Sapiens; identical to SEQ ID NO: 10427
  misc_feature (145)..(145): n is a, c, g, or t

SEQ ID NO: 67037 - DNA, 521 bp, Homo Sapiens; identical to SEQ ID NO: 10432

SEQ ID NO: 67038 - DNA, 467 bp, Homo Sapiens; identical to SEQ ID NO: 10456

SEQ ID NO: 67039 - DNA, 237 bp, Homo Sapiens; identical to SEQ ID NO: 10458

SEQ ID NO: 67040 - DNA, 235 bp, Homo Sapiens; identical to SEQ ID NO: 10462

SEQ ID NO: 67041 - DNA, 457 bp, Homo Sapiens; identical to SEQ ID NO: 10463

SEQ ID NO: 67042 - DNA, 563 bp, Homo Sapiens; identical to SEQ ID NO: 10511

SEQ ID NO: 67043 - DNA, 580 bp, Homo Sapiens; identical to SEQ ID NO: 10514
  misc_feature (452)..(496): n is a, c, g, or t

SEQ ID NO: 67044 - DNA, 549 bp, Homo Sapiens; identical to SEQ ID NO: 10517

SEQ ID NO: 67045 - DNA, 596 bp, Homo Sapiens; identical to SEQ ID NO: 10524

SEQ ID NO: 67046 - DNA, 1734 bp, Homo Sapiens; identical to SEQ ID NO: 10530
  misc_feature (86)..(126): n is a, c, g, or t
  misc_feature (840)..(840): n is a, c, g, or t
  misc_feature (1039)..(1062): n is a, c, g, or t
  misc_feature (1511)..(1533): n is a, c, g, or t
  misc_feature (1535)..(1537): n is a, c, g, or t

SEQ ID NO: 67047 - DNA, 192 bp, Homo Sapiens; identical to SEQ ID NO: 10533

SEQ ID NO: 67048 - DNA, 1344 bp, Homo Sapiens; identical to SEQ ID NO: 10536
  misc_feature (1035)..(1240): n is a, c, g, or t

SEQ ID NO: 67049 - DNA, 486 bp, Homo Sapiens; identical to SEQ ID NO: 10537

SEQ ID NO: 67050 - DNA, 1214 bp, Homo Sapiens; identical to SEQ ID NO: 10557

SEQ ID NO: 67051 - DNA, 1340 bp, Homo Sapiens; identical to SEQ ID NO: 10558

SEQ ID NO: 67052 - DNA, 326 bp, Homo Sapiens; identical to SEQ ID NO: 10573

SEQ ID NO: 67053 - DNA, 254 bp, Homo Sapiens; identical to SEQ ID NO: 10575

SEQ ID NO: 67054 - DNA, 565 bp, Homo Sapiens; identical to SEQ ID NO: 10580

SEQ ID NO: 67055 - DNA, 533 bp, Homo Sapiens; identical to SEQ ID NO: 10584

SEQ ID NO: 67056 - DNA, 1826 bp, Homo Sapiens; identical to SEQ ID NO: 10592

SEQ ID NO: 67057 - DNA, 822 bp, Homo Sapiens; identical to SEQ ID NO: 10601

SEQ ID NO: 67058 - DNA, 496 bp, Homo Sapiens; identical to SEQ ID NO: 10607

SEQ ID NO: 67059 - DNA, 365 bp, Homo Sapiens; identical to SEQ ID NO: 10615

SEQ ID NO: 67060 - DNA, 394 bp, Homo Sapiens; identical to SEQ ID NO: 10624

SEQ ID NO: 67061 - DNA, 500 bp, Homo Sapiens; identical to SEQ ID NO: 10630

SEQ ID NO: 67062 - DNA, 344 bp, Homo Sapiens; identical to SEQ ID NO: 10631

SEQ ID NO: 67063 - DNA, 350 bp, Homo Sapiens; identical to SEQ ID NO: 10640

SEQ ID NO: 67064 - DNA, 578 bp, Homo Sapiens; identical to SEQ ID NO: 10642

SEQ ID NO: 67065 - DNA, 560 bp, Homo Sapiens; identical to SEQ ID NO: 10643

SEQ ID NO: 67066 - DNA, 407 bp, Homo Sapiens; identical to SEQ ID NO: 10649

SEQ ID NO: 67067 - DNA, 586 bp, Homo Sapiens; identical to SEQ ID NO: 10668

SEQ ID NO: 67068 - DNA, 942 bp, Homo Sapiens; identical to SEQ ID NO: 10669

SEQ ID NO: 67069 - DNA, 1281 bp, Homo Sapiens; identical to SEQ ID NO: 10679

SEQ ID NO: 67070 - DNA, 519 bp, Homo Sapiens; identical to SEQ ID NO: 10681

SEQ ID NO: 67071 - DNA, 238 bp, Homo Sapiens; identical to SEQ ID NO: 10684

SEQ ID NO: 67072 - DNA, 378 bp, Homo Sapiens; identical to SEQ ID NO: 10687

SEQ ID NO: 67073 - DNA, 409 bp, Homo Sapiens; identical to SEQ ID NO: 10691
  misc_feature (295)..(348): n is a, c, g, or t
  misc_feature (351)..(351): n is a, c, g, or t

SEQ ID NO: 67074 - DNA, 504 bp, Homo Sapiens; identical to SEQ ID NO: 10694

SEQ ID NO: 67075 - DNA, 588 bp, Homo Sapiens; identical to SEQ ID NO: 10696

SEQ ID NO: 67076 - DNA, 597 bp, Homo Sapiens; identical to SEQ ID NO: 10705
  misc_feature (533)..(541): n is a, c, g, or t

SEQ ID NO: 67077 - DNA, 797 bp, Homo Sapiens; identical to SEQ ID NO: 10720

SEQ ID NO: 67078 - DNA, 779 bp, Homo Sapiens; identical to SEQ ID NO: 10722

SEQ ID NO: 67079 - DNA, 530 bp, Homo Sapiens; identical to SEQ ID NO: 10727

SEQ ID NO: 67080 - DNA, 435 bp, Homo Sapiens; identical to SEQ ID NO: 10740

SEQ ID NO: 67081 - DNA, 728 bp, Homo Sapiens; identical to SEQ ID NO: 10746

SEQ ID NO: 67082 - DNA, 166 bp, Homo Sapiens; identical to SEQ ID NO: 10748

SEQ ID NO: 67083 - DNA, 644 bp, Homo Sapiens; identical to SEQ ID NO: 10750

SEQ ID NO: 67084 - DNA, 347 bp, Homo Sapiens; identical to SEQ ID NO: 10755

SEQ ID NO: 67085 - DNA, 553 bp, Homo Sapiens; identical to SEQ ID NO: 10762

SEQ ID NO: 67086 - DNA, 192 bp, Homo Sapiens; identical to SEQ ID NO: 10797

SEQ ID NO: 67087 - DNA, 434 bp, Homo Sapiens; identical to SEQ ID NO: 10799

SEQ ID NO: 67088 - DNA, 498 bp, Homo Sapiens; identical to SEQ ID NO: 10812
  misc_feature (441)..(441): n is a, c, g, or t

SEQ ID NO: 67089 - DNA, 458 bp, Homo Sapiens; identical to SEQ ID NO: 10813

SEQ ID NO: 67090 - DNA, 592 bp, Homo Sapiens; identical to SEQ ID NO: 10825
  misc_feature (265)..(265): n is a, c, g, or t

SEQ ID NO: 67091 - DNA, 471 bp, Homo Sapiens; identical to SEQ ID NO: 10826

SEQ ID NO: 67092 - DNA, 600 bp, Homo Sapiens; identical to SEQ ID NO: 10831
  misc_feature (464)..(464): n is a, c, g, or t
  misc_feature (547)..(547): n is a, c, g, or t
  misc_feature (561)..(562): n is a, c, g, or t

SEQ ID NO: 67093 - DNA, 464 bp, Homo Sapiens; identical to SEQ ID NO: 10832

SEQ ID NO: 67094 - DNA, 630 bp, Homo Sapiens; identical to SEQ ID NO: 10841

SEQ ID NO: 67095 - DNA, 616 bp, Homo Sapiens; identical to SEQ ID NO: 10842

SEQ ID NO: 67096 - DNA, 868 bp, Homo Sapiens; identical to SEQ ID NO: 10855
  misc_feature (17)..(17): n is a, c, g, or t
  misc_feature (225)..(225): n is a, c, g, or t

SEQ ID NO: 67097 - DNA, 887 bp, Homo Sapiens; identical to SEQ ID NO: 10860

SEQ ID NO: 67098 - DNA, 1032 bp, Homo Sapiens; identical to SEQ ID NO: 10874
  misc_feature (54)..(54): n is a, c, g, or t

SEQ ID NO: 67099 - DNA, 287 bp, Homo Sapiens; identical to SEQ ID NO: 10875

SEQ ID NO: 67100 - DNA, 447 bp, Homo Sapiens; identical to SEQ ID NO: 10889

SEQ ID NO: 67101 - DNA, 794 bp, Homo Sapiens; identical to SEQ ID NO: 10892
  misc_feature (47)..(47): n is a, c, g, or t

SEQ ID NO: 67102 - DNA, 1237 bp, Homo Sapiens; identical to SEQ ID NO: 10894

SEQ ID NO: 67103 - DNA, 382 bp, Homo Sapiens; identical to SEQ ID NO: 10898

SEQ ID NO: 67104 - DNA, 1037 bp, Homo Sapiens; identical to SEQ ID NO: 10906

SEQ ID NO: 67105 - DNA, 395 bp, Homo Sapiens; identical to SEQ ID NO: 10909

SEQ ID NO: 67106 - DNA, 828 bp, Homo Sapiens; identical to SEQ ID NO: 10913

SEQ ID NO: 67107 - DNA, 752 bp, Homo Sapiens; identical to SEQ ID NO: 10914

SEQ ID NO: 67108 - DNA, 260 bp, Homo Sapiens; identical to SEQ ID NO: 10915

SEQ ID NO: 67109 - DNA, 506 bp, Homo Sapiens; identical to SEQ ID NO: 10917
  misc_feature (152)..(152): n is a, c, g, or t

SEQ ID NO: 67110 - DNA, 1138 bp, Homo Sapiens; identical to SEQ ID NO: 10918
  misc_feature (264)..(264): n is a, c, g, or t

SEQ ID NO: 67111 - DNA, 385 bp, Homo Sapiens; identical to SEQ ID NO: 10927
  misc_feature (230)..(288): n is a, c, g, or t

SEQ ID NO: 67112 - DNA, 271 bp, Homo Sapiens; identical to SEQ ID NO: 10936

SEQ ID NO: 67113 - DNA, 423 bp, Homo Sapiens; identical to SEQ ID NO: 10938

SEQ ID NO: 67114 - DNA, 593 bp, Homo Sapiens; identical to SEQ ID NO: 10947
  misc_feature (484)..(484): n is a, c, g, or t
  misc_feature (525)..(525): n is a, c, g, or t

SEQ ID NO: 67115 - DNA, 564 bp, Homo Sapiens; identical to SEQ ID NO: 10953

SEQ ID NO: 67116 - DNA, 606 bp, Homo Sapiens; identical to SEQ ID NO: 10955

SEQ ID NO: 67117 - DNA, 628 bp, Homo Sapiens; identical to SEQ ID NO: 10956
  misc_feature (34)..(34): n is a, c, g, or t

SEQ ID NO: 67118 - DNA, 840 bp, Homo Sapiens; identical to SEQ ID NO: 10957
  misc_feature (191)..(202): n is a, c, g, or t

SEQ ID NO: 67119 - DNA, 461 bp, Homo Sapiens; identical to SEQ ID NO: 10961

SEQ ID NO: 67120 - DNA, 466 bp, Homo Sapiens; identical to SEQ ID NO: 10965

SEQ ID NO: 67121 - DNA, 1045 bp, Homo Sapiens; identical to SEQ ID NO: 10972
  misc_feature (148)..(148): n is a, c, g, or t

SEQ ID NO: 67122 - DNA, 842 bp, Homo Sapiens; identical to SEQ ID NO: 10974

SEQ ID NO: 67123 - DNA, 777 bp, Homo Sapiens; identical to SEQ ID NO: 10977

SEQ ID NO: 67124 - DNA, 284 bp, Homo Sapiens; identical to SEQ ID NO: 10985

SEQ ID NO: 67125 - DNA, 283 bp, Homo Sapiens; identical to SEQ ID NO: 10986

SEQ ID NO: 67126 - DNA, 417 bp, Homo Sapiens; identical to SEQ ID NO: 10990

SEQ ID NO: 67127 - DNA, 717 bp, Homo Sapiens; identical to SEQ ID NO: 10991

SEQ ID NO: 67128 - DNA, 450 bp, Homo Sapiens; identical to SEQ ID NO: 10992

SEQ ID NO: 67129 - DNA, 292 bp, Homo Sapiens; identical to SEQ ID NO: 10995

SEQ ID NO: 67130 - DNA, 839 bp, Homo Sapiens; identical to SEQ ID NO: 10997

SEQ ID NO: 67131 - DNA, 984 bp, Homo Sapiens; identical to SEQ ID NO: 11003

SEQ ID NO: 67132 - DNA, 305 bp, Homo Sapiens; identical to SEQ ID NO: 11005

SEQ ID NO: 67133 - DNA, 963 bp, Homo Sapiens; identical to SEQ ID NO: 11018
  misc_feature (940)..(940): n is a, c, g, or t

SEQ ID NO: 67134 - DNA, 1145 bp, Homo Sapiens; identical to SEQ ID NO: 11028

SEQ ID NO: 67135 - DNA, 888 bp, Homo Sapiens; identical to SEQ ID NO: 11034
  misc_feature (176)..(176): n is a, c, g, or t

SEQ ID NO: 67136 - DNA, 1439 bp, Homo Sapiens; identical to SEQ ID NO: 11058

SEQ ID NO: 67137 - DNA, 842 bp, Homo Sapiens; identical to SEQ ID NO: 11061

SEQ ID NO: 67138 - DNA, 336 bp, Homo Sapiens; identical to SEQ ID NO: 11068

SEQ ID NO: 67139 - DNA, 428 bp, Homo Sapiens; identical to SEQ ID NO: 11070

SEQ ID NO: 67140 - DNA, 510 bp, Homo Sapiens; identical to SEQ ID NO: 11072

SEQ ID NO: 67141 - DNA, 1004 bp, Homo Sapiens; identical to SEQ ID NO: 11076
  misc_feature (139)..(139): n is a, c, g, or t
  misc_feature (403)..(418): n is a, c, g, or t

SEQ ID NO: 67142 - DNA, 1212 bp, Homo Sapiens; identical to SEQ ID NO: 11081
  misc_feature (121)..(163): n is a, c, g, or t

SEQ ID NO: 67143 - DNA, 997 bp, Homo Sapiens; identical to SEQ ID NO: 11083
  misc_feature (405)..(413): n is a, c, g, or t

SEQ ID NO: 67144 - DNA, 945 bp, Homo Sapiens; identical to SEQ ID NO: 11087

SEQ ID NO: 67145 - DNA, 560 bp, Homo Sapiens; identical to SEQ ID NO: 11089

SEQ ID NO: 67146 - DNA, 979 bp, Homo Sapiens; identical to SEQ ID NO: 11090
  misc_feature (239)..(248): n is a, c, g, or t
  misc_feature (266)..(329): n is a, c, g, or t
  misc_feature (550)..(550): n is a, c, g, or t

SEQ ID NO: 67147 - DNA, 426 bp, Homo Sapiens; identical to SEQ ID NO: 11101

SEQ ID NO: 67148 - DNA, 447 bp, Homo Sapiens; identical to SEQ ID NO: 11111
  misc_feature (160)..(171): n is a, c, g, or t

SEQ ID NO: 67149 - DNA, 564 bp, Homo Sapiens; identical to SEQ ID NO: 11143

SEQ ID NO: 67150 - DNA, 696 bp, Homo Sapiens; identical to SEQ ID NO: 11146
  misc_feature (633)..(633): n is a, c, g, or t

SEQ ID NO: 67151 - DNA, 836 bp, Homo Sapiens; identical to SEQ ID NO: 11148

SEQ ID NO: 67152 - DNA, 510 bp, Homo Sapiens; identical to SEQ ID NO: 11153

SEQ ID NO: 67153 - DNA, 813 bp, Homo Sapiens; identical to SEQ ID NO: 11176

SEQ ID NO: 67154 - DNA, 1219 bp, Homo Sapiens; identical to SEQ ID NO: 11198

SEQ ID NO: 67155 - DNA, 1085 bp, Homo Sapiens; identical to SEQ ID NO: 11200

SEQ ID NO: 67156 - DNA, 514 bp, Homo Sapiens; identical to SEQ ID NO: 11206

SEQ ID NO: 67157 - DNA, 477 bp, Homo Sapiens; identical to SEQ ID NO: 11207

SEQ ID NO: 67158 - DNA, 613 bp, Homo Sapiens; identical to SEQ ID NO: 11211
  misc_feature (577)..(577): n is a, c, g, or t

SEQ ID NO: 67159 - DNA, 683 bp, Homo Sapiens; identical to SEQ ID NO: 11226

SEQ ID NO: 67160 - DNA, 700 bp, Homo Sapiens; identical to SEQ ID NO: 11227
  misc_feature (598)..(598): n is a, c, g, or t

SEQ ID NO: 67161 - DNA, 904 bp, Homo Sapiens; identical to SEQ ID NO: 11228
  misc_feature (337)..(345): n is a, c, g, or t
  misc_feature (461)..(473): n is a, c, g, or t
  misc_feature (604)..(650): n is a, c, g, or t
  misc_feature (850)..(850): n is a, c, g, or t

SEQ ID NO: 67162 - DNA, 691 bp, Homo Sapiens; identical to SEQ ID NO: 11231

SEQ ID NO: 67163 - DNA, 583 bp, Homo Sapiens; identical to SEQ ID NO: 11244

SEQ ID NO: 67164 - DNA, 882 bp, Homo Sapiens; identical to SEQ ID NO: 11274

SEQ ID NO: 67165 - DNA, 521 bp, Homo Sapiens; identical to SEQ ID NO: 11276

SEQ ID NO: 67166 - DNA, 428 bp, Homo Sapiens; identical to SEQ ID NO: 11288

SEQ ID NO: 67167 - DNA, 529 bp, Homo Sapiens; identical to SEQ ID NO: 11289
  misc_feature (44)..(56): n is a, c, g, or t
  misc_feature (59)..(320): n is a, c, g, or t

SEQ ID NO: 67168 - DNA, 450 bp, Homo Sapiens; identical to SEQ ID NO: 11301

SEQ ID NO: 67169 - DNA, 941 bp, Homo Sapiens; identical to SEQ ID NO: 11305

SEQ ID NO: 67170 - DNA, 440 bp, Homo Sapiens; identical to SEQ ID NO: 11307

SEQ ID NO: 67171 - DNA, 533 bp, Homo Sapiens; identical to SEQ ID NO: 11318

SEQ ID NO: 67172 - DNA, 518 bp, Homo Sapiens; identical to SEQ ID NO: 11323
  misc_feature (32)..(32): n is a, c, g, or t
  misc_feature (39)..(39): n is a, c, g, or t
  misc_feature (114)..(114): n is a, c, g, or t

SEQ ID NO: 67173 - DNA, 386 bp, Homo Sapiens; identical to SEQ ID NO: 11329

SEQ ID NO: 67174 - DNA, 1219 bp, Homo Sapiens; identical to SEQ ID NO: 11346
  misc_feature (1182)..(1182): n is a, c, g, or t

SEQ ID NO: 67175 - DNA, 924 bp, Homo Sapiens; identical to SEQ ID NO: 11355

SEQ ID NO: 67176 - DNA, 446 bp, Homo Sapiens; identical to SEQ ID NO: 11359
  misc_feature (224)..(224): n is a, c, g, or t
  misc_feature (274)..(274): n is a, c, g, or t
  misc_feature (430)..(430): n is a, c, g, or t

SEQ ID NO: 67177 - DNA, 582 bp, Homo Sapiens; identical to SEQ ID NO: 11369
  misc_feature (424)..(424): n is a, c, g, or t

SEQ ID NO: 67178 - DNA, 587 bp, Homo Sapiens; identical to SEQ ID NO: 11371

SEQ ID NO: 67179 - DNA, 439 bp, Homo Sapiens; identical to SEQ ID NO: 11375

SEQ ID NO: 67180 - DNA, 730 bp, Homo Sapiens; identical to SEQ ID NO: 11388
  misc_feature (124)..(124): n is a, c, g, or t
  misc_feature (143)..(143): n is a, c, g, or t
  misc_feature (153)..(153): n is a, c, g, or t

SEQ ID NO: 67181 - DNA, 590 bp, Homo Sapiens; identical to SEQ ID NO: 11390

SEQ ID NO: 67182 - DNA, 425 bp, Homo Sapiens; identical to SEQ ID NO: 11391

SEQ ID NO: 67183 - DNA, 636 bp, Homo Sapiens; identical to SEQ ID NO: 11396
  misc_feature (564)..(564): n is a, c, g, or t

SEQ ID NO: 67184 - DNA, 896 bp, Homo Sapiens; identical to SEQ ID NO: 11412

SEQ ID NO: 67185 - DNA, 868 bp, Homo Sapiens; identical to SEQ ID NO: 11416

SEQ ID NO: 67186 - DNA, 639 bp, Homo Sapiens; identical to SEQ ID NO: 11417

SEQ ID NO: 67187 - DNA, 1011 bp, Homo Sapiens; identical to SEQ ID NO: 11421
  misc_feature (374)..(421): n is a, c, g, or t

SEQ ID NO: 67188 - DNA, 382 bp, Homo Sapiens; identical to SEQ ID NO: 11424
  misc_feature (103)..(103): n is a, c, g, or t

SEQ ID NO: 67189 - DNA, 732 bp, Homo Sapiens; identical to SEQ ID NO: 11427
  misc_feature (637)..(637): n is a, c, g, or t

SEQ ID NO: 67190 - DNA, 424 bp, Homo Sapiens; identical to SEQ ID NO: 11429

SEQ ID NO: 67191 - DNA, 470 bp, Homo Sapiens; identical to SEQ ID NO: 11432
  misc_feature (229)..(230): n is a, c, g, or t

SEQ ID NO: 67192 - DNA, 456 bp, Homo Sapiens; identical to SEQ ID NO: 11435

SEQ ID NO: 67193 - DNA, 636 bp, Homo Sapiens; identical to SEQ ID NO: 11443

SEQ ID NO: 67194 - DNA, 464 bp, Homo Sapiens; identical to SEQ ID NO: 11444

SEQ ID NO: 67195 - DNA, 410 bp, Homo Sapiens; identical to SEQ ID NO: 11453

SEQ ID NO: 67196 - DNA, 510 bp, Homo Sapiens; identical to SEQ ID NO: 11463

SEQ ID NO: 67197 - DNA, 436 bp, Homo Sapiens; identical to SEQ ID NO: 11485

SEQ ID NO: 67198 - DNA, 369 bp, Homo Sapiens; identical to SEQ ID NO: 11489

SEQ ID NO: 67199 - DNA, 804 bp, Homo Sapiens; identical to SEQ ID NO: 11496

SEQ ID NO: 67200 - DNA, 694 bp, Homo Sapiens; identical to SEQ ID NO: 11501

SEQ ID NO: 67201 - DNA, 544 bp, Homo Sapiens; identical to SEQ ID NO: 11517

SEQ ID NO: 67202 - DNA, 323 bp, Homo Sapiens; identical to SEQ ID NO: 11539

SEQ ID NO: 67203 - DNA, 654 bp, Homo Sapiens; identical to SEQ ID NO: 11547

SEQ ID NO: 67204 - DNA, 802 bp, Homo Sapiens; identical to SEQ ID NO: 11554

SEQ ID NO: 67205 - DNA, 511 bp, Homo Sapiens; identical to SEQ ID NO: 11556
  misc_feature (413)..(413): n is a, c, g, or t
  misc_feature (425)..(425): n is a, c, g, or t

SEQ ID NO: 67206 - DNA, 424 bp, Homo Sapiens; identical to SEQ ID NO: 11566

SEQ ID NO: 67207 - DNA, 326 bp, Homo Sapiens; identical to SEQ ID NO: 11570

SEQ ID NO: 67208 - DNA, 667 bp, Homo Sapiens; identical to SEQ ID NO: 11571
  misc_feature (439)..(439): n is a, c, g, or t

SEQ ID NO: 67209 - DNA, 506 bp, Homo Sapiens; identical to SEQ ID NO: 11572

SEQ ID NO: 67210 - DNA, 440 bp, Homo Sapiens; identical to SEQ ID NO: 11593

SEQ ID NO: 67211 - DNA, 452 bp, Homo Sapiens; identical to SEQ ID NO: 11600

SEQ ID NO: 67212 - DNA, 521 bp, Homo Sapiens; identical to SEQ ID NO: 11602

SEQ ID NO: 67213 - DNA, 235 bp, Homo Sapiens; identical to SEQ ID NO: 11611

SEQ ID NO: 67214 - DNA, 582 bp, Homo Sapiens; identical to SEQ ID NO: 11615

SEQ ID NO: 67215 - DNA, 456 bp, Homo Sapiens; identical to SEQ ID NO: 11618

SEQ ID NO: 67216 - DNA, 485 bp, Homo Sapiens; identical to SEQ ID NO: 11619

SEQ ID NO: 67217 - DNA, 653 bp, Homo Sapiens; identical to SEQ ID NO: 11621

SEQ ID NO: 67218 - DNA, 868 bp, Homo Sapiens; identical to SEQ ID NO: 11622

SEQ ID NO: 67219 - DNA, 800 bp, Homo Sapiens; identical to SEQ ID NO: 11623

SEQ ID NO: 67220 - DNA, 203 bp, Homo Sapiens; identical to SEQ ID NO: 11631

SEQ ID NO: 67221 - DNA, 674 bp, Homo Sapiens; identical to SEQ ID NO: 11632

SEQ ID NO: 67222 - DNA, 866 bp, Homo Sapiens; identical to SEQ ID NO: 11634

SEQ ID NO: 67223 - DNA, 525 bp, Homo Sapiens; identical to SEQ ID NO: 11643
  misc_feature (470)..(470): n is a, c, g, or t

SEQ ID NO: 67224 - DNA, 419 bp, Homo Sapiens; identical to SEQ ID NO: 11644

SEQ ID NO: 67225 - DNA, 858 bp, Homo Sapiens; identical to SEQ ID NO: 11649

SEQ ID NO: 67226 - DNA, 754 bp, Homo Sapiens; identical to SEQ ID NO: 11651

SEQ ID NO: 67227 - DNA, 417 bp, Homo Sapiens; identical to SEQ ID NO: 11655

SEQ ID NO: 67228 - DNA, 427 bp, Homo Sapiens; identical to SEQ ID NO: 11685
  misc_feature (208)..(208): n is a, c, g, or t

SEQ ID NO: 67229 - DNA, 255 bp, Homo Sapiens; identical to SEQ ID NO: 11696

SEQ ID NO: 67230 - DNA, 629 bp, Homo Sapiens; identical to SEQ ID NO: 11699

SEQ ID NO: 67231 - DNA, 308 bp, Homo Sapiens; identical to SEQ ID NO: 11717

SEQ ID NO: 67232 - DNA, 479 bp, Homo Sapiens; identical to SEQ ID NO: 11718

SEQ ID NO: 67233 - DNA, 370 bp, Homo Sapiens; identical to SEQ ID NO: 11721

SEQ ID NO: 67234 - DNA, 264 bp, Homo Sapiens; identical to SEQ ID NO: 11722

SEQ ID NO: 67235 - DNA, 495 bp, Homo Sapiens; identical to SEQ ID NO: 11723

SEQ ID NO: 67236 - DNA, 536 bp, Homo Sapiens; identical to SEQ ID NO: 11729
  misc_feature (120)..(147): n is a, c, g, or t

SEQ ID NO: 67237 - DNA, 786 bp, Homo Sapiens; identical to SEQ ID NO: 11738

SEQ ID NO: 67238 - DNA, 487 bp, Homo Sapiens; identical to SEQ ID NO: 11741

SEQ ID NO: 67239 - DNA, 456 bp, Homo Sapiens; identical to SEQ ID NO: 11744

SEQ ID NO: 67240 - DNA, 458 bp, Homo Sapiens; identical to SEQ ID NO: 11766

SEQ ID NO: 67241 - DNA, 1160 bp, Homo Sapiens; identical to SEQ ID NO: 11778

SEQ ID NO: 67242 - DNA, 647 bp, Homo Sapiens; identical to SEQ ID NO: 11782

SEQ ID NO: 67243 - DNA, 690 bp, Homo Sapiens; identical to SEQ ID NO: 11784
  misc_feature (350)..(350): n is a, c, g, or t

SEQ ID NO: 67244 - DNA, 467 bp, Homo Sapiens; identical to SEQ ID NO: 11785

SEQ ID NO: 67245 - DNA, 433 bp, Homo Sapiens; identical to SEQ ID NO: 11811

SEQ ID NO: 67246 - DNA, 387 bp, Homo Sapiens; identical to SEQ ID NO: 11827
  misc_feature (60)..(76): n is a, c, g, or t

SEQ ID NO: 67247 - DNA, 458 bp, Homo Sapiens; identical to SEQ ID NO: 11841

SEQ ID NO: 67248 - DNA, 401 bp, Homo Sapiens; identical to SEQ ID NO: 11843

SEQ ID NO: 67249 - DNA, 526 bp, Homo Sapiens; identical to SEQ ID NO: 11852

SEQ ID NO: 67250 - DNA, 589 bp, Homo Sapiens; identical to SEQ ID NO: 11864

SEQ ID NO: 67251 - DNA, 497 bp, Homo Sapiens; identical to SEQ ID NO: 11865

SEQ ID NO: 67252 - DNA, 139 bp, Homo Sapiens; identical to SEQ ID NO: 11873

SEQ ID NO: 67253 - DNA, 380 bp, Homo Sapiens; identical to SEQ ID NO: 11881

SEQ ID NO: 67254 - DNA, 903 bp, Homo Sapiens; identical to SEQ ID NO: 11884

SEQ ID NO: 67255 - DNA, 521 bp, Homo Sapiens; identical to SEQ ID NO: 11901
  misc_feature (23)..(23): n is a, c, g, or t
  misc_feature (112)..(112): n is a, c, g, or t
  misc_feature (131)..(131): n is a, c, g, or t
  misc_feature (391)..(391): n is a, c, g, or t

SEQ ID NO: 67256 - DNA, 420 bp, Homo Sapiens; identical to SEQ ID NO: 11916

SEQ ID NO: 67257 - DNA, 626 bp, Homo Sapiens; identical to SEQ ID NO: 11917

SEQ ID NO: 67258 - DNA, 609 bp, Homo Sapiens; identical to SEQ ID NO: 11929
  misc_feature (578)..(578): n is a, c, g, or t

SEQ ID NO: 67259 - DNA, 372 bp, Homo Sapiens; identical to SEQ ID NO: 11930

SEQ ID NO: 67260 - DNA, 893 bp, Homo Sapiens; identical to SEQ ID NO: 11949

SEQ ID NO: 67261 - DNA, 539 bp, Homo Sapiens; identical to SEQ ID NO: 11956
  misc_feature (18)..(18): n is a, c, g, or t

SEQ ID NO: 67262 - DNA, 732 bp, Homo Sapiens; identical to SEQ ID NO: 11957
  misc_feature (54)..(65): n is a, c, g, or t
  misc_feature (109)..(109): n is a, c, g, or t

SEQ ID NO: 67263 - DNA, 206 bp, Homo Sapiens; identical to SEQ ID NO: 11959

SEQ ID NO: 67264 - DNA, 309 bp, Homo Sapiens; identical to SEQ ID NO: 11963

SEQ ID NO: 67265 - DNA, 528 bp, Homo Sapiens; identical to SEQ ID NO: 11965

SEQ ID NO: 67266 - DNA, 608 bp, Homo Sapiens; identical to SEQ ID NO: 11967

SEQ ID NO: 67267 - DNA, 723 bp, Homo Sapiens; identical to SEQ ID NO: 11972
  misc_feature (679)..(679): n is a, c, g, or t
  misc_feature (685)..(686): n is a, c, g, or t

SEQ ID NO: 67268 - DNA, 1049 bp, Homo Sapiens; identical to SEQ ID NO: 11978

SEQ ID NO: 67269 - DNA, 531 bp, Homo Sapiens; identical to SEQ ID NO: 11993

SEQ ID NO: 67270 - DNA, 556 bp, Homo Sapiens; identical to SEQ ID NO: 11997

SEQ ID NO: 67271 - DNA, 359 bp, Homo Sapiens; identical to SEQ ID NO: 11999

SEQ ID NO: 67272 - DNA, 675 bp, Homo Sapiens; identical to SEQ ID NO: 12003
  misc_feature (389)..(389): n is a, c, g, or t

SEQ ID NO: 67273 - DNA, 720 bp, Homo Sapiens; identical to SEQ ID NO: 12008

SEQ ID NO: 67274 - DNA, 479 bp, Homo Sapiens; identical to SEQ ID NO: 12011
  misc_feature (38)..(38): n is a, c, g, or t
  misc_feature (414)..(426): n is a, c, g, or t

SEQ ID NO: 67275 - DNA, 472 bp, Homo Sapiens; identical to SEQ ID NO: 12012

SEQ ID NO: 67276 - DNA, 641 bp, Homo Sapiens; identical to SEQ ID NO: 12019

SEQ ID NO: 67277 - DNA, 547 bp, Homo Sapiens; identical to SEQ ID NO: 12020

SEQ ID NO: 67278 - DNA, 668 bp, Homo Sapiens; identical to SEQ ID NO: 12023

SEQ ID NO: 67279 - DNA, 926 bp, Homo Sapiens; identical to SEQ ID NO: 12026

SEQ ID NO: 67280 - DNA, 674 bp, Homo Sapiens; identical to SEQ ID NO: 12028
  misc_feature (174)..(174): n is a, c, g, or t
  misc_feature (249)..(249): n is a, c, g, or t

SEQ ID NO: 67281 - DNA, 586 bp, Homo Sapiens; identical to SEQ ID NO: 12032
  misc_feature (182)..(182): n is a, c, g, or t

SEQ ID NO: 67282 - DNA, 546 bp, Homo Sapiens; identical to SEQ ID NO: 12036
  misc_feature (33)..(33): n is a, c, g, or t
  misc_feature (37)..(37): n is a, c, g, or t
  misc_feature (315)..(315): n is a, c, g, or t

SEQ ID NO: 67283 - DNA, 456 bp, Homo Sapiens; identical to SEQ ID NO: 12037
  misc_feature (21)..(21): n is a, c, g, or t
  misc_feature (168)..(217): n is a, c, g, or t

SEQ ID NO: 67284 - DNA, 548 bp, Homo Sapiens; identical to SEQ ID NO: 12043

SEQ ID NO: 67285 - DNA, 493 bp, Homo Sapiens; identical to SEQ ID NO: 12044

SEQ ID NO: 67286 - DNA, 535 bp, Homo Sapiens; identical to SEQ ID NO: 12048
  misc_feature (300)..(300): n is a, c, g, or t

SEQ ID NO: 67287 - DNA, 320 bp, Homo Sapiens; identical to SEQ ID NO: 12049

SEQ ID NO: 67288 - DNA, 440 bp, Homo Sapiens; identical to SEQ ID NO: 12051

SEQ ID NO: 67289 - DNA, 1063 bp, Homo Sapiens; identical to SEQ ID NO: 12055
  misc_feature (134)..(134): n is a, c, g, or t
  misc_feature (175)..(175): n is a, c, g, or t
  misc_feature (410)..(410): n is a, c, g, or t

SEQ ID NO: 67290 - DNA, 466 bp, Homo Sapiens; identical to SEQ ID NO: 12057

SEQ ID NO: 67291 - DNA, 588 bp, Homo Sapiens; identical to SEQ ID NO: 12058

SEQ ID NO: 67292 - DNA, 476 bp, Homo Sapiens; identical to SEQ ID NO: 12060
  misc_feature (38)..(38): n is a, c, g, or t

SEQ ID NO: 67293 - DNA, 483 bp, Homo Sapiens; identical to SEQ ID NO: 12063

SEQ ID NO: 67294 - DNA, 579 bp, Homo Sapiens; identical to SEQ ID NO: 12071

SEQ ID NO: 67295 - DNA, 361 bp, Homo Sapiens; identical to SEQ ID NO: 12073

SEQ ID NO: 67296 - DNA, 439 bp, Homo Sapiens; identical to SEQ ID NO: 12079
  misc_feature (66)..(109): n is a, c, g, or t

SEQ ID NO: 67297 - DNA, 586 bp, Homo Sapiens; identical to SEQ ID NO: 12081
  misc_feature (550)..(550): n is a, c, g, or t
  misc_feature (572)..(572): n is a, c, g, or t

SEQ ID NO: 67298 - DNA, 745 bp, Homo Sapiens; identical to SEQ ID NO: 12085
  misc_feature (98)..(98): n is a, c, g, or t

SEQ ID NO: 67299 - DNA, 578 bp, Homo Sapiens; identical to SEQ ID NO: 12091
  misc_feature (258)..(258): n is a, c, g, or t

SEQ ID NO: 67300 - DNA, 627 bp, Homo Sapiens; identical to SEQ ID NO: 12099
  misc_feature (275)..(312): n is a, c, g, or t
  misc_feature (588)..(588): n is a, c, g, or t
  misc_feature (602)..(602): n is a, c, g, or t

SEQ ID NO: 67301 - DNA, 572 bp, Homo Sapiens; identical to SEQ ID NO: 12104

SEQ ID NO: 67302 - DNA, 493 bp, Homo Sapiens; identical to SEQ ID NO: 12112

SEQ ID NO: 67303 - DNA, 1012 bp, Homo Sapiens; identical to SEQ ID NO: 12114

SEQ ID NO: 67304 - DNA, 289 bp, Homo Sapiens; identical to SEQ ID NO: 12128

SEQ ID NO: 67305 - DNA, 715 bp, Homo Sapiens; identical to SEQ ID NO: 12130

SEQ ID NO: 67306 - DNA, 633 bp, Homo Sapiens; identical to SEQ ID NO: 12170
  misc_feature (91)..(136): n is a, c, g, or t
  misc_feature (261)..(308): n is a, c, g, or t

SEQ ID NO: 67307 - DNA, 506 bp, Homo Sapiens; identical to SEQ ID NO: 12171

SEQ ID NO: 67308 - DNA, 847 bp, Homo Sapiens; identical to SEQ ID NO: 12174
  misc_feature (256)..(267): n is a, c, g, or t

SEQ ID NO: 67309 - DNA, 646 bp, Homo Sapiens; identical to SEQ ID NO: 12181
  misc_feature (130)..(188): n is a, c, g, or t

SEQ ID NO: 67310 - DNA, 984 bp, Homo Sapiens; identical to SEQ ID NO: 12183
  misc_feature (465)..(477): n is a, c, g, or t

SEQ ID NO: 67311 - DNA, 386 bp, Homo Sapiens; identical to SEQ ID NO: 12196

SEQ ID NO: 67312 - DNA, 1738 bp, Homo Sapiens; identical to SEQ ID NO: 12213

SEQ ID NO: 67313 - DNA, 583 bp, Homo Sapiens; identical to SEQ ID NO: 12235

SEQ ID NO: 67314 - DNA, 677 bp, Homo Sapiens; identical to SEQ ID NO: 12243
  misc_feature (375)..(410): n is a, c, g, or t
  misc_feature (659)..(659): n is a, c, g, or t

SEQ ID NO: 67315 - DNA, 660 bp, Homo Sapiens; identical to SEQ ID NO: 12261
  misc_feature (457)..(457): n is a, c, g, or t
  misc_feature (464)..(464): n is a, c, g, or t
  misc_feature (564)..(565): n is a, c, g, or t
  misc_feature (623)..(623): n is a, c, g, or t

SEQ ID NO: 67316 - DNA, 595 bp, Homo Sapiens; identical to SEQ ID NO: 12273

SEQ ID NO: 67317 - DNA, 465 bp, Homo Sapiens; identical to SEQ ID NO: 12274

SEQ ID NO: 67318 - DNA, 598 bp, Homo Sapiens; identical to SEQ ID NO: 12280

SEQ ID NO: 67319 - DNA, 588 bp, Homo Sapiens; identical to SEQ ID NO: 12296

SEQ ID NO: 67320 - DNA, 409 bp, Homo Sapiens; identical to SEQ ID NO: 12297

SEQ ID NO: 67321 - DNA, 292 bp, Homo Sapiens; identical to SEQ ID NO: 12298

SEQ ID NO: 67322 - DNA, 556 bp, Homo Sapiens; identical to SEQ ID NO: 12326

SEQ ID NO: 67323 - DNA, 363 bp, Homo Sapiens; identical to SEQ ID NO: 12327

SEQ ID NO: 67324 - DNA, 471 bp, Homo Sapiens; identical to SEQ ID NO: 12338

SEQ ID NO: 67325 - DNA, 1021 bp, Homo Sapiens; identical to SEQ ID NO: 12341
  misc_feature (53)..(53): n is a, c, g, or t

SEQ ID NO: 67326 - DNA, 288 bp, Homo Sapiens; identical to SEQ ID NO: 12349

SEQ ID NO: 67327 - DNA, 1024 bp, Homo Sapiens; identical to SEQ ID NO: 12350

SEQ ID NO: 67328 - DNA, 400 bp, Homo Sapiens; identical to SEQ ID NO: 12352
  misc_feature (103)..(111): n is a, c, g, or t

SEQ ID NO: 67329 - DNA, 1044 bp, Homo Sapiens; identical to SEQ ID NO: 12354

SEQ ID NO: 67330 - DNA, 296 bp, Homo Sapiens; identical to SEQ ID NO: 12374

SEQ ID NO: 67331 - DNA, 425 bp, Homo Sapiens; identical to SEQ ID NO: 12418

SEQ ID NO: 67332 - DNA, 530 bp, Homo Sapiens; identical to SEQ ID NO: 12424
  misc_feature (117)..(171): n is a, c, g, or t

SEQ ID NO: 67333 - DNA, 552 bp, Homo Sapiens; identical to SEQ ID NO: 12425

SEQ ID NO: 67334 - DNA, 482 bp, Homo Sapiens; identical to SEQ ID NO: 12437

SEQ ID NO: 67335 - DNA, 657 bp, Homo Sapiens; identical to SEQ ID NO: 12440
  misc_feature (48)..(63): n is a, c, g, or t

SEQ ID NO: 67336 - DNA, 219 bp, Homo Sapiens; identical to SEQ ID NO: 12446

SEQ ID NO: 67337 - DNA, 430 bp, Homo Sapiens; identical to SEQ ID NO: 12460

SEQ ID NO: 67338 - DNA, 456 bp, Homo Sapiens; identical to SEQ ID NO: 12467

SEQ ID NO: 67339 - DNA, 1108 bp, Homo Sapiens; identical to SEQ ID NO: 12470
  misc_feature (47)..(47): n is a, c, g, or t

SEQ ID NO: 67340 - DNA, 441 bp, Homo Sapiens; identical to SEQ ID NO: 12476

SEQ ID NO: 67341 - DNA, 395 bp, Homo Sapiens; identical to SEQ ID NO: 12478

SEQ ID NO: 67342 - DNA, 756 bp, Homo Sapiens; identical to SEQ ID NO: 12486

SEQ ID NO: 67343 - DNA, 977 bp, Homo Sapiens; identical to SEQ ID NO: 12497

SEQ ID NO: 67344 - DNA, 720 bp, Homo Sapiens; identical to SEQ ID NO: 12512

SEQ ID NO: 67345 - DNA, 699 bp, Homo Sapiens; identical to SEQ ID NO: 12515

SEQ ID NO: 67346 - DNA, 462 bp, Homo Sapiens; identical to SEQ ID NO: 12517

SEQ ID NO: 67347 - DNA, 251 bp, Homo Sapiens; identical to SEQ ID NO: 12525

SEQ ID NO: 67348 - DNA, 709 bp, Homo Sapiens; identical to SEQ ID NO: 12527

SEQ ID NO: 67349 - DNA, 570 bp, Homo Sapiens; identical to SEQ ID NO: 12530
  misc_feature (47)..(47): n is a, c, g, or t

SEQ ID NO: 67350 - DNA, 544 bp, Homo Sapiens; identical to SEQ ID NO: 12534

SEQ ID NO: 67351 - DNA, 668 bp, Homo Sapiens; identical to SEQ ID NO: 12543

SEQ ID NO: 67352 - DNA, 568 bp, Homo Sapiens; identical to SEQ ID NO: 12553

SEQ ID NO: 67353 - DNA, 454 bp, Homo Sapiens; identical to SEQ ID NO: 12563

SEQ ID NO: 67354 - DNA, 492 bp, Homo Sapiens; identical to SEQ ID NO: 12568

SEQ ID NO: 67355 - DNA, 531 bp, Homo Sapiens; identical to SEQ ID NO: 12578
  misc_feature (96)..(96): n is a, c, g, or t
  misc_feature (183)..(183): n is a, c, g, or t

SEQ ID NO: 67356 - DNA, 545 bp, Homo Sapiens; identical to SEQ ID NO: 12597
  misc_feature (502)..(502): n is a, c, g, or t

SEQ ID NO: 67357 - DNA, 412 bp, Homo Sapiens; identical to SEQ ID NO: 12608

SEQ ID NO: 67358 - DNA, 745 bp, Homo Sapiens; identical to SEQ ID NO: 12612
  misc_feature (574)..(574): n is a, c, g, or t
  misc_feature (679)..(679): n is a, c, g, or t
  misc_feature (714)..(714): n is a, c, g, or t

SEQ ID NO: 67359 - DNA, 537 bp, Homo Sapiens; identical to SEQ ID NO: 12613

SEQ ID NO: 67360 - DNA, 564 bp, Homo Sapiens; identical to SEQ ID NO: 12616

SEQ ID NO: 67361 - DNA, 409 bp, Homo Sapiens; identical to SEQ ID NO: 12618

SEQ ID NO: 67362 - DNA, 426 bp, Homo Sapiens; identical to SEQ ID NO: 12628

SEQ ID NO: 67363 - DNA, 445 bp, Homo Sapiens; identical to SEQ ID NO: 12633
  misc_feature (317)..(317): n is a, c, g, or t
  misc_feature (345)..(345): n is a, c, g, or t

SEQ ID NO: 67364 - DNA, 424 bp, Homo Sapiens; identical to SEQ ID NO: 12637

SEQ ID NO: 67365 - DNA, 345 bp, Homo Sapiens; identical to SEQ ID NO: 12639

SEQ ID NO: 67366 - DNA, 320 bp, Homo Sapiens; identical to SEQ ID NO: 12640

SEQ ID NO: 67367 - DNA, 511 bp, Homo Sapiens; identical to SEQ ID NO: 12641

SEQ ID NO: 67368 - DNA, 793 bp, Homo Sapiens; identical to SEQ ID NO: 12650

SEQ ID NO: 67369 - DNA, 283 bp, Homo Sapiens; identical to SEQ ID NO: 12651

SEQ ID NO: 67370 - DNA, 473 bp, Homo Sapiens; identical to SEQ ID NO: 12655

SEQ ID NO: 67371 - DNA, 395 bp, Homo Sapiens; identical to SEQ ID NO: 12656

SEQ ID NO: 67372 - DNA, 526 bp, Homo Sapiens; identical to SEQ ID NO: 12658
  misc_feature (509)..(509): n is a, c, g, or t

SEQ ID NO: 67373 - DNA, 350 bp, Homo Sapiens; identical to SEQ ID NO: 12661

SEQ ID NO: 67374 - DNA, 351 bp, Homo Sapiens; identical to SEQ ID NO: 12662

SEQ ID NO: 67375 - DNA, 553 bp, Homo Sapiens; identical to SEQ ID NO: 12666

SEQ ID NO: 67376 - DNA, 1289 bp, Homo Sapiens; identical to SEQ ID NO: 12674
  misc_feature (504)..(542): n is a, c, g, or t

SEQ ID NO: 67377 - DNA, 280 bp, Homo Sapiens; identical to SEQ ID NO: 12687

SEQ ID NO: 67378 - DNA, 478 bp, Homo Sapiens; identical to SEQ ID NO: 12697

SEQ ID NO: 67379 - DNA, 431 bp, Homo Sapiens; identical to SEQ ID NO: 12702
  misc_feature (401)..(401): n is a, c, g, or t

SEQ ID NO: 67380 - DNA, 398 bp, Homo Sapiens; identical to SEQ ID NO: 12708

SEQ ID NO: 67381 - DNA, 1197 bp, Homo Sapiens; identical to SEQ ID NO: 12713

SEQ ID NO: 67382 - DNA, 1331 bp, Homo Sapiens; identical to SEQ ID NO: 12716

SEQ ID NO: 67383 - DNA, 1039 bp, Homo Sapiens; identical to SEQ ID NO: 12720

SEQ ID NO: 67384 - DNA, 437 bp, Homo Sapiens; identical to SEQ ID NO: 12725

SEQ ID NO: 67385 - DNA, 494 bp, Homo Sapiens; identical to SEQ ID NO: 12730
  misc_feature (437)..(445): n is a, c, g, or t

SEQ ID NO: 67386 - DNA, 536 bp, Homo Sapiens; identical to SEQ ID NO: 12741
  misc_feature (127)..(160): n is a, c, g, or t

SEQ ID NO: 67387 - DNA, 421 bp, Homo Sapiens; identical to SEQ ID NO: 12753
  misc_feature (37)..(37): n is a, c, g, or t

SEQ ID NO: 67388 - DNA, 460 bp, Homo Sapiens; identical to SEQ ID NO: 12756

SEQ ID NO: 67389 - DNA, 590 bp, Homo Sapiens; identical to SEQ ID NO: 12776

SEQ ID NO: 67390 - DNA, 612 bp, Homo Sapiens; identical to SEQ ID NO: 12782

SEQ ID NO: 67391 - DNA, 519 bp, Homo Sapiens; identical to SEQ ID NO: 12788

SEQ ID NO: 67392 - DNA, 358 bp, Homo Sapiens; identical to SEQ ID NO: 12790

SEQ ID NO: 67393 - DNA, 346 bp, Homo Sapiens; identical to SEQ ID NO: 12801

SEQ ID NO: 67394 - DNA, 505 bp, Homo Sapiens; identical to SEQ ID NO: 12802

SEQ ID NO: 67395 - DNA, 499 bp, Homo Sapiens; identical to SEQ ID NO: 12807

SEQ ID NO: 67396 - DNA, 906 bp, Homo Sapiens; identical to SEQ ID NO: 12814
  misc_feature (631)..(668): n is a, c, g, or t
  misc_feature (893)..(893): n is a, c, g, or t

SEQ ID NO: 67397 - DNA, 633 bp, Homo Sapiens; identical to SEQ ID NO: 12820

SEQ ID NO: 67398 - DNA, 229 bp, Homo Sapiens; identical to SEQ ID NO: 12821

SEQ ID NO: 67399 - DNA, 286 bp, Homo Sapiens; identical to SEQ ID NO: 12825

SEQ ID NO: 67400 - DNA, 368 bp, Homo Sapiens; identical to SEQ ID NO: 12828
  misc_feature (67)..(67): n is a, c, g, or t
  misc_feature (125)..(126): n is a, c, g, or t

SEQ ID NO: 67401 - DNA, 354 bp, Homo Sapiens; identical to SEQ ID NO: 12829

SEQ ID NO: 67402 - DNA, 454 bp, Homo Sapiens; identical to SEQ ID NO: 12832

SEQ ID NO: 67403 - DNA, 723 bp, Homo Sapiens; identical to SEQ ID NO: 12842

SEQ ID NO: 67404 - DNA, 264 bp, Homo Sapiens; identical to SEQ ID NO: 12850

SEQ ID NO: 67405 - DNA, 570 bp, Homo Sapiens; identical to SEQ ID NO: 12861

SEQ ID NO: 67406 - DNA, 678 bp, Homo Sapiens; identical to SEQ ID NO: 12863

SEQ ID NO: 67407 - DNA, 1088 bp, Homo Sapiens; identical to SEQ ID NO: 12865
  misc_feature (649)..(650): n is a, c, g, or t
  misc_feature (692)..(692): n is a, c, g, or t
  misc_feature (808)..(808): n is a, c, g, or t

SEQ ID NO: 67408 - DNA, 457 bp, Homo Sapiens; identical to SEQ ID NO: 12869

SEQ ID NO: 67409 - DNA, 472 bp, Homo Sapiens; identical to SEQ ID NO: 12883

SEQ ID NO: 67410 - DNA, 566 bp, Homo Sapiens; identical to SEQ ID NO: 12893
  misc_feature (555)..(555): n is a, c, g, or t

SEQ ID NO: 67411 - DNA, 566 bp, Homo Sapiens; identical to SEQ ID NO: 12895
  misc_feature (25)..(25): n is a, c, g, or t

SEQ ID NO: 67412 - DNA, 534 bp, Homo Sapiens; identical to SEQ ID NO: 12898

SEQ ID NO: 67413 - DNA, 448 bp, Homo Sapiens; identical to SEQ ID NO: 12901

SEQ ID NO: 67414 - DNA, 531 bp, Homo Sapiens; identical to SEQ ID NO: 12903
  misc_feature (291)..(291): n is a, c, g, or t

SEQ ID NO: 67415 - DNA, 887 bp, Homo Sapiens; identical to SEQ ID NO: 12910

SEQ ID NO: 67416 - DNA, 480 bp, Homo Sapiens; identical to SEQ ID NO: 12919
  misc_feature (336)..(358): n is a, c, g, or t

SEQ ID NO: 67417 - DNA, 589 bp, Homo Sapiens; identical to SEQ ID NO: 12920

SEQ ID NO: 67418 - DNA, 399 bp, Homo Sapiens; identical to SEQ ID NO: 12933
  misc_feature (55)..(56): n is a, c, g, or t
  misc_feature (75)..(75): n is a, c, g, or t
  misc_feature (121)..(189): n is a, c, g, or t

SEQ ID NO: 67419 - DNA, 513 bp, Homo Sapiens; identical to SEQ ID NO: 12953

SEQ ID NO: 67420 - DNA, 500 bp, Homo Sapiens; identical to SEQ ID NO: 12954

SEQ ID NO: 67421 - DNA, 359 bp, Homo Sapiens; identical to SEQ ID NO: 12962

SEQ ID NO: 67422 - DNA, 379 bp, Homo Sapiens; identical to SEQ ID NO: 12965

SEQ ID NO: 67423 - DNA, 339 bp, Homo Sapiens; identical to SEQ ID NO: 12967

SEQ ID NO: 67424 - DNA, 1442 bp, Homo Sapiens; identical to SEQ ID NO: 12969

SEQ ID NO: 67425 - DNA, 529 bp, Homo Sapiens; identical to SEQ ID NO: 12970

SEQ ID NO: 67426 - DNA, 336 bp, Homo Sapiens; identical to SEQ ID NO: 12977

SEQ ID NO: 67427 - DNA, 414 bp, Homo Sapiens; identical to SEQ ID NO: 12978

SEQ ID NO: 67428 - DNA, 683 bp, Homo Sapiens; identical to SEQ ID NO: 12983

SEQ ID NO: 67429 - DNA, 482 bp, Homo Sapiens; identical to SEQ ID NO: 12986

SEQ ID NO: 67430 - DNA, 693 bp, Homo Sapiens; identical to SEQ ID NO: 12988

SEQ ID NO: 67431 - DNA, 269 bp, Homo Sapiens; identical to SEQ ID NO: 12989

SEQ ID NO: 67432 - DNA, 435 bp, Homo Sapiens; identical to SEQ ID NO: 12993

SEQ ID NO: 67433 - DNA, 391 bp, Homo Sapiens; identical to SEQ ID NO: 12999

SEQ ID NO: 67434 - DNA, 946 bp, Homo Sapiens; identical to SEQ ID NO: 13023

SEQ ID NO: 67435 - DNA, 485 bp, Homo Sapiens; identical to SEQ ID NO: 13029
  misc_feature (450)..(450): n is a, c, g, or t

SEQ ID NO: 67436 - DNA, 723 bp, Homo Sapiens; identical to SEQ ID NO: 13035

SEQ ID NO: 67437 - DNA, 409 bp, Homo Sapiens; identical to SEQ ID NO: 13038

SEQ ID NO: 67438 - DNA, 408 bp, Homo Sapiens; identical to SEQ ID NO: 13048
  misc_feature (148)..(158): n is a, c, g, or t

SEQ ID NO: 67439 - DNA, 626 bp, Homo Sapiens; identical to SEQ ID NO: 13058
  misc_feature (157)..(157): n is a, c, g, or t
  misc_feature (277)..(277): n is a, c, g, or t
  misc_feature (438)..(438): n is a, c, g, or t
  misc_feature (523)..(523): n is a, c, g, or t
  misc_feature (574)..(574): n is a, c, g, or t
  misc_feature (595)..(595): n is a, c, g, or t

SEQ ID NO: 67440 - DNA, 922 bp, Homo Sapiens; identical to SEQ ID NO: 13065

SEQ ID NO: 67441 - DNA, 391 bp, Homo Sapiens; identical to SEQ ID NO: 13075

SEQ ID NO: 67442 - DNA, 683 bp, Homo Sapiens; identical to SEQ ID NO: 13079

SEQ ID NO: 67443 - DNA, 509 bp, Homo Sapiens; identical to SEQ ID NO: 13086
  misc_feature (68)..(68): n is a, c, g, or t

SEQ ID NO: 67444 - DNA, 571 bp, Homo Sapiens; identical to SEQ ID NO: 13088

SEQ ID NO: 67445 - DNA, 442 bp, Homo Sapiens; identical to SEQ ID NO: 13094

SEQ ID NO: 67446 - DNA, 395 bp, Homo Sapiens; identical to SEQ ID NO: 13096

SEQ ID NO: 67447 - DNA, 918 bp, Homo Sapiens; identical to SEQ ID NO: 13100
  misc_feature (161)..(174): n is a, c, g, or t
  misc_feature (897)..(897): n is a, c, g, or t

SEQ ID NO: 67448 - DNA, 1011 bp, Homo Sapiens; identical to SEQ ID NO: 13103

SEQ ID NO: 67449 - DNA, 267 bp, Homo Sapiens; identical to SEQ ID NO: 13107

SEQ ID NO: 67450 - DNA, 1326 bp, Homo Sapiens; identical to SEQ ID NO: 13123

SEQ ID NO: 67451 - DNA, 412 bp, Homo Sapiens; identical to SEQ ID NO: 13124

SEQ ID NO: 67452 - DNA, 449 bp, Homo Sapiens; identical to SEQ ID NO: 13126

SEQ ID NO: 67453 - DNA, 512 bp, Homo Sapiens; identical to SEQ ID NO: 13129

SEQ ID NO: 67454 - DNA, 1019 bp, Homo Sapiens; identical to SEQ ID NO: 13131
  misc_feature (164)..(164): n is a, c, g, or t

SEQ ID NO: 67455 - DNA, 180 bp, Homo Sapiens; identical to SEQ ID NO: 13144

SEQ ID NO: 67456 - DNA, 419 bp, Homo Sapiens; identical to SEQ ID NO: 13151

SEQ ID NO: 67457 - DNA, 640 bp, Homo Sapiens; identical to SEQ ID NO: 13154

SEQ ID NO: 67458 - DNA, 885 bp, Homo Sapiens; identical to SEQ ID NO: 13158

SEQ ID NO: 67459 - DNA, 275 bp, Homo Sapiens; identical to SEQ ID NO: 13163

SEQ ID NO: 67460 - DNA, 580 bp, Homo Sapiens; identical to SEQ ID NO: 13165

SEQ ID NO: 67461 - DNA, 767 bp, Homo Sapiens; identical to SEQ ID NO: 13170
  misc_feature (83)..(84): n is a, c, g, or t
  misc_feature (110)..(110): n is a, c, g, or t
  misc_feature (129)..(129): n is a, c, g, or t
  misc_feature (147)..(147): n is a, c, g, or t

SEQ ID NO: 67462 - DNA, 440 bp, Homo Sapiens; identical to SEQ ID NO: 13177

SEQ ID NO: 67463 - DNA, 658 bp, Homo Sapiens; identical to SEQ ID NO: 13188

SEQ ID NO: 67464 - DNA, 630 bp, Homo Sapiens; identical to SEQ ID NO: 13189

SEQ ID NO: 67465 - DNA, 413 bp, Homo Sapiens; identical to SEQ ID NO: 13199
  misc_feature (360)..(360): n is a, c, g, or t

SEQ ID NO: 67466 - DNA, 219 bp, Homo Sapiens; identical to SEQ ID NO: 13203

SEQ ID NO: 67467 - DNA, 236 bp, Homo Sapiens; identical to SEQ ID NO: 13204

SEQ ID NO: 67468 - DNA, 472 bp, Homo Sapiens; identical to SEQ ID NO: 13214

SEQ ID NO: 67469 - DNA, 995 bp, Homo Sapiens; identical to SEQ ID NO: 13215

SEQ ID NO: 67470 - DNA, 615 bp, Homo Sapiens; identical to SEQ ID NO: 13222

SEQ ID NO: 67471 - DNA, 545 bp, Homo Sapiens; identical to SEQ ID NO: 13224
  misc_feature (254)..(274): n is a, c, g, or t

SEQ ID NO: 67472 - DNA, 1662 bp, Homo Sapiens; identical to SEQ ID NO: 13225
  misc_feature (606)..(628): n is a, c, g, or t

SEQ ID NO: 67473 - DNA, 1116 bp, Homo Sapiens; identical to SEQ ID NO: 13238
  misc_feature (671)..(959): n is a, c, g, or t

SEQ ID NO: 67474 - DNA, 1301 bp, Homo Sapiens; identical to SEQ ID NO: 13243
  misc_feature (530)..(814): n is a, c, g, or t
  misc_feature (818)..(840): n is a, c, g, or t

SEQ ID NO: 67475 - DNA, 557 bp, Homo Sapiens; identical to SEQ ID NO: 13247

SEQ ID NO: 67476 - DNA, 428 bp, Homo Sapiens; identical to SEQ ID NO: 13250

SEQ ID NO: 67477 - DNA, 1518 bp, Homo Sapiens; identical to SEQ ID NO: 13251

SEQ ID NO: 67478 - DNA, 408 bp, Homo Sapiens; identical to SEQ ID NO: 13260

SEQ ID NO: 67479 - DNA, 1520 bp, Homo Sapiens; identical to SEQ ID NO: 13261

SEQ ID NO: 67480 - DNA, 975 bp, Homo Sapiens; identical to SEQ ID NO: 13265
  misc_feature (885)..(885): n is a, c, g, or t

SEQ ID NO: 67481 - DNA, 941 bp, Homo Sapiens; identical to SEQ ID NO: 13280

SEQ ID NO: 67482 - DNA, 1033 bp, Homo Sapiens; identical to SEQ ID NO: 13293
  misc_feature (744)..(744): n is a, c, g, or t
  misc_feature (780)..(780): n is a, c, g, or t

SEQ ID NO: 67483 - DNA, 572 bp, Homo Sapiens; identical to SEQ ID NO: 13296

SEQ ID NO: 67484 - DNA, 2236 bp, Homo Sapiens; identical to SEQ ID NO: 13304

SEQ ID NO: 67485 - DNA, 905 bp, Homo Sapiens; identical to SEQ ID NO: 13306

SEQ ID NO: 67486 - DNA, 917 bp, Homo Sapiens; identical to SEQ ID NO: 13307

SEQ ID NO: 67487 - DNA, 1175 bp, Homo Sapiens; identical to SEQ ID NO: 13316
  misc_feature (382)..(382): n is a, c, g, or t

SEQ ID NO: 67488 - DNA, 999 bp, Homo Sapiens; identical to SEQ ID NO: 13319
  misc_feature (51)..(51): n is a, c, g, or t

SEQ ID NO: 67489 - DNA, 985 bp, Homo Sapiens; identical to SEQ ID NO: 13328
  misc_feature (807)..(815): n is a, c, g, or t

SEQ ID NO: 67490 - DNA, 612 bp, Homo Sapiens; identical to SEQ ID NO: 13330

SEQ ID NO: 67491 - DNA, 1014 bp, Homo Sapiens; identical to SEQ ID NO: 13331
  misc_feature (89)..(105): n is a, c, g, or t

SEQ ID NO: 67492 - DNA, 546 bp, Homo Sapiens; identical to SEQ ID NO: 13348
  misc_feature (526)..(526): n is a, c, g, or t

SEQ ID NO: 67493 - DNA, 602 bp, Homo Sapiens; identical to SEQ ID NO: 13351
  misc_feature (183)..(199): n is a, c, g, or t

SEQ ID NO: 67494 - DNA, 283 bp, Homo Sapiens; identical to SEQ ID NO: 13359

SEQ ID NO: 67495 - DNA, 647 bp, Homo Sapiens; identical to SEQ ID NO: 13364
  misc_feature (57)..(81): n is a, c, g, or t

SEQ ID NO: 67496 - DNA, 464 bp, Homo Sapiens; identical to SEQ ID NO: 13370

SEQ ID NO: 67497 - DNA, 372 bp, Homo Sapiens; identical to SEQ ID NO: 13372

SEQ ID NO: 67498 - DNA, 1043 bp, Homo Sapiens; identical to SEQ ID NO: 13373
  misc_feature (143)..(143): n is a, c, g, or t

SEQ ID NO: 67499 - DNA, 508 bp, Homo Sapiens; identical to SEQ ID NO: 13376

SEQ ID NO: 67500 - DNA, 555 bp, Homo Sapiens; identical to SEQ ID NO: 13385

SEQ ID NO: 67501 - DNA, 856 bp, Homo Sapiens; identical to SEQ ID NO: 13404

SEQ ID NO: 67502 - DNA, 532 bp, Homo Sapiens; identical to SEQ ID NO: 13405

SEQ ID NO: 67503 - DNA, 549 bp, Homo Sapiens; identical to SEQ ID NO: 13432

SEQ ID NO: 67504 - DNA, 596 bp, Homo Sapiens; identical to SEQ ID NO: 13441
  misc_feature (340)..(532): n is a, c, g, or t

SEQ ID NO: 67505 - DNA, 373 bp, Homo Sapiens; identical to SEQ ID NO: 13455

SEQ ID NO: 67506 - DNA, 533 bp, Homo Sapiens; identical to SEQ ID NO: 13456
  misc_feature (185)..(193): n is a, c, g, or t

SEQ ID NO: 67507 - DNA, 258 bp, Homo Sapiens; identical to SEQ ID NO: 13476

SEQ ID NO: 67508 - DNA, 544 bp, Homo Sapiens; identical to SEQ ID NO: 13479

SEQ ID NO: 67509 - DNA, 824 bp, Homo Sapiens; identical to SEQ ID NO: 13483
  misc_feature (690)..(690): n is a, c, g, or t
  misc_feature (702)..(702): n is a, c, g, or t
  misc_feature (704)..(704): n is a, c, g, or t
  misc_feature (716)..(716): n is a, c, g, or t
  misc_feature (722)..(722): n is a, c, g, or t
  misc_feature (799)..(799): n is a, c, g, or t

SEQ ID NO: 67510 - DNA, 566 bp, Homo Sapiens; identical to SEQ ID NO: 13493

SEQ ID NO: 67511 - DNA, 431 bp, Homo Sapiens; identical to SEQ ID NO: 13501

SEQ ID NO: 67512 - DNA, 326 bp, Homo Sapiens; identical to SEQ ID NO: 13505

SEQ ID NO: 67513 - DNA, 330 bp, Homo Sapiens; identical to SEQ ID NO: 13514

SEQ ID NO: 67514 - DNA, 457 bp, Homo Sapiens; identical to SEQ ID NO: 13517

SEQ ID NO: 67515 - DNA, 243 bp, Homo Sapiens; identical to SEQ ID NO: 13530

SEQ ID NO: 67516 - DNA, 536 bp, Homo Sapiens; identical to SEQ ID NO: 13532

SEQ ID NO: 67517 - DNA, 512 bp, Homo Sapiens; identical to SEQ ID NO: 13533
  misc_feature (182)..(209): n is a, c, g, or t

SEQ ID NO: 67518 - DNA, 704 bp, Homo Sapiens; identical to SEQ ID NO: 13543

SEQ ID NO: 67519 - DNA, 310 bp, Homo Sapiens; identical to SEQ ID NO: 13546

SEQ ID NO: 67520 - DNA, 471 bp, Homo Sapiens; identical to SEQ ID NO: 13553
  misc_feature (93)..(93): n is a, c, g, or t

SEQ ID NO: 67521 - DNA, 770 bp, Homo Sapiens; identical to SEQ ID NO: 13554
  misc_feature (436)..(436): n is a, c, g, or t
  misc_feature (442)..(442): n is a, c, g, or t
  misc_feature (457)..(457): n is a, c, g, or t
  misc_feature (483)..(483): n is a, c, g, or t
  misc_feature (510)..(510): n is a, c, g, or t
  misc_feature (526)..(526): n is a, c, g, or t
  misc_feature (531)..(531): n is a, c, g, or t
  misc_feature (559)..(559): n is a, c, g, or t
  misc_feature (563)..(563): n is a, c, g, or t
  misc_feature (566)..(566): n is a, c, g, or t
  misc_feature (613)..(613): n is a, c, g, or t

SEQ ID NO: 67522 - DNA, 483 bp, Homo Sapiens; identical to SEQ ID NO: 13569

SEQ ID NO: 67523 - DNA, 450 bp, Homo Sapiens; identical to SEQ ID NO: 13578

SEQ ID NO: 67524 - DNA, 651 bp, Homo Sapiens; identical to SEQ ID NO: 13588

SEQ ID NO: 67525 - DNA, 472 bp, Homo Sapiens; identical to SEQ ID NO: 13602

SEQ ID NO: 67526 - DNA, 318 bp, Homo Sapiens; identical to SEQ ID NO: 13614

SEQ ID NO: 67527 - DNA, 925 bp, Homo Sapiens; identical to SEQ ID NO: 13625

SEQ ID NO: 67528 - DNA, 576 bp, Homo Sapiens; identical to SEQ ID NO: 13628

SEQ ID NO: 67529 - DNA, 323 bp, Homo Sapiens; identical to SEQ ID NO: 13634

SEQ ID NO: 67530 - DNA, 534 bp, Homo Sapiens; identical to SEQ ID NO: 13635

SEQ ID NO: 67531 - DNA, 560 bp, Homo Sapiens; identical to SEQ ID NO: 13647

SEQ ID NO: 67532 - DNA, 1052 bp, Homo Sapiens; identical to SEQ ID NO: 13659

SEQ ID NO: 67533 - DNA, 534 bp, Homo Sapiens; identical to SEQ ID NO: 13679

SEQ ID NO: 67534 - DNA, 537 bp, Homo Sapiens; identical to SEQ ID NO: 13683

SEQ ID NO: 67535 - DNA, 1066 bp, Homo Sapiens; identical to SEQ ID NO: 13689
  misc_feature (666)..(902): n is a, c, g, or t
  misc_feature (925)..(942): n is a, c, g, or t

SEQ ID NO: 67536 - DNA, 657 bp, Homo Sapiens; identical to SEQ ID NO: 13692

SEQ ID NO: 67537 - DNA, 813 bp, Homo Sapiens; identical to SEQ ID NO: 13693

SEQ ID NO: 67538 - DNA, 534 bp, Homo Sapiens; identical to SEQ ID NO: 13694

SEQ ID NO: 67539 - DNA, 920 bp, Homo Sapiens; identical to SEQ ID NO: 13695
  misc_feature (805)..(805): n is a, c, g, or t

SEQ ID NO: 67540 - DNA, 974 bp, Homo Sapiens; identical to SEQ ID NO: 13702
  misc_feature (473)..(473): n is a, c, g, or t

SEQ ID NO: 67541 - DNA, 624 bp, Homo Sapiens; identical to SEQ ID NO: 13703

SEQ ID NO: 67542 - DNA, 543 bp, Homo Sapiens; identical to SEQ ID NO: 13717

SEQ ID NO: 67543 - DNA, 613 bp, Homo Sapiens; identical to SEQ ID NO: 13719

SEQ ID NO: 67544 - DNA, 703 bp, Homo Sapiens; identical to SEQ ID NO: 13728

SEQ ID NO: 67545 - DNA, 851 bp, Homo Sapiens; identical to SEQ ID NO: 13735

SEQ ID NO: 67546 - DNA, 416 bp, Homo Sapiens; identical to SEQ ID NO: 13740
  misc_feature (284)..(284): n is a, c, g, or t
  misc_feature (299)..(299): n is a, c, g, or t

SEQ ID NO: 67547 - DNA, 667 bp, Homo Sapiens; identical to SEQ ID NO: 13746

SEQ ID NO: 67548 - DNA, 973 bp, Homo Sapiens; identical to SEQ ID NO: 13760
  misc_feature (539)..(552): n is a, c, g, or t

SEQ ID NO: 67549 - DNA, 420 bp, Homo Sapiens; identical to SEQ ID NO: 13761

SEQ ID NO: 67550 - DNA, 709 bp, Homo Sapiens; identical to SEQ ID NO: 13764

SEQ ID NO: 67551 - DNA, 487 bp, Homo Sapiens; identical to SEQ ID NO: 13793
  misc_feature (434)..(447): n is a, c, g, or t

SEQ ID NO: 67552 - DNA, 433 bp, Homo Sapiens; identical to SEQ ID NO: 13801

SEQ ID NO: 67553 - DNA, 681 bp, Homo Sapiens; identical to SEQ ID NO: 13807

SEQ ID NO: 67554 - DNA, 708 bp, Homo Sapiens; identical to SEQ ID NO: 13809

SEQ ID NO: 67555 - DNA, 628 bp, Homo Sapiens; identical to SEQ ID NO: 13810

SEQ ID NO: 67556 - DNA, 621 bp, Homo Sapiens; identical to SEQ ID NO: 13811

SEQ ID NO: 67557 - DNA, 431 bp, Homo Sapiens; identical to SEQ ID NO: 13824

SEQ ID NO: 67558 - DNA, 896 bp, Homo Sapiens; identical to SEQ ID NO: 13832
  misc_feature (769)..(828): n is a, c, g, or t

SEQ ID NO: 67559 - DNA, 1021 bp, Homo Sapiens; identical to SEQ ID NO: 13868
  misc_feature (46)..(46): n is a, c, g, or t
  misc_feature (52)..(52): n is a, c, g, or t

SEQ ID NO: 67560 - DNA, 365 bp, Homo Sapiens; identical to SEQ ID NO: 13888

SEQ ID NO: 67561 - DNA, 663 bp, Homo Sapiens; identical to SEQ ID NO: 13889

SEQ ID NO: 67562 - DNA, 945 bp, Homo Sapiens; identical to SEQ ID NO: 13926

SEQ ID NO: 67563 - DNA, 1021 bp, Homo Sapiens; identical to SEQ ID NO: 13928
  misc_feature (62)..(76): n is a, c, g, or t

SEQ ID NO: 67564 - DNA, 503 bp, Homo Sapiens; identical to SEQ ID NO: 13931

SEQ ID NO: 67565 - DNA, 700 bp, Homo Sapiens; identical to SEQ ID NO: 13934
  misc_feature (131)..(131): n is a, c, g, or t
  misc_feature (275)..(333): n is a, c, g, or t
  misc_feature (630)..(630): n is a, c, g, or t
  misc_feature (663)..(663): n is a, c, g, or t

SEQ ID NO: 67566 - DNA, 612 bp, Homo Sapiens; identical to SEQ ID NO: 13936

SEQ ID NO: 67567 - DNA, 297 bp, Homo Sapiens; identical to SEQ ID NO: 13939

SEQ ID NO: 67568 - DNA, 652 bp, Homo Sapiens; identical to SEQ ID NO: 13941

SEQ ID NO: 67569 - DNA, 759 bp, Homo Sapiens; identical to SEQ ID NO: 13957
  misc_feature (49)..(49): n is a, c, g, or t
  misc_feature (139)..(139): n is a, c, g, or t
  misc_feature (172)..(172): n is a, c, g, or t

SEQ ID NO: 67570 - DNA, 393 bp, Homo Sapiens; identical to SEQ ID NO: 13982

SEQ ID NO: 67571 - DNA, 436 bp, Homo Sapiens; identical to SEQ ID NO: 13983

SEQ ID NO: 67572 - DNA, 442 bp, Homo Sapiens; identical to SEQ ID NO: 13986

SEQ ID NO: 67573 - DNA, 415 bp, Homo Sapiens; identical to SEQ ID NO: 14004

SEQ ID NO: 67574 - DNA, 759 bp, Homo Sapiens; identical to SEQ ID NO: 14008

SEQ ID NO: 67575 - DNA, 338 bp, Homo Sapiens; identical to SEQ ID NO: 14014

SEQ ID NO: 67576 - DNA, 474 bp, Homo Sapiens; identical to SEQ ID NO: 14018

SEQ ID NO: 67577 - DNA, 528 bp, Homo Sapiens; identical to SEQ ID NO: 14019
  misc_feature (205)..(205): n is a, c, g, or t
  misc_feature (230)..(230): n is a, c, g, or t
  misc_feature (411)..(419): n is a, c, g, or t
  misc_feature (448)..(451): n is a, c, g, or t

SEQ ID NO: 67578 - DNA, 544 bp, Homo Sapiens; identical to SEQ ID NO: 14027

SEQ ID NO: 67579 - DNA, 503 bp, Homo Sapiens; identical to SEQ ID NO: 14035

SEQ ID NO: 67580 - DNA, 545 bp, Homo Sapiens; identical to SEQ ID NO: 14037

SEQ ID NO: 67581 - DNA, 310 bp, Homo Sapiens; identical to SEQ ID NO: 14048

SEQ ID NO: 67582 - DNA, 450 bp, Homo Sapiens; identical to SEQ ID NO: 14051

SEQ ID NO: 67583 - DNA, 518 bp, Homo Sapiens; identical to SEQ ID NO: 14052

SEQ ID NO: 67584 - DNA, 1146 bp, Homo Sapiens; identical to SEQ ID NO: 14053

SEQ ID NO: 67585 - DNA, 528 bp, Homo Sapiens; identical to SEQ ID NO: 14062
  misc_feature (378)..(378): n is a, c, g, or t
  misc_feature (380)..(380): n is a, c, g, or t
  misc_feature (409)..(409): n is a, c, g, or t
  misc_feature (481)..(481): n is a, c, g, or t

SEQ ID NO: 67586 - DNA, 392 bp, Homo Sapiens; identical to SEQ ID NO: 14065

SEQ ID NO: 67587 - DNA, 496 bp, Homo Sapiens; identical to SEQ ID NO: 14069

SEQ ID NO: 67588 - DNA, 475 bp, Homo Sapiens; identical to SEQ ID NO: 14073

SEQ ID NO: 67589 - DNA, 465 bp, Homo Sapiens; identical to SEQ ID NO: 14076

SEQ ID NO: 67590 - DNA, 494 bp, Homo Sapiens; identical to SEQ ID NO: 14078
  misc_feature (60)..(110): n is a, c, g, or t

SEQ ID NO: 67591 - DNA, 631 bp, Homo Sapiens; identical to SEQ ID NO: 14083

SEQ ID NO: 67592 - DNA, 667 bp, Homo Sapiens; identical to SEQ ID NO: 14086
  misc_feature (596)..(596): n is a, c, g, or t
  misc_feature (599)..(599): n is a, c, g, or t

SEQ ID NO: 67593 - DNA, 388 bp, Homo Sapiens; identical to SEQ ID NO: 14091

SEQ ID NO: 67594 - DNA, 414 bp, Homo Sapiens; identical to SEQ ID NO: 14104
  misc_feature (229)..(229): n is a, c, g, or t

SEQ ID NO: 67595 - DNA, 335 bp, Homo Sapiens; identical to SEQ ID NO: 14106

SEQ ID NO: 67596 - DNA, 937 bp, Homo Sapiens; identical to SEQ ID NO: 14110

SEQ ID NO: 67597 - DNA, 971 bp, Homo Sapiens; identical to SEQ ID NO: 14131

SEQ ID NO: 67598 - DNA, 573 bp, Homo Sapiens; identical to SEQ ID NO: 14132

SEQ ID NO: 67599 - DNA, 309 bp, Homo Sapiens; identical to SEQ ID NO: 14133

SEQ ID NO: 67600 - DNA, 296 bp, Homo Sapiens; identical to SEQ ID NO: 14137

SEQ ID NO: 67601 - DNA, 582 bp, Homo Sapiens; identical to SEQ ID NO: 14144
  misc_feature (444)..(444): n is a, c, g, or t

SEQ ID NO: 67602 - DNA, 993 bp, Homo Sapiens; identical to SEQ ID NO: 14155

SEQ ID NO: 67603 - DNA, 833 bp, Homo Sapiens; identical to SEQ ID NO: 14156
  misc_feature (645)..(741): n is a, c, g, or t

SEQ ID NO: 67604 - DNA, 585 bp, Homo Sapiens; identical to SEQ ID NO: 14158

SEQ ID NO: 67605 - DNA, 350 bp, Homo Sapiens; identical to SEQ ID NO: 14166

SEQ ID NO: 67606 - DNA, 394 bp, Homo Sapiens; identical to SEQ ID NO: 14174

SEQ ID NO: 67607 - DNA, 623 bp, Homo Sapiens; identical to SEQ ID NO: 14185
  misc_feature (613)..(613): n is a, c, g, or t

SEQ ID NO: 67608 - DNA, 483 bp, Homo Sapiens; identical to SEQ ID NO: 14189
  misc_feature (23)..(23): n is a, c, g, or t
  misc_feature (238)..(239): n is a, c, g, or t
  misc_feature (460)..(460): n is a, c, g, or t

SEQ ID NO: 67609 - DNA, 353 bp, Homo Sapiens; identical to SEQ ID NO: 14192

SEQ ID NO: 67610 - DNA, 506 bp, Homo Sapiens; identical to SEQ ID NO: 14197

SEQ ID NO: 67611 - DNA, 273 bp, Homo Sapiens; identical to SEQ ID NO: 14198

SEQ ID NO: 67612 - DNA, 496 bp, Homo Sapiens; identical to SEQ ID NO: 14211

SEQ ID NO: 67613 - DNA, 459 bp, Homo Sapiens; identical to SEQ ID NO: 14216
  misc_feature (59)..(75): n is a, c, g, or t

SEQ ID NO: 67614 - DNA, 514 bp, Homo Sapiens; identical to SEQ ID NO: 14233
  misc_feature (368)..(368): n is a, c, g, or t

SEQ ID NO: 67615 - DNA, 758 bp, Homo Sapiens; identical to SEQ ID NO: 14234
  misc_feature (650)..(650): n is a, c, g, or t

SEQ ID NO: 67616 - DNA, 385 bp, Homo Sapiens; identical to SEQ ID NO: 14238

SEQ ID NO: 67617 - DNA, 890 bp, Homo Sapiens; identical to SEQ ID NO: 14247

SEQ ID NO: 67618 - DNA, 564 bp, Homo Sapiens; identical to SEQ ID NO: 14250

SEQ ID NO: 67619 - DNA, 724 bp, Homo Sapiens; identical to SEQ ID NO: 14255

SEQ ID NO: 67620 - DNA, 579 bp, Homo Sapiens; identical to SEQ ID NO: 14262

SEQ ID NO: 67621 - DNA, 595 bp, Homo Sapiens; identical to SEQ ID NO: 14271

SEQ ID NO: 67622 - DNA, 300 bp, Homo Sapiens; identical to SEQ ID NO: 14275

SEQ ID NO: 67623 - DNA, 596 bp, Homo Sapiens; identical to SEQ ID NO: 14278

SEQ ID NO: 67624 - DNA, 532 bp, Homo Sapiens; identical to SEQ ID NO: 14288

SEQ ID NO: 67625 - DNA, 643 bp, Homo Sapiens; identical to SEQ ID NO: 14290

SEQ ID NO: 67626 - DNA, 360 bp, Homo Sapiens; identical to SEQ ID NO: 14291

SEQ ID NO: 67627 - DNA, 486 bp, Homo Sapiens; identical to SEQ ID NO: 14307

SEQ ID NO: 67628 - DNA, 599 bp, Homo Sapiens; identical to SEQ ID NO: 14311

SEQ ID NO: 67629 - DNA, 633 bp, Homo Sapiens; identical to SEQ ID NO: 14327
  misc_feature (523)..(523): n is a, c, g, or t

SEQ ID NO: 67630 - DNA, 932 bp, Homo Sapiens; identical to SEQ ID NO: 14347
  misc_feature (472)..(508): n is a, c, g, or t
  misc_feature (776)..(855): n is a, c, g, or t

SEQ ID NO: 67631 - DNA, 742 bp, Homo Sapiens; identical to SEQ ID NO: 14352

SEQ ID NO: 67632 - DNA, 328 bp, Homo Sapiens; identical to SEQ ID NO: 14369

SEQ ID NO: 67633 - DNA, 739 bp, Homo Sapiens; identical to SEQ ID NO: 14370

SEQ ID NO: 67634 - DNA, 306 bp, Homo Sapiens; identical to SEQ ID NO: 14373

SEQ ID NO: 67635 - DNA, 919 bp, Homo Sapiens; identical to SEQ ID NO: 14376

SEQ ID NO: 67636 - DNA, 671 bp, Homo Sapiens; identical to SEQ ID NO: 14383

SEQ ID NO: 67637 - DNA, 299 bp, Homo Sapiens; identical to SEQ ID NO: 14384

SEQ ID NO: 67638 - DNA, 474 bp, Homo Sapiens; identical to SEQ ID NO: 14386

SEQ ID NO: 67639 - DNA, 336 bp, Homo Sapiens; identical to SEQ ID NO: 14390
  misc_feature (62)..(71): n is a, c, g, or t

SEQ ID NO: 67640 - DNA, 646 bp, Homo Sapiens; identical to SEQ ID NO: 14394

SEQ ID NO: 67641 - DNA, 1529 bp, Homo Sapiens; identical to SEQ ID NO: 14406
  misc_feature (67)..(104): n is a, c, g, or t
  misc_feature (244)..(264): n is a, c, g, or t

SEQ ID NO: 67642 - DNA, 851 bp, Homo Sapiens; identical to SEQ ID NO: 14410

SEQ ID NO: 67643 - DNA, 906 bp, Homo Sapiens; identical to SEQ ID NO: 14412

SEQ ID NO: 67644 - DNA, 519 bp, Homo Sapiens; identical to SEQ ID NO: 14423

SEQ ID NO: 67645 - DNA, 456 bp, Homo Sapiens; identical to SEQ ID NO: 14431

SEQ ID NO: 67646 - DNA, 497 bp, Homo Sapiens; identical to SEQ ID NO: 14433

SEQ ID NO: 67647 - DNA, 558 bp, Homo Sapiens; identical to SEQ ID NO: 14438
  misc_feature (440)..(452): n is a, c, g, or t

SEQ ID NO: 67648 - DNA, 1474 bp, Homo Sapiens; identical to SEQ ID NO: 14443
  misc_feature (110)..(110): n is a, c, g, or t
  misc_feature (618)..(626): n is a, c, g, or t
  misc_feature (707)..(792): n is a, c, g, or t
  misc_feature (869)..(877): n is a, c, g, or t
  misc_feature (1068)..(1211): n is a, c, g, or t

SEQ ID NO: 67649 - DNA, 831 bp, Homo Sapiens; identical to SEQ ID NO: 14446

SEQ ID NO: 67650 - DNA, 374 bp, Homo Sapiens; identical to SEQ ID NO: 14448

SEQ ID NO: 67651 - DNA, 575 bp, Homo Sapiens; identical to SEQ ID NO: 14452

SEQ ID NO: 67652 - DNA, 1351 bp, Homo Sapiens; identical to SEQ ID NO: 14460

SEQ ID NO: 67653 - DNA, 488 bp, Homo Sapiens; identical to SEQ ID NO: 14469

SEQ ID NO: 67654 - DNA, 1397 bp, Homo Sapiens; identical to SEQ ID NO: 14471
  misc_feature (348)..(348): n is a, c, g, or t
  misc_feature (970)..(1032): n is a, c, g, or t

SEQ ID NO: 67655 - DNA, 1179 bp, Homo Sapiens; identical to SEQ ID NO: 14475
  misc_feature (470)..(472): n is a, c, g, or t
  misc_feature (474)..(474): n is a, c, g, or t
  misc_feature (476)..(476): n is a, c, g, or t

SEQ ID NO: 67656 - DNA, 1087 bp, Homo Sapiens; identical to SEQ ID NO: 14479

SEQ ID NO: 67657 - DNA, 558 bp, Homo Sapiens; identical to SEQ ID NO: 14486
  misc_feature (17)..(17): n is a, c, g, or t

SEQ ID NO: 67658 - DNA, 1363 bp, Homo Sapiens; identical to SEQ ID NO: 14488
  misc_feature (299)..(299): n is a, c, g, or t
  misc_feature (579)..(579): n is a, c, g, or t
  misc_feature (583)..(608): n is a, c, g, or t
  misc_feature (613)..(613): n is a, c, g, or t
  misc_feature (625)..(625): n is a, c, g, or t
  misc_feature (627)..(627): n is a, c, g, or t
  misc_feature (651)..(661): n is a, c, g, or t
  misc_feature (663)..(663): n is a, c, g, or t
  misc_feature (679)..(695): n is a, c, g, or t
  misc_feature (698)..(706): n is a, c, g, or t
  misc_feature (712)..(716): n is a, c, g, or t
  misc_feature (721)..(751): n is a, c, g, or t
  misc_feature (756)..(758): n is a, c, g, or t
  misc_feature (760)..(760): n is a, c, g, or t
  misc_feature (762)..(762): n is a, c, g, or t
  misc_feature (764)..(765): n is a, c, g, or t
  misc_feature (767)..(768): n is a, c, g, or t
  misc_feature (775)..(776): n is a, c, g, or t
  misc_feature (780)..(780): n is a, c, g, or t
  misc_feature (784)..(784): n is a, c, g, or t
  misc_feature (786)..(786): n is a, c, g, or t
  misc_feature (788)..(789): n is a, c, g, or t
  misc_feature (791)..(798): n is a, c, g, or t
  misc_feature (805)..(910): n is a, c, g, or t

SEQ ID NO: 67659 - DNA, 795 bp, Homo Sapiens; identical to SEQ ID NO: 14497

SEQ ID NO: 67660 - DNA, 911 bp, Homo Sapiens; identical to SEQ ID NO: 14499

SEQ ID NO: 67661 - DNA, 682 bp, Homo Sapiens; identical to SEQ ID NO: 14515

SEQ ID NO: 67662 - DNA, 578 bp, Homo Sapiens; identical to SEQ ID NO: 14518

SEQ ID NO: 67663 - DNA, 347 bp, Homo Sapiens; identical to SEQ ID NO: 14525

SEQ ID NO: 67664 - DNA, 964 bp, Homo Sapiens; identical to SEQ ID NO: 14526
  misc_feature (819)..(819): n is a, c, g, or t
  misc_feature (830)..(830): n is a, c, g, or t

SEQ ID NO: 67665 - DNA, 912 bp, Homo Sapiens; identical to SEQ ID NO: 14544
  misc_feature (660)..(660): n is a, c, g, or t
  misc_feature (870)..(870): n is a, c, g, or t

SEQ ID NO: 67666 - DNA, 254 bp, Homo Sapiens; identical to SEQ ID NO: 14549

SEQ ID NO: 67667 - DNA, 952 bp, Homo Sapiens; identical to SEQ ID NO: 14557

SEQ ID NO: 67668 - DNA, 467 bp, Homo Sapiens; identical to SEQ ID NO: 14569

SEQ ID NO: 67669 - DNA, 469 bp, Homo Sapiens; identical to SEQ ID NO: 14577

SEQ ID NO: 67670 - DNA, 384 bp, Homo Sapiens; identical to SEQ ID NO: 14579
  misc_feature (232)..(232): n is a, c, g, or t
  misc_feature (249)..(249): n is a, c, g, or t

SEQ ID NO: 67671 - DNA, 468 bp, Homo Sapiens; identical to SEQ ID NO: 14583

SEQ ID NO: 67672 - DNA, 1073 bp, Homo Sapiens; identical to SEQ ID NO: 14590

SEQ ID NO: 67673 - DNA, 393 bp, Homo Sapiens; identical to SEQ ID NO: 14597

SEQ ID NO: 67674 - DNA, 317 bp, Homo Sapiens; identical to SEQ ID NO: 14606

SEQ ID NO: 67675 - DNA, 611 bp, Homo Sapiens; identical to SEQ ID NO: 14607

SEQ ID NO: 67676 - DNA, 1546 bp, Homo Sapiens; identical to SEQ ID NO: 14612
  misc_feature (179)..(188): n is a, c, g, or t

SEQ ID NO: 67677 - DNA, 558 bp, Homo Sapiens; identical to SEQ ID NO: 14618

SEQ ID NO: 67678 - DNA, 678 bp, Homo Sapiens; identical to SEQ ID NO: 14628

SEQ ID NO: 67679 - DNA, 364 bp, Homo Sapiens; identical to SEQ ID NO: 14629
  misc_feature (110)..(110): n is a, c, g, or t

SEQ ID NO: 67680 - DNA, 1006 bp, Homo Sapiens; identical to SEQ ID NO: 14633

SEQ ID NO: 67681 - DNA, 628 bp, Homo Sapiens; identical to SEQ ID NO: 14639

SEQ ID NO: 67682 - DNA, 988 bp, Homo Sapiens; identical to SEQ ID NO: 14645

SEQ ID NO: 67683 - DNA, 564 bp, Homo Sapiens; identical to SEQ ID NO: 14660

SEQ ID NO: 67684 - DNA, 713 bp, Homo Sapiens; identical to SEQ ID NO: 14674

SEQ ID NO: 67685 - DNA, 496 bp, Homo Sapiens; identical to SEQ ID NO: 14699

SEQ ID NO: 67686 - DNA, 488 bp, Homo Sapiens; identical to SEQ ID NO: 14703

SEQ ID NO: 67687 - DNA, 804 bp, Homo Sapiens; identical to SEQ ID NO: 14726

SEQ ID NO: 67688 - DNA, 1108 bp, Homo Sapiens; identical to SEQ ID NO: 14727
  misc_feature (1079)..(1079): n is a, c, g, or t

SEQ ID NO: 67689 - DNA, 420 bp, Homo Sapiens; identical to SEQ ID NO: 14786

SEQ ID NO: 67690 - DNA, 835 bp, Homo Sapiens; identical to SEQ ID NO: 14791

SEQ ID NO: 67691 - DNA, 816 bp, Homo Sapiens; identical to SEQ ID NO: 14807
  misc_feature (38)..(38): n is a, c, g, or t
  misc_feature (77)..(77): n is a, c, g, or t
  misc_feature (80)..(80): n is a, c, g, or t
  misc_feature (260)..(334): n is a, c, g, or t

SEQ ID NO: 67692 - DNA, 623 bp, Homo Sapiens; identical to SEQ ID NO: 14808

SEQ ID NO: 67693 - DNA, 942 bp, Homo Sapiens; identical to SEQ ID NO: 14819
  misc_feature (627)..(627): n is a, c, g, or t

SEQ ID NO: 67694 - DNA, 1285 bp, Homo Sapiens; identical to SEQ ID NO: 14822
  misc_feature (468)..(506): n is a, c, g, or t

SEQ ID NO: 67695 - DNA, 442 bp, Homo Sapiens; identical to SEQ ID NO: 14830
  misc_feature (386)..(386): n is a, c, g, or t

SEQ ID NO: 67696 - DNA, 1182 bp, Homo Sapiens; identical to SEQ ID NO: 14835

SEQ ID NO: 67697 - DNA, 1097 bp, Homo Sapiens; identical to SEQ ID NO: 14836
  misc_feature (38)..(38): n is a, c, g, or t
  misc_feature (235)..(235): n is a, c, g, or t
  misc_feature (325)..(334): n is a, c, g, or t
  misc_feature (362)..(362): n is a, c, g, or t
  misc_feature (382)..(382): n is a, c, g, or t

SEQ ID NO: 67698 - DNA, 1059 bp, Homo Sapiens; identical to SEQ ID NO: 14839
  misc_feature (51)..(103): n is a, c, g, or t

SEQ ID NO: 67699 - DNA, 889 bp, Homo Sapiens; identical to SEQ ID NO: 14842

SEQ ID NO: 67700 - DNA, 697 bp, Homo Sapiens; identical to SEQ ID NO: 14846

SEQ ID NO: 67701 - DNA, 831 bp, Homo Sapiens; identical to SEQ ID NO: 14855

SEQ ID NO: 67702 - DNA, 594 bp, Homo Sapiens; identical to SEQ ID NO: 14857
  misc_feature (452)..(502): n is a, c, g, or t

SEQ ID NO: 67703 - DNA, 804 bp, Homo Sapiens; identical to SEQ ID NO: 14876
  misc_feature (162)..(224): n is a, c, g, or t

SEQ ID NO: 67704 - DNA, 732 bp, Homo Sapiens; identical to SEQ ID NO: 14879

SEQ ID NO: 67705 - DNA, 998 bp, Homo Sapiens; identical to SEQ ID NO: 14894

SEQ ID NO: 67706 - DNA, 805 bp, Homo Sapiens; identical to SEQ ID NO: 14897

SEQ ID NO: 67707 - DNA, 455 bp, Homo Sapiens; identical to SEQ ID NO: 14898

SEQ ID NO: 67708 - DNA, 761 bp, Homo Sapiens; identical to SEQ ID NO: 14912

SEQ ID NO: 67709 - DNA, 677 bp, Homo Sapiens; identical to SEQ ID NO: 14913

SEQ ID NO: 67710 - DNA, 910 bp, Homo Sapiens; identical to SEQ ID NO: 14917
  misc_feature (61)..(86): n is a, c, g, or t
  misc_feature (846)..(856): n is a, c, g, or t

SEQ ID NO: 67711 - DNA, 720 bp, Homo Sapiens; identical to SEQ ID NO: 14921

SEQ ID NO: 67712 - DNA, 835 bp, Homo Sapiens; identical to SEQ ID NO: 14926

SEQ ID NO: 67713 - DNA, 1368 bp, Homo Sapiens; identical to SEQ ID NO: 14940
  misc_feature (35)..(35): n is a, c, g, or t

SEQ ID NO: 67714 - DNA, 955 bp, Homo Sapiens; identical to SEQ ID NO: 14941
  misc_feature (137)..(137): n is a, c, g, or t
  misc_feature (195)..(195): n is a, c, g, or t
  misc_feature (202)..(203): n is a, c, g, or t
  misc_feature (206)..(213): n is a, c, g, or t
  misc_feature (713)..(731): n is a, c, g, or t

SEQ ID NO: 67715 - DNA, 944 bp, Homo Sapiens; identical to SEQ ID NO: 14946

SEQ ID NO: 67716 - DNA, 1555 bp, Homo Sapiens; identical to SEQ ID NO: 14952

SEQ ID NO: 67717 - DNA, 608 bp, Homo Sapiens; identical to SEQ ID NO: 14953

SEQ ID NO: 67718 - DNA, 817 bp, Homo Sapiens; identical to SEQ ID NO: 14954

SEQ ID NO: 67719 - DNA, 1000 bp, Homo Sapiens; identical to SEQ ID NO: 14958

SEQ ID NO: 67720 - DNA, 1086 bp, Homo Sapiens; identical to SEQ ID NO: 14963
  misc_feature (261)..(292): n is a, c, g, or t
  misc_feature (908)..(926): n is a, c, g, or t

SEQ ID NO: 67721 - DNA, 335 bp, Homo Sapiens; identical to SEQ ID NO: 14970

SEQ ID NO: 67722 - DNA, 394 bp, Homo Sapiens; identical to SEQ ID NO: 14974

SEQ ID NO: 67723 - DNA, 1528 bp, Homo Sapiens; identical to SEQ ID NO: 14982

SEQ ID NO: 67724 - DNA, 312 bp, Homo Sapiens; identical to SEQ ID NO: 14995

SEQ ID NO: 67725 - DNA, 1052 bp, Homo Sapiens; identical to SEQ ID NO: 15001
  misc_feature (832)..(899): n is a, c, g, or t

SEQ ID NO: 67726 - DNA, 763 bp, Homo Sapiens; identical to SEQ ID NO: 15008
  misc_feature (47)..(72): n is a, c, g, or t
  misc_feature (678)..(693): n is a, c, g, or t

SEQ ID NO: 67727 - DNA, 880 bp, Homo Sapiens; identical to SEQ ID NO: 15011

SEQ ID NO: 67728 - DNA, 888 bp, Homo Sapiens; identical to SEQ ID NO: 15015
  misc_feature (14)..(14): n is a, c, g, or t

SEQ ID NO: 67729 - DNA, 441 bp, Homo Sapiens; identical to SEQ ID NO: 15018

SEQ ID NO: 67730 - DNA, 693 bp, Homo Sapiens; identical to SEQ ID NO: 15019

SEQ ID NO: 67731 - DNA, 1195 bp, Homo Sapiens; identical to SEQ ID NO: 15020
  misc_feature (34)..(35): n is a, c, g, or t
  misc_feature (37)..(37): n is a, c, g, or t

SEQ ID NO: 67732 - DNA, 458 bp, Homo Sapiens; identical to SEQ ID NO: 15027

SEQ ID NO: 67733 - DNA, 1059 bp, Homo Sapiens; identical to SEQ ID NO: 15031
  misc_feature (61)..(69): n is a, c, g, or t

SEQ ID NO: 67734 - DNA, 665 bp, Homo Sapiens; identical to SEQ ID NO: 15041

SEQ ID NO: 67735 - DNA, 1072 bp, Homo Sapiens; identical to SEQ ID NO: 15046

SEQ ID NO: 67736 - DNA, 776 bp, Homo Sapiens; identical to SEQ ID NO: 15050

SEQ ID NO: 67737 - DNA, 1149 bp, Homo Sapiens; identical to SEQ ID NO: 15052

SEQ ID NO: 67738 - DNA, 1622 bp, Homo Sapiens; identical to SEQ ID NO: 15053
  misc_feature (413)..(415): n is a, c, g, or t

SEQ ID NO: 67739 - DNA, 422 bp, Homo Sapiens; identical to SEQ ID NO: 15055

SEQ ID NO: 67740 - DNA, 2095 bp, Homo Sapiens; identical to SEQ ID NO: 15058
  misc_feature (127)..(127): n is a, c, g, or t
  misc_feature (355)..(355): n is a, c, g, or t
  misc_feature (491)..(491): n is a, c, g, or t

SEQ ID NO: 67741 - DNA, 539 bp, Homo Sapiens; identical to SEQ ID NO: 15060

SEQ ID NO: 67742 - DNA, 741 bp, Homo Sapiens; identical to SEQ ID NO: 15062

SEQ ID NO: 67743 - DNA, 945 bp, Homo Sapiens; identical to SEQ ID NO: 15063

SEQ ID NO: 67744 - DNA, 1467 bp, Homo Sapiens; identical to SEQ ID NO: 15066

SEQ ID NO: 67745 - DNA, 1542 bp, Homo Sapiens; identical to SEQ ID NO: 15085
  misc_feature (202)..(202): n is a, c, g, or t
  misc_feature (204)..(204): n is a, c, g, or t
  misc_feature (206)..(207): n is a, c, g, or t
  misc_feature (210)..(211): n is a, c, g, or t
  misc_feature (213)..(214): n is a, c, g, or t
  misc_feature (217)..(219): n is a, c, g, or t
  misc_feature (222)..(222): n is a, c, g, or t
  misc_feature (224)..(224): n is a, c, g, or t
  misc_feature (226)..(227): n is a, c, g, or t
  misc_feature (328)..(383): n is a, c, g, or t

SEQ ID NO: 67746 - DNA, 950 bp, Homo Sapiens; identical to SEQ ID NO: 15094
  misc_feature (324)..(343): n is a, c, g, or t
  misc_feature (833)..(833): n is a, c, g, or t
  misc_feature (914)..(915): n is a, c, g, or t

SEQ ID NO: 67747 - DNA, 789 bp, Homo Sapiens; identical to SEQ ID NO: 15098

SEQ ID NO: 67748 - DNA, 772 bp, Homo Sapiens; identical to SEQ ID NO: 15099

SEQ ID NO: 67749 - DNA, 719 bp, Homo Sapiens; identical to SEQ ID NO: 15101

SEQ ID NO: 67750 - DNA, 933 bp, Homo Sapiens; identical to SEQ ID NO: 15104

SEQ ID NO: 67751 - DNA, 1025 bp, Homo Sapiens; identical to SEQ ID NO: 15105

SEQ ID NO: 67752 - DNA, 288 bp, Homo Sapiens; identical to SEQ ID NO: 15107

SEQ ID NO: 67753 - DNA, 1411 bp, Homo Sapiens; identical to SEQ ID NO: 15114
  misc_feature (270)..(296): n is a, c, g, or t

SEQ ID NO: 67754 - DNA, 402 bp, Homo Sapiens; identical to SEQ ID NO: 15117

SEQ ID NO: 67755 - DNA, 879 bp, Homo Sapiens; identical to SEQ ID NO: 15123

SEQ ID NO: 67756 - DNA, 992 bp, Homo Sapiens; identical to SEQ ID NO: 15132
  misc_feature (76)..(76): n is a, c, g, or t
  misc_feature (79)..(79): n is a, c, g, or t
  misc_feature (81)..(82): n is a, c, g, or t
  misc_feature (84)..(87): n is a, c, g, or t
  misc_feature (94)..(101): n is a, c, g, or t
  misc_feature (168)..(168): n is a, c, g, or t
  misc_feature (276)..(276): n is a, c, g, or t

SEQ ID NO: 67757 - DNA, 1063 bp, Homo Sapiens; identical to SEQ ID NO: 15142
  misc_feature (55)..(73): n is a, c, g, or t
  misc_feature (107)..(117): n is a, c, g, or t
  misc_feature (345)..(355): n is a, c, g, or t
  misc_feature (422)..(439): n is a, c, g, or t
  misc_feature (447)..(447): n is a, c, g, or t
  misc_feature (491)..(503): n is a, c, g, or t
  misc_feature (524)..(532): n is a, c, g, or t
  misc_feature (561)..(573): n is a, c, g, or t
  misc_feature (609)..(623): n is a, c, g, or t
  misc_feature (690)..(701): n is a, c, g, or t

SEQ ID NO: 67758 - DNA, 833 bp, Homo Sapiens; identical to SEQ ID NO: 15143
  misc_feature (785)..(785): n is a, c, g, or t

SEQ ID NO: 67759 - DNA, 669 bp, Homo Sapiens; identical to SEQ ID NO: 15149
  misc_feature (277)..(309): n is a, c, g, or t

SEQ ID NO: 67760 - DNA, 607 bp, Homo Sapiens; identical to SEQ ID NO: 15158
  misc_feature (42)..(97): n is a, c, g, or t

SEQ ID NO: 67761 - DNA, 570 bp, Homo Sapiens; identical to SEQ ID NO: 15159
  misc_feature (430)..(465): n is a, c, g, or t

SEQ ID NO: 67762 - DNA, 738 bp, Homo Sapiens; identical to SEQ ID NO: 15164
  misc_feature (28)..(28): n is a, c, g, or t

SEQ ID NO: 67763 - DNA, 1188 bp, Homo Sapiens; identical to SEQ ID NO: 15167

SEQ ID NO: 67764 - DNA, 727 bp, Homo Sapiens; identical to SEQ ID NO: 15175

SEQ ID NO: 67765 - DNA, 393 bp, Homo Sapiens; identical to SEQ ID NO: 15176
  misc_feature (197)..(238): n is a, c, g, or t

SEQ ID NO: 67766 - DNA, 684 bp, Homo Sapiens; identical to SEQ ID NO: 15178

SEQ ID NO: 67767 - DNA, 528 bp, Homo Sapiens; identical to SEQ ID NO: 15188

SEQ ID NO: 67768 - DNA, 829 bp, Homo Sapiens; identical to SEQ ID NO: 15189
  misc_feature (50)..(60): n is a, c, g, or t

SEQ ID NO: 67769 - DNA, 429 bp, Homo Sapiens; identical to SEQ ID NO: 15190

SEQ ID NO: 67770 - DNA, 1955 bp, Homo Sapiens; identical to SEQ ID NO: 15194
  misc_feature (49)..(49): n is a, c, g, or t
  misc_feature (95)..(95): n is a, c, g, or t

SEQ ID NO: 67771 - DNA, 766 bp, Homo Sapiens; identical to SEQ ID NO: 15209
  misc_feature (30)..(31): n is a, c, g, or t
  misc_feature (174)..(174): n is a, c, g, or t

SEQ ID NO: 67772 - DNA, 415 bp, Homo Sapiens; identical to SEQ ID NO: 15213

SEQ ID NO: 67773 - DNA, 1198 bp, Homo Sapiens; identical to SEQ ID NO: 15214

SEQ ID NO: 67774 - DNA, 1376 bp, Homo Sapiens; identical to SEQ ID NO: 15223

SEQ ID NO: 67775 - DNA, 1275 bp, Homo Sapiens; identical to SEQ ID NO: 15234
  misc_feature (155)..(155): n is a, c, g, or t
  misc_feature (256)..(297): n is a, c, g, or t

SEQ ID NO: 67776 - DNA, 673 bp, Homo Sapiens; identical to SEQ ID NO: 15236
  misc_feature (211)..(330): n is a, c, g, or t

SEQ ID NO: 67777 - DNA, 1083 bp, Homo Sapiens; identical to SEQ ID NO: 15237

SEQ ID NO: 67778 - DNA, 1373 bp, Homo Sapiens; identical to SEQ ID NO: 15241
  misc_feature (1237)..(1245): n is a, c, g, or t

SEQ ID NO: 67779 - DNA, 914 bp, Homo Sapiens; identical to SEQ ID NO: 15248

SEQ ID NO: 67780 - DNA, 502 bp, Homo Sapiens; identical to SEQ ID NO: 15253

SEQ ID NO: 67781 - DNA, 1067 bp, Homo Sapiens; identical to SEQ ID NO: 15258

SEQ ID NO: 67782 - DNA, 657 bp, Homo Sapiens; identical to SEQ ID NO: 15264

SEQ ID NO: 67783 - DNA, 751 bp, Homo Sapiens; identical to SEQ ID NO: 15278

SEQ ID NO: 67784 - DNA, 517 bp, Homo Sapiens; identical to SEQ ID NO: 22010

SEQ ID NO: 67785 - DNA, 966 bp, Homo Sapiens; identical to SEQ ID NO: 22017

SEQ ID NO: 67786 - DNA, 848 bp, Homo Sapiens; identical to SEQ ID NO: 22019

SEQ ID NO: 67787 - DNA, 1048 bp, Homo Sapiens; identical to SEQ ID NO: 22020
  misc_feature (552)..(624): n is a, c, g, or t

SEQ ID NO: 67788 - DNA, 777 bp, Homo Sapiens; identical to SEQ ID NO: 22063
  misc_feature (539)..(569): n is a, c, g, or t
  misc_feature (612)..(620): n is a, c, g, or t

SEQ ID NO: 67789 - DNA, 1263 bp, Homo Sapiens; identical to SEQ ID NO: 22065
  misc_feature (1053)..(1080): n is a, c, g, or t

SEQ ID NO: 67790 - DNA, 838 bp, Homo Sapiens; identical to SEQ ID NO: 22068

SEQ ID NO: 67791 - DNA, 1910 bp, Homo Sapiens; identical to SEQ ID NO: 22076
  misc_feature (87)..(108): n is a, c, g, or t
  misc_feature (708)..(717): n is a, c, g, or t
  misc_feature (1002)..(1010): n is a, c, g, or t
  misc_feature (1129)..(1139): n is a, c, g, or t
  misc_feature (1206)..(1218): n is a, c, g, or t

SEQ ID NO: 67792 - DNA, 1634 bp, Homo Sapiens; identical to SEQ ID NO: 22078
  misc_feature (1441)..(1461): n is a, c, g, or t

SEQ ID NO: 67793 - DNA, 951 bp, Homo Sapiens; identical to SEQ ID NO: 22082

SEQ ID NO: 67794 - DNA, 707 bp, Homo Sapiens; identical to SEQ ID NO: 22083
  misc_feature (41)..(59): n is a, c, g, or t

SEQ ID NO: 67795 - DNA, 1743 bp, Homo Sapiens; identical to SEQ ID NO: 22084
  misc_feature (1018)..(1063): n is a, c, g, or t
  misc_feature (1332)..(1349): n is a, c, g, or t

SEQ ID NO: 67796 - DNA, 953 bp, Homo Sapiens; identical to SEQ ID NO: 22087

SEQ ID NO: 67797 - DNA, 839 bp, Homo Sapiens; identical to SEQ ID NO: 22088

SEQ ID NO: 67798 - DNA, 642 bp, Homo Sapiens; identical to SEQ ID NO: 22090

SEQ ID NO: 67799 - DNA, 1035 bp, Homo Sapiens; identical to SEQ ID NO: 22095

SEQ ID NO: 67800 - DNA, 501 bp, Homo Sapiens; identical to SEQ ID NO: 22096

SEQ ID NO: 67801 - DNA, 938 bp, Homo Sapiens; identical to SEQ ID NO: 22108
  misc_feature (209)..(245): n is a, c, g, or t
  misc_feature (317)..(330): n is a, c, g, or t
  misc_feature (430)..(474): n is a, c, g, or t
  misc_feature (505)..(533): n is a, c, g, or t

SEQ ID NO: 67802 - DNA, 640 bp, Homo Sapiens; identical to SEQ ID NO: 22150

SEQ ID NO: 67803 - DNA, 879 bp, Homo Sapiens; identical to SEQ ID NO: 22160

SEQ ID NO: 67804 - DNA, 1401 bp, Homo Sapiens; identical to SEQ ID NO: 22163
  misc_feature (1168)..(1176): n is a, c, g, or t

SEQ ID NO: 67805 - DNA, 1083 bp, Homo Sapiens; identical to SEQ ID NO: 22189

SEQ ID NO: 67806 - DNA, 828 bp, Homo Sapiens; identical to SEQ ID NO: 22198
  misc_feature (510)..(564): n is a, c, g, or t

SEQ ID NO: 67807 - DNA, 1175 bp, Homo Sapiens; identical to SEQ ID NO: 22199

SEQ ID NO: 67808 - DNA, 583 bp, Homo Sapiens; identical to SEQ ID NO: 22204
  misc_feature (494)..(510): n is a, c, g, or t

SEQ ID NO: 67809 - DNA, 846 bp, Homo Sapiens; identical to SEQ ID NO: 22215

SEQ ID NO: 67810 - DNA, 1216 bp, Homo Sapiens; identical to SEQ ID NO: 22221
  misc_feature (81)..(102): n is a, c, g, or t

SEQ ID NO: 67811 - DNA, 545 bp, Homo Sapiens; identical to SEQ ID NO: 22227

SEQ ID NO: 67812 - DNA, 1215 bp, Homo Sapiens; identical to SEQ ID NO: 22231
  misc_feature (1076)..(1084): n is a, c, g, or t

SEQ ID NO: 67813 - DNA, 500 bp, Homo Sapiens; identical to SEQ ID NO: 22243

SEQ ID NO: 67814 - DNA, 1037 bp, Homo Sapiens; identical to SEQ ID NO: 15287
  misc_feature (191)..(257): n is a, c, g, or t
  misc_feature (289)..(289): n is a, c, g, or t
  misc_feature (295)..(295): n is a, c, g, or t
  misc_feature (863)..(927): n is a, c, g, or t

SEQ ID NO: 67815 - DNA, 501 bp, Homo Sapiens; identical to SEQ ID NO: 15296

SEQ ID NO: 67816 - DNA, 1105 bp, Homo Sapiens; identical to SEQ ID NO: 15307

SEQ ID NO: 67817 - DNA, 510 bp, Homo Sapiens; identical to SEQ ID NO: 15308

SEQ ID NO: 67818 - DNA, 596 bp, Homo Sapiens; identical to SEQ ID NO: 15319

SEQ ID NO: 67819 - DNA, 1434 bp, Homo Sapiens; identical to SEQ ID NO: 15324

SEQ ID NO: 67820 - DNA, 689 bp, Homo Sapiens; identical to SEQ ID NO: 15326

SEQ ID NO: 67821 - DNA, 621 bp, Homo Sapiens; identical to SEQ ID NO: 15330

SEQ ID NO: 67822 - DNA, 606 bp, Homo Sapiens; identical to SEQ ID NO: 15337

SEQ ID NO: 67823 - DNA, 1045 bp, Homo Sapiens; identical to SEQ ID NO: 15362
  misc_feature (341)..(392): n is a, c, g, or t
  misc_feature (531)..(554): n is a, c, g, or t

SEQ ID NO: 67824 - DNA, 987 bp, Homo Sapiens; identical to SEQ ID NO: 15380

SEQ ID NO: 67825 - DNA, 815 bp, Homo Sapiens; identical to SEQ ID NO: 15382
  misc_feature (648)..(660): n is a, c, g, or t
  misc_feature (663)..(708): n is a, c, g, or t

SEQ ID NO: 67826 - DNA, 1418 bp, Homo Sapiens; identical to SEQ ID NO: 15384
  misc_feature (196)..(326): n is a, c, g, or t
  misc_feature (800)..(821): n is a, c, g, or t
  misc_feature (957)..(1019): n is a, c, g, or t

SEQ ID NO: 67827 - DNA, 1159 bp, Homo Sapiens; identical to SEQ ID NO: 15387
  misc_feature (609)..(623): n is a, c, g, or t

SEQ ID NO: 67828 - DNA, 489 bp, Homo Sapiens; identical to SEQ ID NO: 15390

SEQ ID NO: 67829 - DNA, 517 bp, Homo Sapiens; identical to SEQ ID NO: 15391

SEQ ID NO: 67830 - DNA, 576 bp, Homo Sapiens; identical to SEQ ID NO: 15395

SEQ ID NO: 67831 - DNA, 404 bp, Homo Sapiens; identical to SEQ ID NO: 15402

SEQ ID NO: 67832 - DNA, 775 bp, Homo Sapiens; identical to SEQ ID NO: 15405

SEQ ID NO: 67833 - DNA, 1034 bp, Homo Sapiens; identical to SEQ ID NO: 15414

SEQ ID NO: 67834 - DNA, 606 bp, Homo Sapiens; identical to SEQ ID NO: 15428

SEQ ID NO: 67835 - DNA, 1319 bp, Homo Sapiens; identical to SEQ ID NO: 15433

SEQ ID NO: 67836 - DNA, 996 bp, Homo Sapiens; identical to SEQ ID NO: 15437

SEQ ID NO: 67837 - DNA, 358 bp, Homo Sapiens; identical to SEQ ID NO: 15444

SEQ ID NO: 67838 - DNA, 454 bp, Homo Sapiens; identical to SEQ ID NO: 15453

SEQ ID NO: 67839 - DNA, 917 bp, Homo Sapiens; identical to SEQ ID NO: 15454
  misc_feature (658)..(658): n is a, c, g, or t
  misc_feature (697)..(697): n is a, c, g, or t
  misc_feature (706)..(706): n is a, c, g, or t
  misc_feature (711)..(711): n is a, c, g, or t
  misc_feature (725)..(725): n is a, c, g, or t
  misc_feature (730)..(730): n is a, c, g, or t
  misc_feature (733)..(733): n is a, c, g, or t
  misc_feature (760)..(760): n is a, c, g, or t
  misc_feature (763)..(763): n is a, c, g, or t
  misc_feature (772)..(772): n is a, c, g, or t
  misc_feature (781)..(781): n is a, c, g, or t
  misc_feature (784)..(784): n is a, c, g, or t
  misc_feature (787)..(787): n is a, c, g, or t
  misc_feature (791)..(791): n is a, c, g, or t
  misc_feature (815)..(816): n is a, c, g, or t
  misc_feature (823)..(823): n is a, c, g, or t
  misc_feature (832)..(832): n is a, c, g, or t
  misc_feature (840)..(840): n is a, c, g, or t
  misc_feature (876)..(876): n is a, c, g, or t

SEQ ID NO: 67840 - DNA, 650 bp, Homo Sapiens; identical to SEQ ID NO: 15466

SEQ ID NO: 67841 - DNA, 389 bp, Homo Sapiens; identical to SEQ ID NO: 15469

SEQ ID NO: 67842 - DNA, 428 bp, Homo Sapiens; identical to SEQ ID NO: 15471

SEQ ID NO: 67843 - DNA, 844 bp, Homo Sapiens; identical to SEQ ID NO: 15472
  misc_feature (699)..(708): n is a, c, g, or t

SEQ ID NO: 67844 - DNA, 606 bp, Homo Sapiens; identical to SEQ ID NO: 15473

SEQ ID NO: 67845 - DNA, 490 bp, Homo Sapiens; identical to SEQ ID NO: 15477
  misc_feature (337)..(345): n is a, c, g, or t

SEQ ID NO: 67846 - DNA, 1341 bp, Homo Sapiens; identical to SEQ ID NO: 15488

SEQ ID NO: 67847 - DNA, 1192 bp, Homo Sapiens; identical to SEQ ID NO: 15493

SEQ ID NO: 67848 - DNA, 1862 bp, Homo Sapiens; identical to SEQ ID NO: 15501
  misc_feature (68)..(68): n is a, c, g, or t
  misc_feature (72)..(72): n is a, c, g, or t
  misc_feature (126)..(126): n is a, c, g, or t
  misc_feature (158)..(158): n is a, c, g, or t

SEQ ID NO: 67849 - DNA, 835 bp, Homo Sapiens; identical to SEQ ID NO: 15507
  misc_feature (91)..(91): n is a, c, g, or t

SEQ ID NO: 67850 - DNA, 1433 bp, Homo Sapiens; identical to SEQ ID NO: 15525
  misc_feature (45)..(45): n is a, c, g, or t
  misc_feature (58)..(58): n is a, c, g, or t
  misc_feature (109)..(109): n is a, c, g, or t
  misc_feature (135)..(135): n is a, c, g, or t
  misc_feature (178)..(178): n is a, c, g, or t
  misc_feature (185)..(185): n is a, c, g, or t
  misc_feature (201)..(201): n is a, c, g, or t
  misc_feature (253)..(253): n is a, c, g, or t
  misc_feature (263)..(263): n is a, c, g, or t

SEQ ID NO: 67851 - DNA, 933 bp, Homo Sapiens; identical to SEQ ID NO: 15527
  misc_feature (155)..(155): n is a, c, g, or t
  misc_feature (255)..(282): n is a, c, g, or t
  misc_feature (525)..(540): n is a, c, g, or t

SEQ ID NO: 67852 - DNA, 923 bp, Homo Sapiens; identical to SEQ ID NO: 15529
  misc_feature (111)..(111): n is a, c, g, or t
  misc_feature (114)..(115): n is a, c, g, or t
  misc_feature (121)..(121): n is a, c, g, or t
  misc_feature (125)..(125): n is a, c, g, or t
  misc_feature (138)..(139): n is a, c, g, or t
  misc_feature (145)..(146): n is a, c, g, or t
  misc_feature (155)..(155): n is a, c, g, or t
  misc_feature (217)..(264): n is a, c, g, or t

SEQ ID NO: 67853 - DNA, 1578 bp, Homo Sapiens; identical to SEQ ID NO: 15530

SEQ ID NO: 67854 - DNA, 459 bp, Homo Sapiens; identical to SEQ ID NO: 15538
  misc_feature (306)..(355): n is a, c, g, or t
  misc_feature (424)..(424): n is a, c, g, or t
  misc_feature (430)..(430): n is a, c, g, or t

SEQ ID NO: 67855 - DNA, 803 bp, Homo Sapiens; identical to SEQ ID NO: 15549
  misc_feature (87)..(87): n is a, c, g, or t

SEQ ID NO: 67856 - DNA, 1406 bp, Homo Sapiens; identical to SEQ ID NO: 15551

SEQ ID NO: 67857 - DNA, 1037 bp, Homo Sapiens; identical to SEQ ID NO: 15555

SEQ ID NO: 67858 - DNA, 625 bp, Homo Sapiens; identical to SEQ ID NO: 15559
  misc_feature (514)..(514): n is a, c, g, or t
  misc_feature (570)..(570): n is a, c, g, or t
  misc_feature (583)..(583): n is a, c, g, or t
  misc_feature (587)..(587): n is a, c, g, or t
  misc_feature (597)..(597): n is a, c, g, or t
  misc_feature (612)..(612): n is a, c, g, or t

SEQ ID NO: 67859 - DNA, 1307 bp, Homo Sapiens; identical to SEQ ID NO: 15562

SEQ ID NO: 67860 - DNA, 1110 bp, Homo Sapiens; identical to SEQ ID NO: 15581
  misc_feature (247)..(484): n is a, c, g, or t
  misc_feature (506)..(530): n is a, c, g, or t

SEQ ID NO: 67861 - DNA, 921 bp, Homo Sapiens; identical to SEQ ID NO: 15586

SEQ ID NO: 67862 - DNA, 660 bp, Homo Sapiens; identical to SEQ ID NO: 15590

SEQ ID NO: 67863 - DNA, 1241 bp, Homo Sapiens; identical to SEQ ID NO: 15591
  misc_feature (251)..(251): n is a, c, g, or t
  misc_feature (333)..(333): n is a, c, g, or t

SEQ ID NO: 67864 - DNA, 961 bp, Homo Sapiens; identical to SEQ ID NO: 15597

SEQ ID NO: 67865 - DNA, 1272 bp, Homo Sapiens; identical to SEQ ID NO: 15604
  misc_feature (458)..(458): n is a, c, g, or t
  misc_feature (509)..(534): n is a, c, g, or t
  misc_feature (536)..(536): n is a, c, g, or t
  misc_feature (837)..(851): n is a, c, g, or t
  misc_feature (1046)..(1087): n is a, c, g, or t

SEQ ID NO: 67866 - DNA, 912 bp, Homo Sapiens; identical to SEQ ID NO: 15605
  misc_feature (55)..(112): n is a, c, g, or t
  misc_feature (135)..(135): n is a, c, g, or t

SEQ ID NO: 67867 - DNA, 918 bp, Homo Sapiens; identical to SEQ ID NO: 15609

SEQ ID NO: 67868 - DNA, 419 bp, Homo Sapiens; identical to SEQ ID NO: 15620
  misc_feature (356)..(365): n is a, c, g, or t

SEQ ID NO: 67869 - DNA, 1571 bp, Homo Sapiens; identical to SEQ ID NO: 15633

SEQ ID NO: 67870 - DNA, 709 bp, Homo Sapiens; identical to SEQ ID NO: 15635

SEQ ID NO: 67871 - DNA, 502 bp, Homo Sapiens; identical to SEQ ID NO: 15643

SEQ ID NO: 67872 - DNA, 1182 bp, Homo Sapiens; identical to SEQ ID NO: 15644

SEQ ID NO: 67873 - DNA, 794 bp, Homo Sapiens; identical to SEQ ID NO: 15653

SEQ ID NO: 67874 - DNA, 492 bp, Homo Sapiens; identical to SEQ ID NO: 15654
  misc_feature (452)..(452): n is a, c, g, or t

SEQ ID NO: 67875 - DNA, 690 bp, Homo Sapiens; identical to SEQ ID NO: 15669
  misc_feature (13)..(13): n is a, c, g, or t
  misc_feature (71)..(71): n is a, c, g, or t

SEQ ID NO: 67876 - DNA, 458 bp, Homo Sapiens; identical to SEQ ID NO: 15683
  misc_feature (222)..(253): n is a, c, g, or t
  misc_feature (316)..(316): n is a, c, g, or t

SEQ ID NO: 67877 - DNA, 590 bp, Homo Sapiens; identical to SEQ ID NO: 15690
  misc_feature (552)..(552): n is a, c, g, or t

SEQ ID NO: 67878 - DNA, 1839 bp, Homo Sapiens; identical to SEQ ID NO: 15697
  misc_feature (577)..(589): n is a, c, g, or t

SEQ ID NO: 67879 - DNA, 581 bp, Homo Sapiens; identical to SEQ ID NO: 15731

SEQ ID NO: 67880 - DNA, 705 bp, Homo Sapiens; identical to SEQ ID NO: 15741

SEQ ID NO: 67881 - DNA, 441 bp, Homo Sapiens; identical to SEQ ID NO: 15749
  misc_feature (332)..(332): n is a, c, g, or t
  misc_feature (396)..(396): n is a, c, g, or t
  misc_feature (422)..(422): n is a, c, g, or t

SEQ ID NO: 67882 - DNA, 1089 bp, Homo Sapiens; identical to SEQ ID NO: 15751

SEQ ID NO: 67883 - DNA, 463 bp, Homo Sapiens; identical to SEQ ID NO: 15753
  misc_feature (220)..(270): n is a, c, g, or t

SEQ ID NO: 67884 - DNA, 1617 bp, Homo Sapiens; identical to SEQ ID NO: 15756
  misc_feature (1541)..(1541): n is a, c, g, or t
  misc_feature (1569)..(1569): n is a, c, g, or t
  misc_feature (1579)..(1579): n is a, c, g, or t

SEQ ID NO: 67885 - DNA, 1374 bp, Homo Sapiens; identical to SEQ ID NO: 15767

SEQ ID NO: 67886 - DNA, 530 bp, Homo Sapiens; identical to SEQ ID NO: 15781

SEQ ID NO: 67887 - DNA, 586 bp, Homo Sapiens; identical to SEQ ID NO: 15787

SEQ ID NO: 67888 - DNA, 1521 bp, Homo Sapiens; identical to SEQ ID NO: 15791
  misc_feature (54)..(54): n is a, c, g, or t
  misc_feature (61)..(61): n is a, c, g, or t

SEQ ID NO: 67889 - DNA, 373 bp, Homo Sapiens; identical to SEQ ID NO: 15798
  misc_feature (99)..(99): n is a, c, g, or t

SEQ ID NO: 67890 - DNA, 473 bp, Homo Sapiens; identical to SEQ ID NO: 15800

SEQ ID NO: 67891 - DNA, 1260 bp, Homo Sapiens; identical to SEQ ID NO: 15802
  misc_feature (710)..(860): n is a, c, g, or t
  misc_feature (869)..(882): n is a, c, g, or t
  misc_feature (896)..(1019): n is a, c, g, or t
  misc_feature (1024)..(1086): n is a, c, g, or t
  misc_feature (1103)..(1111): n is a, c, g, or t

SEQ ID NO: 67892 - DNA, 1089 bp, Homo Sapiens; identical to SEQ ID NO: 15813
  misc_feature (972)..(1027): n is a, c, g, or t

SEQ ID NO: 67893 - DNA, 563 bp, Homo Sapiens; identical to SEQ ID NO: 15815

SEQ ID NO: 67894 - DNA, 591 bp, Homo Sapiens; identical to SEQ ID NO: 15816

SEQ ID NO: 67895 - DNA, 873 bp, Homo Sapiens; identical to SEQ ID NO: 15819

SEQ ID NO: 67896 - DNA, 603 bp, Homo Sapiens; identical to SEQ ID NO: 15820

SEQ ID NO: 67897 - DNA, 363 bp, Homo Sapiens; identical to SEQ ID NO: 15822

SEQ ID NO: 67898 - DNA, 502 bp, Homo Sapiens; identical to SEQ ID NO: 15845

SEQ ID NO: 67899 - DNA, 857 bp, Homo Sapiens; identical to SEQ ID NO: 15852

SEQ ID NO: 67900 - DNA, 434 bp, Homo Sapiens; identical to SEQ ID NO: 15853

SEQ ID NO: 67901 - DNA, 457 bp, Homo Sapiens; identical to SEQ ID NO: 15857

SEQ ID NO: 67902 - DNA, 429 bp, Homo Sapiens; identical to SEQ ID NO: 15865
  misc_feature (46)..(89): n is a, c, g, or t

SEQ ID NO: 67903 - DNA, 772 bp, Homo Sapiens; identical to SEQ ID NO: 15866

SEQ ID NO: 67904 - DNA, 874 bp, Homo Sapiens; identical to SEQ ID NO: 15871
  misc_feature (789)..(805): n is a, c, g, or t

SEQ ID NO: 67905 - DNA, 587 bp, Homo Sapiens; identical to SEQ ID NO: 15886

SEQ ID NO: 67906 - DNA, 427 bp, Homo Sapiens; identical to SEQ ID NO: 15891

SEQ ID NO: 67907 - DNA, 842 bp, Homo Sapiens; identical to SEQ ID NO: 15909
  misc_feature (597)..(597): n is a, c, g, or t
  misc_feature (600)..(600): n is a, c, g, or t
  misc_feature (604)..(604): n is a, c, g, or t

SEQ ID NO: 67908 - DNA, 1135 bp, Homo Sapiens; identical to SEQ ID NO: 15912

SEQ ID NO: 67909 - DNA, 1198 bp, Homo Sapiens; identical to SEQ ID NO: 15933

SEQ ID NO: 67910 - DNA, 505 bp, Homo Sapiens; identical to SEQ ID NO: 15936
  misc_feature (402)..(402): n is a, c, g, or t
  misc_feature (426)..(426): n is a, c, g, or t
  misc_feature (445)..(445): n is a, c, g, or t

SEQ ID NO: 67911 - DNA, 441 bp, Homo Sapiens; identical to SEQ ID NO: 15940

SEQ ID NO: 67912 - DNA, 637 bp, Homo Sapiens; identical to SEQ ID NO: 15955
  misc_feature (170)..(186): n is a, c, g, or t

SEQ ID NO: 67913 - DNA, 813 bp, Homo Sapiens; identical to SEQ ID NO: 15959

SEQ ID NO: 67914 - DNA, 529 bp, Homo Sapiens; identical to SEQ ID NO: 15964

SEQ ID NO: 67915 - DNA, 905 bp, Homo Sapiens; identical to SEQ ID NO: 15972

SEQ ID NO: 67916 - DNA, 802 bp, Homo Sapiens; identical to SEQ ID NO: 15981
  misc_feature (73)..(73): n is a, c, g, or t
  misc_feature (78)..(78): n is a, c, g, or t

SEQ ID NO: 67917 - DNA, 475 bp, Homo Sapiens; identical to SEQ ID NO: 15992

SEQ ID NO: 67918 - DNA, 585 bp, Homo Sapiens; identical to SEQ ID NO: 15993
  misc_feature (152)..(220): n is a, c, g, or t

SEQ ID NO: 67919 - DNA, 824 bp, Homo Sapiens; identical to SEQ ID NO: 16009
  misc_feature (663)..(702): n is a, c, g, or t

SEQ ID NO: 67920 - DNA, 564 bp, Homo Sapiens; identical to SEQ ID NO: 16012

SEQ ID NO: 67921 - DNA, 1377 bp, Homo Sapiens; identical to SEQ ID NO: 16018
  misc_feature (257)..(481): n is a, c, g, or t

SEQ ID NO: 67922 - DNA, 789 bp, Homo Sapiens; identical to SEQ ID NO: 16020
  misc_feature (717)..(717): n is a, c, g, or t

SEQ ID NO: 67923 - DNA, 1442 bp, Homo Sapiens; identical to SEQ ID NO: 16021
  misc_feature (975)..(975): n is a, c, g, or t

SEQ ID NO: 67924 - DNA, 398 bp, Homo Sapiens; identical to SEQ ID NO: 16022

SEQ ID NO: 67925 - DNA, 550 bp, Homo Sapiens; identical to SEQ ID NO: 16042
  misc_feature (405)..(427): n is a, c, g, or t

SEQ ID NO: 67926 - DNA, 574 bp, Homo Sapiens; identical to SEQ ID NO: 16047

SEQ ID NO: 67927 - DNA, 802 bp, Homo Sapiens; identical to SEQ ID NO: 16048

SEQ ID NO: 67928 - DNA, 597 bp, Homo Sapiens; identical to SEQ ID NO: 16050
  misc_feature (36)..(36): n is a, c, g, or t

SEQ ID NO: 67929 - DNA, 1646 bp, Homo Sapiens; identical to SEQ ID NO: 16054
  misc_feature (1050)..(1050): n is a, c, g, or t

SEQ ID NO: 67930 - DNA, 792 bp, Homo Sapiens; identical to SEQ ID NO: 16056

SEQ ID NO: 67931 - DNA, 661 bp, Homo Sapiens; identical to SEQ ID NO: 16057

SEQ ID NO: 67932 - DNA, 908 bp, Homo Sapiens; identical to SEQ ID NO: 16059

SEQ ID NO: 67933 - DNA, 607 bp, Homo Sapiens; identical to SEQ ID NO: 16064

SEQ ID NO: 67934 - DNA, 595 bp, Homo Sapiens; identical to SEQ ID NO: 16074
  misc_feature (558)..(558): n is a, c, g, or t

SEQ ID NO: 67935 - DNA, 621 bp, Homo Sapiens; identical to SEQ ID NO: 16077
  misc_feature (52)..(52): n is a, c, g, or t
  misc_feature (133)..(133): n is a, c, g, or t

SEQ ID NO: 67936 - DNA, 519 bp, Homo Sapiens; identical to SEQ ID NO: 16078
  misc_feature (435)..(443): n is a, c, g, or t

SEQ ID NO: 67937 - DNA, 546 bp, Homo Sapiens; identical to SEQ ID NO: 16085

SEQ ID NO: 67938 - DNA, 637 bp, Homo Sapiens; identical to SEQ ID NO: 16088
  misc_feature (137)..(155): n is a, c, g, or t
  misc_feature (467)..(482): n is a, c, g, or t

SEQ ID NO: 67939 - DNA, 492 bp, Homo Sapiens; identical to SEQ ID NO: 16098

SEQ ID NO: 67940 - DNA, 505 bp, Homo Sapiens; identical to SEQ ID NO: 16104

SEQ ID NO: 67941 - DNA, 533 bp, Homo Sapiens; identical to SEQ ID NO: 16106
  misc_feature (100)..(160): n is a, c, g, or t
  misc_feature (421)..(481): n is a, c, g, or t

SEQ ID NO: 67942 - DNA, 224 bp, Homo Sapiens; identical to SEQ ID NO: 16116

SEQ ID NO: 67943 - DNA, 656 bp, Homo Sapiens; identical to SEQ ID NO: 16126

SEQ ID NO: 67944 - DNA, 1019 bp, Homo Sapiens; identical to SEQ ID NO: 16132

SEQ ID NO: 67945 - DNA, 770 bp, Homo Sapiens; identical to SEQ ID NO: 16135

SEQ ID NO: 67946 - DNA, 477 bp, Homo Sapiens; identical to SEQ ID NO: 16139
  misc_feature (414)..(414): n is a, c, g, or t

SEQ ID NO: 67947 - DNA, 1241 bp, Homo Sapiens; identical to SEQ ID NO: 16143

SEQ ID NO: 67948 - DNA, 2348 bp, Homo Sapiens; identical to SEQ ID NO: 16152

SEQ ID NO: 67949 - DNA, 652 bp, Homo Sapiens; identical to SEQ ID NO: 16153

SEQ ID NO: 67950 - DNA, 694 bp, Homo Sapiens; identical to SEQ ID NO: 16157

SEQ ID NO: 67951 - DNA, 561 bp, Homo Sapiens; identical to SEQ ID NO: 16167

SEQ ID NO: 67952 - DNA, 519 bp, Homo Sapiens; identical to SEQ ID NO: 16174

SEQ ID NO: 67953 - DNA, 706 bp, Homo Sapiens; identical to SEQ ID NO: 16175

SEQ ID NO: 67954 - DNA, 882 bp, Homo Sapiens; identical to SEQ ID NO: 16182

SEQ ID NO: 67955 - DNA, 449 bp, Homo Sapiens; identical to SEQ ID NO: 16183

SEQ ID NO: 67956 - DNA, 317 bp, Homo Sapiens; identical to SEQ ID NO: 16188

SEQ ID NO: 67957 - DNA, 831 bp, Homo Sapiens; identical to SEQ ID NO: 16194

SEQ ID NO: 67958 - DNA, 377 bp, Homo Sapiens; identical to SEQ ID NO: 16195

SEQ ID NO: 67959 - DNA, 553 bp, Homo Sapiens; identical to SEQ ID NO: 16199

SEQ ID NO: 67960 - DNA, 797 bp, Homo Sapiens; identical to SEQ ID NO: 16200

SEQ ID NO: 67961 - DNA, 814 bp, Homo Sapiens; identical to SEQ ID NO: 16201

SEQ ID NO: 67962 - DNA, 786 bp, Homo Sapiens; identical to SEQ ID NO: 16209

SEQ ID NO: 67963 - DNA, 687 bp, Homo Sapiens; identical to SEQ ID NO: 16227

SEQ ID NO: 67964 - DNA, 964 bp, Homo Sapiens; identical to SEQ ID NO: 16229
  misc_feature (840)..(898): n is a, c, g, or t

SEQ ID NO: 67965 - DNA, 812 bp, Homo Sapiens; identical to SEQ ID NO: 16230

SEQ ID NO: 67966 - DNA, 528 bp, Homo Sapiens; identical to SEQ ID NO: 16231
  misc_feature (517)..(517): n is a, c, g, or t

SEQ ID NO: 67967 - DNA, 604 bp, Homo Sapiens; identical to SEQ ID NO: 16240

SEQ ID NO: 67968 - DNA, 581 bp, Homo Sapiens; identical to SEQ ID NO: 16241
  misc_feature (496)..(509): n is a, c, g, or t

SEQ ID NO: 67969 - DNA, 516 bp, Homo Sapiens; identical to SEQ ID NO: 16242
  misc_feature (220)..(242): n is a, c, g, or t

SEQ ID NO: 67970 - DNA, 293 bp, Homo Sapiens; identical to SEQ ID NO: 16261

SEQ ID NO: 67971 - DNA, 903 bp, Homo Sapiens; identical to SEQ ID NO: 16264

SEQ ID NO: 67972 - DNA, 839 bp, Homo Sapiens; identical to SEQ ID NO: 16270
  misc_feature (637)..(731): n is a, c, g, or t

SEQ ID NO: 67973 - DNA, 495 bp, Homo Sapiens; identical to SEQ ID NO: 16280

SEQ ID NO: 67974 - DNA, 222 bp, Homo Sapiens; identical to SEQ ID NO: 16281

SEQ ID NO: 67975 - DNA, 577 bp, Homo Sapiens; identical to SEQ ID NO: 16285

SEQ ID NO: 67976 - DNA, 233 bp, Homo Sapiens; identical to SEQ ID NO: 16286

SEQ ID NO: 67977 - DNA, 271 bp, Homo Sapiens; identical to SEQ ID NO: 16296

SEQ ID NO: 67978 - DNA, 366 bp, Homo Sapiens; identical to SEQ ID NO: 16299

SEQ ID NO: 67979 - DNA, 933 bp, Homo Sapiens; identical to SEQ ID NO: 16302

SEQ ID NO: 67980 - DNA, 376 bp, Homo Sapiens; identical to SEQ ID NO: 16321

SEQ ID NO: 67981 - DNA, 495 bp, Homo Sapiens; identical to SEQ ID NO: 16322

SEQ ID NO: 67982 - DNA, 378 bp, Homo Sapiens; identical to SEQ ID NO: 16332

SEQ ID NO: 67983 - DNA, 779 bp, Homo Sapiens; identical to SEQ ID NO: 16339

SEQ ID NO: 67984 - DNA, 555 bp, Homo Sapiens; identical to SEQ ID NO: 16342
  misc_feature (420)..(436): n is a, c, g, or t

SEQ ID NO: 67985 - DNA, 1068 bp, Homo Sapiens
  misc_feature (130)..(130): n is a, c, g, or t
  misc_feature (151)..(151): n is a, c, g, or t
  misc_feature (175)..(604): n is a, c, g, or t
cacggtgattggaagcccagtccgaaggagagcgacagttccgtagcgcagtcgaacaggagcgaggaggactccaggggacgcttgttcttatatctgtcggttcgcacctctgattgaggtcgatttntgtgctcgtcaggggcggacntatggaaaacgccagcacgcgccnnnnnnnnnnnnnnnnnnnnnnnnnnnnnnnnnnnnnnnnnnnnnnnnnnnnnnnnnnnnnnnnnnnnnnnnnnnnnnnnnnnnnnnnnnnnnnnnnnnnnnnnnnnnnnnnnnnnnnnnnnnnnnnnnnnnnnnnnnnnnnnnnnnnnnnnnnnnnnnnnnnnnnnnnnnnnnnnnnnnnnnnnnnnnnnnnnnnnnnnnnnnnnnnnnnnnnnnnnnnnnnnnnnnnnnnnnnnnnnnnnnnnnnnnnnnnnnnnnnnnnnnnnnnnnnnnnnnnnnnnnnnnnnnnnnnnnnnnnnnnnnnnnnnnnnnnnnnnnnnnnnnnnnnnnnnnnnnnnnnnnnnnnnnnnnnnnnnnnnnnnnnnnnnnnnnnnnnnnnnnnnnnnnnnnnnnnnnnnnnnnnnnnnnnnnnnnnnnnnnnnnnnnnnnnaagaattcggcacgaggagcttttgaaacgtaagtgctaagacgagtgtgcacaagtcactgagctaatgaagaatagacccactgtctgcttggctctgctattttgtacctgtcttcacatgtggggaaacttcataactgtgcccacaaatcagagaaattcgcaaaggactagacaatgtattgcctgtgaacttcagaggcaactggaaatagtgcaactggaaatcaactagcttcatacataggcggatttgtttccagggaccaaaagcacagaagataagaaaacttttcaggtgatggccatattctcatcatatcctctctgtgtggagtctgcctgttgtcacaaaaaccttgacccaacatcaagttacaccttaacaaagggaagatacaggcatcagataaaaggtacttgtttgaaaggcagccataagggagaactgaacttaaaaa

SEQ ID NO: 67986 - DNA, 698 bp, Homo Sapiens
caaaaaggcaacttttgtttttttcttggcatcaatgaatatgcacttcagaaatctacagagaacttttttcactttgtatttgttccacagcattctagccaggagtacaaaataggagctcttcaagcagcacatgaagatggcccaggagccttcagccatccagagcagcagagcagcacctaaatctccacacacttcccagtataaccactaagaacacactagacccttggcattaggggatttatcatttccagttctattatctgggaatgactccaagggtttgtgacaagcttttgaaacgtaagtgctaagacgagtgtggacaagtcactgagctaatgaagaatagacccactgtctgcttggctctgctattttgtacctgtcttcacatgtggggaaacttcataactgtgcccacaaatcagagaaattcgcaaaggactagacaatgtattgcctgtgaacttcagaggcaactggaaatagtgcaactggaaatcaactagcttcatacataggcggatttgtttccagggaccaaaagcacagaagataagaaaacttttcaggtgatggccatattctcatcatatcctctctgtgtggagtgtgcctgttgtcacaaaaaccttgaccctacatcaagttacaccttaacaaagggaagatacaggcatcagtcc

SEQ ID NO: 67987 - DNA, 1334 bp, Homo Sapiens
  misc_feature (1214)..(1253): n is a, c, g, or t
gagcgaggcctgggtggcgaattcggcacgaggccggaggaggagtaggtgcgggtgaagatggcggcagccgaggccgcgaactgcatcatggaggtgtcctgtggccaggcggaaagcagtgagaagcccaacgctgaggacatgacatccaaagattactactttgactcctacgcacactttggcatccacgaggagatgctgaaggacgaggtgcgcaccctcacttaccgcaactccatgtttcataaccggcacctcttcaaggacaaggtggtgctggacgtcggctcgggcaccggcatcctctgcatgtttgctgccaaggccggggcccgcaaggtcatcgggatcgagtgttccagtatctctgattatgcggtgaagatcgtcaaagccaacaagttagaccacgtggtgaccatcatcaaggggaaggtggaggaggtggagctcccagtggagaaggtggacatcatcatcagcgagtggatgggctactgcctcttctacgagtccatgctcaacaccgtgctctatgcccgggacaagtggctggcgcccgatggcctcatcttcccagaccgggccacgctgtatgtgacggccatcgaggaccggcagtacaaagactacaagatccactggtgggagaacgtgtatggcttcgacatgtcttgcatcaaagatgtggccattaaggagcccctagtggatgtcgtggaccccaaacagctggtcaccaacgcctgcctcataaaggaggtggacatctataccgtcaaggtggaagacctgaccttcacctccccgttctgcctgcaagtgaagcggaatgactacgtgcacgccctggtggcctacttcaacatcgagttcacacgctgccacaagaggaccggcttctccaccagccccgagtccccgtacacgcactggaagcagacggtgttctacatggaggactacctgaccgtgaagacgggcgaggagatcttcggcaccatcggcatgcggcccaacgccaagaacaaccgggacctggacttcaccatcgacctggacttcaagggccagctgtgcgagctgtcctgctccaccgactaccggatgcgctgaggcccggctctcccgccctgcacgagcccaggggctgagcgttcctaggcggtttcggggctcccccttcctctccctccctcccgcagaannnnnnnnnnnnnnnnnnnnnnnnnnnnnnnnnnnnnnnncacatcgtgactgtgtatttcataaccttatgttttatattggttgcatttacgcccaataatcctcagctgggaaacaag

SEQ ID NO: 67988 - DNA, 533 bp, Homo Sapiens
ggaagacctgaccttcacctccccgttctgcctgcaagtgaagcggaatgactacgtgcacgccctggtggcctacttcaacatcgagttcacacgctgccacaagaggaccggcttctccaccagccccgagtccccgtacacgcactggaagcagacggtgttctacatggaggactacctgaccgtgaagacgggcgaggagatcttcggcaccatcggcatgcggcccaacgccaagaacaaccgggacctggacttcaccatcgacctggacttcaagggccagctgtgcgagctgtcctgctccaccgactaccggatgcgctgaggcccggctctcccgccctgcacgagcccaggggctgagcgttcctaggcggtttcggggctcccccttcctctccctccctcccgcagaagggggttttaggggcctgggctggggggatggggaggccacatcgtgactgtgtttttcataacttatgtttttatatggttgcatttacgccaataaatcctcagctggt

SEQ ID NO: 67989 - DNA, 1007 bp, Homo Sapiens
  misc_feature (56)..(56): n is a, c, g, or t
  misc_feature (181)..(181): n is a, c, g, or t
  misc_feature (196)..(196): n is a, c, g, or t
atatacaggatgaccaccagatgctgtttcccaagcacagaccaacctttatgtgntgcagaagttcaagttgtccgctctttccactaaccagccaggcgtcccagatagtttaagtatagcagacactctcaaggtcgcgcagactgaccagacctcaaggagagcatcgttggtcgantacactgcccctccnttaatcactttgctgttaccagacttgggcgtgctgacaccctcagcagtcagcgatgagctcatcaagctctatctgtaacctgtgagccctttcctgccaaggtgcagcttacgtagttgaggcagggtgagtagctgcttgacaccccagtgagtcaggccaaaactgagatgtgtttaatgaagatttatggagtaaggacttaaaatcatacatcttggagaacctttcttactcatttcagtcccatctaaaaatgtgtcagctattctaaatcccaacttaaattgttcttacggtttctagaaactttccttttcagtttccagaaatacaagttagataattggctacttaactgatgaaagatgagcccaagtccacctgtcttcatcctcccctgcactccagactgatctgcctaaagcacgcaagatgcaggcgaaaagcagccatacccctctgccacaaacgaccaacagctggtcaggacgttacacgcggtgccttgtaagaggcaagaaacacttgccgaatctgcgtctggcttccagtggtaagcacattcctcagcaggatcaagccaaacagtaaaaactaccaagagaacacgaggaaggcagaaacgatgtttagcaacagtattctgcatggttcactgcttaagaaaatgccttctggaatatttgtaaactgaaattctgtatgtgtaagagatgtttaaatatgtttgggtcctaaacagctttttaaaattatacttgggaataaattcagcatcttttcaaataaactctatgaaagacgc

SEQ ID NO: 67990 - DNA, 2044 bp, Homo Sapiens
  misc_feature (69)..(103): n is a, c, g, or t
  misc_feature (1554)..(1554): n is a, c, g, or t
  misc_feature (1690)..(1690): n is a, c, g, or t
  misc_feature (1918)..(1918): n is a, c, g, or t
tcactgactatatggggctccgttgagcgaacgacgagcgcagcgagtcagtgagcaaggaagcggcgnnnnnnnnnnnnnnnnnnnnnnnnnnnnnnnnnnncagtcgacggtaccggacatatgcccgggaattcggccattacggccggggtgttctatttgtaaatcattccatttgagtctttctgatgaacttggctatactgaaatctgttattttagtgaggctccaaaatgagcaaagctaggcctgattagagtagagtgactattaaaaaacataactttctaggagctataaatcaaagttttaaaaagatgttggatatatttgagtattccgatcatgaaaacagaaattgccctgcctactacaaggacagactgatgggaaattatgcacctggtcaacttagcttttaagcagacgatgctgtaaaaactaacggcttctctgatatttattgtaagttttagtactgatctccttttccagtgctgcacactcctggtttggaactttaatagcgttgcaacgaaatcctatatccagtttcctgtaatttaattgaagaaaaatacatccaaataaagactttattattaacagaccagatagcatcagaaatcatgtgactgttatgattatcagaatgtcttaactttttagggcaaagttaacactgaaagttctagcttaagtgttgaaacttttgtgggaaaaaacactcacttttgaaactcagacttcagtgtatacccaataatttaaaattatgtgaaatgttttaaatttgtgaactcgtaattactgttttaatgattcagtttcttcagagtggtaattgtataaaattgctattgcagctttacattcaatatgatgtgcctgtaaaccaaggagttttccccgtttgtaaaaagacattgtagataattgaatgtttgattttagaaaggtcattagtttcttgttacacattttgttagtctggtttttgttgcttatcgggtttaatattgttcttgaaaatagttgatgctatgttatgtataacttttctaataaaagttgtgttataagctgtaccaccgacaaccaccttctaaatcaagaacaacgcgcccacgctccccacgaccccctcacgcatcaccccgtcgcccccttcacctcacatttcctccctctcataccctccccttaccgctccccccctgccatccgtctcactctctaccgcatcacaccaacataaccttacccaacctacccacccatcctccccagcctcacgccccccgccccgaccacccctctggtccactcaaaatgaactccgaccagcgaacacgttcccacaccgcgccctcgcacctcttcgtccccgctaagcccgttgcacgccaccgactgatgctaataccataacgccactcgtcgattctcatcctacacgccgcctcctaaccgtagcgcgaacgaactcgaagtgtaatgaggcgcgttcgatcgctaccacaatccccacactcgtacacgcttaactncccgttacccgccaactacatagcaaccgcacgctcaccagcatattccgatgctacgcccctcgtacggcattaacgcatacacgtctatagtcgctgatcgttcatgtagatagataccgtcgccggcccacgncgtcgctctgcacgtggcaaaacatgacgaccgggacatcccaactccactctacctgcacgcgccgaatcagtgctaatcgcgcttcgtacttgatagtcatcacaccctgtagcacatgagcccgttactgtttaccgacatacaatcgcccgcgacaagcgatgcgaacgactcccgtaatagtacatcaaccgcgctcaaggtactgattggaacatttgtaangacttctataacgccggacgtcctacctcacacaccaccgttattaccacaactccacgcttcttattacgccataatcacacaattcgctgttacaccacatcggtttatcacgcctacacgtcg

SEQ ID NO: 67991 - DNA, 1099 bp, Homo Sapiens
cagtcgacggtaccgcatcagaggcccagcaagatcagcaagaaagaacagggaacaaaaggactcagcagatgcttcatggtcttcagcgtgctcttgctaaaactggagctgaatctatcagtttgcttgagttatgtcgaaatacgaacagaaaacaagctgccgcaaagttctacagcttcttggttcttaaaaagcagcaagctattgagctgacacaggaagaaccgtacagtgacatcatcgcaacacctggaccaaggttccatattatataaggagctagaagcattatagctagtgtttgattcactagtgcttacaaattgcccccatgtgtaggggacacagaaccctttgagaaaacttagatttttgtctgtacaaagtctttgcctttttccttcttcatttttttccagtacattaaatttgtcaatttcatctttgagggaaactgattagatgggttgtgtttgtgttctgatggagaaaacagcaccccaaggactcagaagatgattttaacagttcagaacagatgtgtgcaatattggtgcatgtaataatgttgagtggcagtcaaaagtcatgatttttatcttagttcttcattactgcattgaaaaggaaaacctgtctgagaaaatgcctgacagtttaatttaaaactatggtgtaagtctttgacgaaggaaaccacaacaacgacaacaaagcgacgtatctattccatacagtaaacactcggcaatctgaccggtcaaaccactgcatccttagggatggtatctggaaacaaacaatggtcgacctctagagatcccgaaaacaggtggtaagttgccatcaaggagcagaggtgtcacgcggaaaatcgtgcttatgacctgcatcgcctatcagcatacaagaaagataggactgacctgggttcaaacggggtacccataccgggtaaactacagccccatccgaagctcattacatgacaaaactgggactcgcactggaaaatccgggccaaccacaatggaggagccaaagtggaagcgagcataggcctggacgcgacgtagaagaggaccatcacaag

SEQ ID NO: 67992 - DNA, 1502 bp, Homo Sapiens
gcaggcggcgcggccggcggacccgttcgagacagcgcgggcggctcgggtcccctggggctccgcagcaggaggacgccatggacgacaaggagttaattgaatactttaagtctcagatgaaagaagatcctgacatggcctcagcagtggctgccatccggacgttgctggagttcttgaagagagataaaggggagacaatccagggtctgagggcgaatctcaccagtgccatagaaaccctgtgtggtgtggactcctctgtggcagtgtcctctggcggggagctcttcctccgcttcatcagtcttgcctccctggaatactccgattactccaaatgtaaaaagatcatgattgagcggggagaactttttctcaggagaatatcactgtcaagaaacaaaattgcagatctgtgccatactttcatcaaagatggagcgacaatattgactcacgcctactccagagtggtcctgagagtcctggaagcagccgtggcggccaagaagcgatttagtgtatacgtcacagagtcacagcctgatttgtcaggtaagaaaatggccaaagccctctgccacctcaacgtccctgtcactgtggtgctagatgctgctgtcggctacatcatggagaaagcagatcttgtcatagttggtgctgaaggagttgttgaaaacggaggaattattaacaagattggaaccaaccagatggctgtgtgtgccaaagcacagaacaaacctttctatgtggttgcagaaagtttcaagtttgtccggctctttccactaaaccagcaagacgtcccagataagtttaagtataaggcagacactctcaaggtcgcgcagactggacaagacctcaaagaggagcatccgtgggtcgactacactgccccttccttaatcactctgctgtttacagacctgggcgtgctgacaccctcagcagtcagcgatgagctcatcaagctctatctgtaacctgtgagccctttcctgccaaggtgcagcttacgtagttgaggcagggtgagtagctgcttgacaccccagtgagtcaggccaaaactgagatgtgtttaatgaacgatttaatggacgtaaggacttaaaatcatacatcttggagaacctttcttactcatttcagtcccatctaaaaatgtgtcagctattctaaatccaaacttaaatttgttcttacggtttctagaaactttcctttttcagttttccagaaatacaagttagataaatggctacttaactgatgaaacgatgagcccaagtccactgttctacattgctcccctgacactccagaatgatctggcctaaagcaaggcgagaatgcaggcgaaaagaagcaaccctctgcacaaatggacaaaggtggtcaggaagtacagcgcgggcttgtagaagcagaaacctgccgaatccgatctggtcccggggagcactcctagggatcagccaaacgaa

SEQ ID NO: 67993 - DNA, 760 bp, Homo Sapiens
  misc_feature (41)..(83): n is a, c, g, or t
  misc_feature (87)..(121): n is a, c, g, or t
aagatgtatagactcactatagggcgctagcgctctttgtnnnnnnnnnnnnnnnnnnnnnnnnnnnnnnnnnnnnnnnnnnnccgnnnnnnnnnnnnnnnnnnnnnnnnnnnnnnnnnnncagtcgacggtaccggacatatgcccgggaattcggccattacggccggggactgacctggtttaaagtgttctattttgtaaatcattccatttgagtctttctgatgaacttggctatactgaaatctgttattttagtgaggctccaaaatgagcaaagctaggcctgattagagtagagtgactattaaaaaacataactttctaggagctataaatcaaagttttaaaaagatgtttggatatatttgagtattccgatcatgaaaacagaaattgccctgcctactacaaggacagactgatgggaaattatgcacctggtcaacttagcttttaagcagacgatgctgtaaaaactaacggcttctctgatatttattgtaagttttagtactgatctccttttccagtgctgcacactcctggtttggaactttaatagcgttgcaacgaaatcctatatccagtttcctgtaatttaattgaagaaaaatacatccaaataaagactttattattaacagaccagatagcatcagaaatcatgtgactgttatgattatcagaatgtcttaactttttagggcaaagttaacactgaaagttctagcttaagtgttgaaacttttgtggg

SEQ ID NO: 67994 - DNA, 887 bp, Homo Sapiens
  misc_feature (52)..(61): n is a, c, g, or t
cagtcgacggtaccggacatatgcccgggaattcggccattacggccggggnnnnnnnnnncaaacaaacacttctttccatcagtaacactggcaatcttcctgttaaccactctccttagggatggtatctgaaacaacaatggtcaccctcttgagattcgttttaagtgtaattccataatgagcagaggtgtacgcgaaattgtgttatgactgatagccttcagctacaaaaagataggactgacctggtttaaagtgttctatttggtaaatcattccatttgagtctttctgatgaacttggctatactgaaatctgttattttagtgaggctccaaaatgagcaaagctaggcctgattagagtagagtgactattaaaaaacataactttctaggagctataaatcaaagttttaaaaagatgtttggatatatttgagtattccgatcatgaaaacagaaattgccctgcctactacaaggacagactgatgggaaattatgcacctggtcaacttagcttttaagcagacgatgctgtaaaaactaacggcttctctgatatttattgtaagttttagtactgatctccttttccagtgctgcacactcctggtttggaactttaatagcgttgcaacgaaatcctatatccagtttcctgtaatttaattgaagaaaaatacatcccaaataaaagaactttattaattaccagacccagaatagccttccgaaaatcattggtggacctggtttatggaattattccagaaatgggcccttttaaaccttttttttaaggggggcaaaaagtttaaacccccctttggaaaaaaggttttccttaaaggccttttaaaaaagggggggtttgg

SEQ ID NO: 67995 - DNA, 1701 bp, Homo Sapiens
  misc_feature (767)..(767): n is a, c, g, or t
  misc_feature (945)..(1004): n is a, c, g, or t
  misc_feature (1351)..(1351): n is a, c, g, or t
  misc_feature (1358)..(1358): n is a, c, g, or t
  misc_feature (1455)..(1455): n is a, c, g, or t
  misc_feature (1472)..(1472): n is a, c, g, or t
ggtatgaagatcaatataaggatgataattttggagaaggaaatgatggtggaatattagatgacaaacttattagtaataatgatggcggtatctttgatgatccccctgccctctctgaggcaggggtgatgttgccagagcagcctgcacatgacgatatggatgaggatgataatgtatcaatgggtgggcctgatagtcctgattcagtggatcccgttgaaccaatgccaaccatgactgatcaaacaacacttgttccaaatgaggaagaagcatttgcattggagcctattgatataactgttaaagaaacaaaagccaagaggaagaggaagctaattgttgacagtgtcaaagagttggatagcaagacaattagagcccaacttagtgattattcagatattgttactactttggatctggcaccgcccaccaagaaattgatgatgtggaaagagacaggaggagtagaaaaactgttttctttacctgctcagcctttgtggaataacagactactgaagctctttacacgctgtcttacaccgcttgtaccagaagaccttagaaaaatggaaggaaaggaaggagaaggcagataatttggatgaattcctcaaagaatttgaaaatccagaggttcctagagaggaccagcaacagcagcatcagcagcgtgatgttatcgatgagcccattattgaagagccaagccgcctccaggagtcagtgatggaggccagcagaacaaacatagntgagtcagctatgcctccaccaccacctcagggagttaagcgaaaagctggaccaattgacccagagcctgtgatgcctcctcagcaggtagagcagatggaaataccacctgtagagcttcccccagaagaacctccaaatatctgtcagctaataccagagttagaacttctgccnnnnnnnnnnnnnnnnnnnnnnnnnnnnnnnnnnnnnnnnnnnnnnnnnnnnnnnnnnnntgcatcagggggcgatcaagatcaggaagaaagaagatggaacaaaaggactcagcagatgcttcatggtcttcagcgtgctcttgctaaaactggagctgaatctatcagtttgcttgagttatgtcgaaatacgaacagaaaacaagctgccgcaaagttctacagcttcttggttcttaaaaagcagcaagctattgagctgacacaggaagaaccgtacagtgacatcatcgcaacacctgggaccaaggttccatattatataaggagctagaagcattataggctagtggtttgattcactagtgcttacaaattgcccccattgttggtaggggacacangaacccntttgagaaaaccttagaatttttggtctggtacaaaagtctttggccttttttcctctcttcattttttttccagtacatttaaattttgtcaattntcatcctttgagggaanctggattaaaatggggtggggggtttgggggttctgaaggagagaaaaccagcacccccaggggactccgaaggatggatttttaccagtttcaaaaacgagatgtgtggcaattattggggggcatgaaaataagggttggagggggcatcccaaaaggccgtggattttttattccttaagttcttccctttaccggcaattgaaaaaggggaaaaccctgggcctg

SEQ ID NO: 67996 - DNA, 1093 bp, Homo Sapiens
  misc_feature (1028)..(1036): n is a, c, g, or t
ggaccggtccggaattcccgggatggtgcggaggtgtgcagcgcgctgtcagactggctcgcaggcggcgcggccggcggacccgttcgagacagcgcgggcggctcgggtcccctggggctccgcagcaggaggacgccatggacgacaaggagttaattgaatactttaagtctcagatgaaagaagatcctgacatggcctcagcagtggctgccatccggacgttgctggagttcttgaagagagataaaggggagacaatccagggtctgagggcgaatctcaccagtgccatagaaaccctgtgtggtgtggactcctctgtggcagtgtcctctggcggggagctcttcctccgcttcatcagtcttgcctccctggaatactccgattactccaaatgtaaaaagatcatgattgagcggggagaactttttctcaggagaatatcactgtcaagaaacaaaattgcagatctgtgccatactttcatcaaagatggagcgacaatattgactcacgcctactccagagtggtcctgagagtcctggaagcagccgtggcggccaagaagcgatttagtgtatacgtcacagagtcacagcctgatttgtcaggtaagaaaatggccaaagccctctgccacctcaacgtccctgtcactgtggtgctagatgctgctgtcggctacatcatggagaaagcagatcttgtcatagttggtgctgaaagagttgttgaaaacggaggaattattaacaagattggaaccaaccagatggctgtgtgtgccaaagcacagaacaaacctttctatgtggttgcagaaagtttcaagtttgtccgggctctttccactaaacccagcaagacgtccccagaataagttttaagtataaaggcagacactcttcaagggtcgcgccaaactggaacaagacctcaaagaaggaaccatcccgtggggtcgaactacacctggcccctttcctaaaaccacctccgctgggttaaacgaaccctnnnnnnnnnctggaaacccctccggcaagtcaacggatgaaacttcattcaagcttcttatcttgg

SEQ ID NO: 67997 - DNA, 334 bp, Homo Sapiens
gcgaaaaatcgaaatcaagcctggaagcaacatgtttctcacggttcttatcagtcatttaagtctcttgctaggccctgcgggtacctgagtttgtaaacaacagagcactcctaatatctcccccaagggattcctcccccacacaccctacctctccaggatacactgcaccctagtattaattgggcaaatctagaaaggaaataaaaattagtcacagaagttaagggaggaatagactaagagcaaatacttttgccccttcattgtaacagggggccggaggagaacaaaaacgttaatactctcacttcgcttttaacttagtgac

SEQ ID NO: 67998 - DNA, 1853 bp, Homo Sapiens
caggcaattggaactatgaacagtggtacaaaaaagcaggctggtaccgctccggaatcccgggatatcgtcgacccacgcgtccggggtgacgagtggtggccgaagcagggggacagcaagggacgctcaggcggggaccatggcggacggcggctcggagcgggctgacgggcgcatcgtcaagatggaggtggactacagcgccacggtggatcagcgcctacccgagtgtgcgaagctagccaaggaaggaagacttcaagaagtcattgaaacccttctctctctggaaaagcagactcgtactgcttccgatatggtatcgacatcccgtatcttagttgcagtagtgaagatgtgctatgaggctaaagaatgggatttacttaatgaaaatattatgcttttgtccaaaaggcggagtcagttaaaacaagctgttgccaaaatggttcaacagtgctgtacttatgttgaggaaatcacagaccttcctatcaaacttcgattaattgatactctacgaatggttaccgaaggcaagatttatgttgaaattgagcgtgcgcgactgactaaaacattagcaactataaaagaacaaaatggtgatgtgaaagaggcagcctccattttacaggagttacaggtggaaacctacgggtcaatggaaaagaaagagcgagtggaatttattttggagcaaatgaggctctgcctagctgtgaaggattacattcgaacacaaatcatcagcaagaaaattaacaccaaatttttccaggaagaaaatacagagaaattaaagttgaagtactataatttaatgattcagctggatcaacatgagggatcctatttgtctatttgtaagcactacagagcaatatatgatactccctgtatacaggcagaaagtgaaaaatggcagcaggctctgaagagtgtgtgtactctatgttatcctggctccttttgacaatgaacagtcagatttggttcaccgaataagtggtgacaagaagttagaagaaattcccaaatacaaggatcttttaaagctttttaccacaatggagttgatgcgttggtccacacttgttgaggactatggaatggaattaagaaaaggttcccttgagagtcctgcaacggatgtttttggttctacagaggaaggtgaaaaaaggtggaaagacttgaagaacagagttgttgaacataatattagaataatggccaagtattatactcggataacaatgaaaaggatggcacagcttctggatctatctgttgatgagtccgaagcctttctctcaaatctagtagttaacaagaccatctttgctaaagtagacagattagcaggaattatcaacttccagagacccaaggatccaaataatttattaaatgactggtctcagaaactgaactcattaatgtctctggttaacaaaactacgcatctcatagccaaagaggagatgatacataatctacaataagggtcttagtgctttagaaaaaagttaaaattggaagtcattaaaaaaagactgttataatggtgtatatgttggggttttttttctaagcttctttgtcttaaattttaaaatagtgaatatgtttgagactccctttgacctttcagttccccaagttcattgttaactttgcatttgcaattggtgcaaaaatacagatttctgtcgtctgaatacacaaaaagttgtgtcataacttacccagatatgtttttctatcatttgaaacctttttagctactgtttgttttcattcaactaacaaacatattccaataataaaagcagtatatacat

SEQ ID NO: 67999 - DNA, 1556 bp, Homo Sapiens
  misc_feature (323)..(340): n is a, c, g, or t
  misc_feature (667)..(696): n is a, c, g, or t
tctgcatgggagaccacaagcccgtgttcctggccttccgaatcatgcccggggcaggtaaacctcatgcccatgtgcacaagtgttgtgtcgtgcagtgacgtggtgggaagagatgccagcgccacgagaggacacttcgtgagcctccctgtagccgtggaccgaatacgcactcttgaaagctgcatcgagaacccgcccaagcgccacctgctagacggccagccccacacttcgcttcagcctccggaccattccggagcagcctcacatacctcactgtctcgtctgtctatgtgacattaagtagaaatattggnnnnnnnnnnnnnnnnnnaaataagtcacagtcctgttgtcaaaactctaatagacagcaaagagggtctgtaccgtaaacttcacagtttccagtttttaatgattgccaggtggaggggcttcttcagcacagagaccccccactgttgtccagggaccccctctgccaggtggaggtgtgtccaggggctggggaagccgagacgggcactccctctgccggccggcagcgtggccctgagcatggcaagggggtctgtctctgccgatgctccttccgcggcactgactctgcgccgtgtcacatggtttttgaatcacactgcagctgctttccattttnnnnnnnnnnnnnnnnnnnnnnnnnnnnnnctttttaaaaataacttataaatcttaccaaaacttatgctaaatatactttccagtatgaacgcacaggagagtcccatcagcaggcggcattggagtctaggagctcagctgtgtgtccatcaacacacaaattcgtaaaaaacacacatggcctcgccatcgtgggtaaaatcggccccacagcacgtctgcaccagcgggccgttactcccatgccgttcttctgtgtaatattaagaactgaatgtgaagtttatagctagcctgggtgtaccttttaagaattttgtaaaccgtttgtctgtcttttgttactgttttatggtgccaagtatcctacgttacaacaataatatcatgggagaaatagaaatagcctagtttgcttccaatagaaactgcttttaacatgggctgtatataaaaatattaaagagaaacaaaactgtacatttcctcattgctccgctacagacaacccatgtcataaccttgttgcaaatatttttctcctatagcagtaagtacagcattagaaggtgattagagagtctgttgatgaaacacaaatgtatgttttattgattttactttagaacactacagagttcctggaccgggtgaaggcattagctgggtgtttgtgtgggataaatactaccactgcaagtgactgctgtccgctgcggaatctgttcttggtggaagcacaggtccgtgtcgctgctgtggttgccgctgtccgcggttcaacacggagtccgccccgcgggtttcagctgttggtcgttctgaggggcctttggaagtgaccggtctggttcctaagcaataaaattgaccgtggtgaaaataaa

SEQ ID NO: 68000 - DNA, 457 bp, Homo Sapiens
  misc_feature (325)..(354): n is a, c, g, or t
aataagtcacagtcctgttgtcaaaactctaatagacagcaaagagggtctgtaccgtagacttcacagttttcagtttttaatgattgccagtggaggggcttcttcagcacagagaccccccactgtgtccagggaccccctctgccaggtggaggtgtgtccaggggctggggaagccgagacgggcactccctctgccggccggcagtcgtggccctgagcatggcaagggggtctgtctctgccgatgctccttccgcggcactgactctgcgccgtgtcacatggtttttgaatcacactgcagctactttccattttnnnnnnnnnnnnnnnnnnnnnnnnnnnnnnctttttaaaaataatttataaatcttaccaaaacttatgctaaatatactttccagtatgaacgcacaggagagtcccatcagcaggcggcattggagtctag

SEQ ID NO: 68001 - DNA, 925 bp, Homo Sapiens
  misc_feature (630)..(631): n is a, c, g, or t
  misc_feature (780)..(806): n is a, c, g, or t
tgtgagaaaaccccttcccattccatggcgaaaacatctccttagaaaagccattaccctcattaggcatggttttggcgtcccaaaacacctgacagcccctccctcctctgagaggcggagagtgctgactgtagtgaccattgcatgccgggtgcagcatctggaagagctaggcagggtgtctgccccctcctgagttgaagtcatgctcccctgtgccagcccagaggccgagagctatggacagcattgccagtaacacaggccaccctgtgcagaagggagctggctccagcctggaaacctgtctgaggttgggagaggtgcacttggggcacagggagaggccgggacacacttagctggagatgtctctaaaagccctgtatcgtattcaccttcagtttttgtgttttgggacaattactttagaaaataagtaggtcgttttaaaaacaaaaattattgattgcttttttgtagtgttcagaaaaaaggttctttgtgtatagccaaatgactgaaagcactgatatatttaaaaacaaaaggcaatttattaaggaaatttgtaccatttcagtaaacctgtctgaatgtacctgtatacgtttcaaaaacaccccnnccccactgaatccctgtaacctatttattatataaagagtttgccttataaatttacataaaaatgtccgtttgtgtcttttgttgtaaaaatcaagtgattttttcataaggttcttttactattggaaaagatgggcagcacgcagnnnnnnnnnnnnnnnnnnnnnnnnnnnatacatgtgaaagcaaagaatactcagcatgcctttttaagtgacgcgtttgcaccttttgttgggaagtactgtatcctgtgctgttagcattctcgataaatctctctgtgaaagtg

SEQ ID NO: 68002 - DNA, 1042 bp, Homo Sapiens
  misc_feature (61)..(61): n is a, c, g, or t
  misc_feature (148)..(148): n is a, c, g, or t
  misc_feature (189)..(270): n is a, c, g, or t
  misc_feature (572)..(584): n is a, c, g, or t
acaaccaaagttttaagagaaaggaagaccccataccaaccccttcccggagatgaagatnataatcacatgcaagcaagttccaactgagaaccggcagtaacgcacgcaataattgagtacatcagtcataggaaccccagactgncccttataataacaactagtataatatatgagttgtgggcnnnnnnnnnnnnnnnnnnnnnnnnnnnnnnnnnnnnnnnnnnnnnnnnnnnnnnnnnnnnnnnnnnnnnnnnnnnnnnnnnnaccaagagatcggcaagaggggcagcagcttaggctattttattttatttagatgagatttagcacactctcagttatttaaacatgcaacatttcttgagtatgtatgttgaggccatctgagctcatagctgattcagtaaccagtttcatgctgtgtcattcacactcactacttaatactgccatggtgaaaatgtggaggaaaaatgtatccatgtgtgtctgggaagcatatacacttgtacattttttaatactctgattctgtaacatttctgagttttgttttgttttacagnnnnnnnnnnnnngtgataaagcaatcagaagaccaagaggtttactattgatgcttagggtcgtctgaccttggctggccaatagacctacacggccaaattaatttacgagagtaataatttttcaaaagccaattttttttctgtattttctgtatgaaactgccaatatcatgaatagaaagggagaaccataaaggagaaagaacgtgatgttctgttatgttcatgtaaacctaaagaaacagtgtggaggcaggcgcgatcagccgaactctagggacttggtgttgcttggaaggcatccatacctgcattttgcattcttcgtatgtaatcatattgccaaagacaaactatttcatcatttattgtaaataacacttttccccagacctaccataaagtttctgtgatgtattgtcttccagttgcaataaaaattactgagttgcatcaattgaagaaaa

SEQ ID NO: 68003 - DNA, 238 bp, Homo Sapiens
tattgccgcctactactactatacggctgcgagaagacgacagaagggacttggtgttgcttggaaggcatccatacctgcattttgcattcttcgtatgtaatcatattgccaaagacaaactatttcatcatttattgtaaataacacttttccccagacctaccataaagtttctgtgatgtattgtcttccagttgcaataaaaattactgagttgcatcaattgaagaaaagc

SEQ ID NO: 68004 - DNA, 964 bp, Homo Sapiens
  misc_feature (703)..(711): n is a, c, g, or t
accaggtttctaagcatgaattgaggaacagaagaagcagagcagatgatcggagcagcatttgtttctccccaaatctagaaattttagttcatatgtacactagccagtggttgtggacaaccatttacttggtgtaaagaacttaatttcagtataaactgactctgggcagcattggtgatgctgtatcctgagttgtagcctctgtaattgtgaatattaactgagatagtgaaacatggtgtccggttttctattgcattttttcaagtggaaaagttaactaaatggttgacacacaaaaattggtggagaaattgtgcatatgccaattttttgttaaaaccttttgttttgaactatactgctttgagatctcatttcagaagaacggcatgaacagtcttcagccacagttgtgatggttgttaaatgctcacaattgtgcattcttagggtttttccatccctggggtttgcaagttgttcacttaaaacattcttaaaatggttggcttcttgtctgcaagccagctgatatggtagcaaccaaagattccagtgtttgagcatatgaaagactctgcctgcttaattgtgctagaaataacagcatctaaagtgaagacttaagaaaaacttagtgactactagattatccttaggactctgcattaactctataatgttcttggtattnnnnnnnnngcatatttgtcacagaaatttagttaacatcttacaactgaacatgtatgtatgttgcttagataaatgtaatcactgtaaacatctatatgatctgggattttgtttttattttgaaatgggagcttttttgtttacaagttcattaaaaactaaaaactgtttctgtaaggaaatgagattttttttaaacaacaaaaaatgccttgctgactcactattaaataaaaatctccccaattttttgatagac

SEQ ID NO: 68005 - DNA, 788 bp, Homo Sapiens
  misc_feature (70)..(104): n is a, c, g, or t
ggataatcatataggggtagctctagagcgaacgacgagcgcagcgagtagtgagcgaggaagcggccgnnnnnnnnnnnnnnnnnnnnnnnnnnnnnnnnnnncagtcgacggtaccggacatatgcccgggaattcggccattacggccgggggatcgcttcctggtcctcgcctcctccgctgtctccctggagttcttgcaagtcggccaggatgtctcagtgtagacccttgtctgagaccgagctatgtggggcgacctctggctcctcccgcctgcctctgccaatccgggcactgggacagaggctgagtttgagaaagctgcagaggaggttaggcaccttaagaccaagccatcggatgaggagatgctgttcatctatggccactacaaacaagcaactgtgggcgacataaatacagaacggcccgggatgttggacttcacgggcaaggccaagtgggatgcctggaatgagctgaaagggacttccaaggaagatgccatgaaagcttacatcaacaaagtagaagagctaaagaaaaaatacgggatatgagagactggatttggttactgtgccatgtgtttatcctaaactgagacaatgccttgtttttttctaataccgtggatggtgggaattcgggaaaataaccagttaaaccagctactcaaggctgctcaccatacggctctaacagattaggggctaaaacgattactgactttccttgagtagtttgtatctgaaatcaattaaaagtgtatttgttacttt

SEQ ID NO: 68006 - DNA, 909 bp, Homo Sapiens
  misc_feature (631)..(631): n is a, c, g, or t
  misc_feature (656)..(656): n is a, c, g, or t
  misc_feature (818)..(828): n is a, c, g, or t
ggggctcgcccgagcagggttggggcgagtggaccgcgcctctaaaggcgcttgccagtgcaatctgggcgatcgcttcctggtcctcgcctcctccgctgtctccctggagttcttgcaagtcggccaggatgtctcaggctgagtttgagaaagctgcagaggaggttaggcaccttaagaccaagccatcggatgaggagatgctgttcatctatggccactacaaacaagcaactgtgggcgacataaatacagaacggcccgggatgttggacttcacgggcaaggccaagtgggatgcctggaatgagctgaaagggacttccaaggaagatgccatgaaagcttacatcaacaaagtagaagagctaaagaaaaaatacgggatatgagagactggatttggttactgtgccatgtgtttatcctaaactgagacaatgccttgtttttttctaataccgtggatggtgggaattcgggaaaataaccagttaaaccagctactcaaggctgctcaccatacggctctaacagattaggggctaaaacgattactgactttccttgagtagtttttatctgaaatcaattaaaagtgtatttgttactttaaattaactcccanacccccaattccctccccacaccanttcccttgtcgggccgcccttggcccttaaaaaaatttttcaaaaaacctttccttttgggggcccgcgggcccccgatagggaaagggaaacatgggggcataagctgggtttccccaaggaaaaaccccgggggcccaggaataacggggttggggacannnnnnnnnnnttacaacaaccgcgcccgggggaggaccctggagcccgcctcccaaacacaactccacgtggggcggggtcctgagaggcg

SEQ ID NO: 68007 - DNA, 772 bp, Homo Sapiens
aaaaaaactaattatacaaacttgaaagggttcaccttgccctagcaaaactaggattgggacacctttttttccccctgaggatcactgacaaaaaacactgcaccagtaaggaagcaactaaattttgttttgttctttgaaaaaggctaacctgagctaggtaaaggttatatcattcacttttgaaataaaccatcgagaacacaaaatgacaagtgagttaggttgggctgatgggatagaaggtgggaggggaatgctatacagctgggaacagcagactttctctgaagggccagatggtaactacattagggtttgcgggtctgatggtcgccatcataactgcatactcaactctgccgttgtagggtaagagcagcactcgatgacacagaaatgaatgcacatgactgtgttccagtaaaattttattttaattaaaatcaattcatgtttgaaaaaggatttaaagtagcttctaataaaggacatgtgtaatgaaacttaaaatatgatattttctttaaaaatctttatccttatgtagacttctaaaactatgttttgcatttagacagtcaaggaaaatacaagttgttatacaattctcattgactaattgaagtttactaggagaggaaaactttttcttgataccggcaatcttttacttataatggcttgagttaaaatgctccaacttttctaatttttgcttttgaaaataaaacacctatagtgacaataaaaacacacatttaaagcc

SEQ ID NO: 68008 - DNA, 684 bp, Homo Sapiens
  misc_feature (51)..(51): n is a, c, g, or t
  misc_feature (244)..(277): n is a, c, g, or t
atagcaagcagtttgtcaaaaatgatttttatttaatgtggttcagtatantaataacaaagcatttttgtagaactggtttttttctcatttatttttgtattccatacaatgtgaccaattgacttgaatatgactacccagtttctatgtttttgttagatataaaattaaatcgaattttgttgaatactgttctttggcatttaaaaaataagaccttcttatcttgggccacatgtcnnnnnnnnnnnnnnnnnnnnnnnnnnnnnnnnnnagacttttcattacccatgataggacttttgtgatatggctaatctcagtacacatttcaacttaaaacctttttatttacagcaccataattttaaaatttacttgcaatcttggtaagactaaacttgcagtgtttttctaaaagggaatttgataggtaaacttgatttaataaaaattaaatatcatttttgtttacaccaaaattatcagaagtaggttgattagtcattataacacttaccatatgattctattaagaagtcaattcagtagcatgtatatcaatttatatagataggtagatagcttttggatgattgaggcatgcttatattatgaaaaaaattgctaataaagataaatactacatgttcagaataaaagttacatttttcaaatatt

SEQ ID NO: 68009 - DNA, 1460 bp, Homo Sapiens
  misc_feature (80)..(114): n is a, c, g, or t
  misc_feature (153)..(512): n is a, c, g, or t
  misc_feature (1066)..(1086): n is a, c, g, or t
  misc_feature (1232)..(1232): n is a, c, g, or t
aagactgatagatcactataggggctagctcgtcgagcgaacgacgagcgcagcgaagtagtgagcgaggaaggcggcgnnnnnnnnnnnnnnnnnnnnnnnnnnnnnnnnnnncagtcgacggtaccggacatatgcccgggaattcggccnnnnnnnnnnnnnnnnnnnnnnnnnnnnnnnnnnnnnnnnnnnnnnnnnnnnnnnnnnnnnnnnnnnnnnnnnnnnnnnnnnnnnnnnnnnnnnnnnnnnnnnnnnnnnnnnnnnnnnnnnnnnnnnnnnnnnnnnnnnnnnnnnnnnnnnnnnnnnnnnnnnnnnnnnnnnnnnnnnnnnnnnnnnnnnnnnnnnnnnnnnnnnnnnnnnnnnnnnnnnnnnnnnnnnnnnnnnnnnnnnnnnnnnnnnnnnnnnnnnnnnnnnnnnnnnnnnnnnnnnnnnnnnnnnnnnnnnnnnnnnnnnnnnnnnnnnnnnnnnnnnnnnnnnnnnnnnnnnnnnnnnnnnnnnnnnnnnnnnnnttagatgaaaaaccttgttaatggaaaatgtttacattctcaatttctctctttgtttagaacattactactggatggaaatccattccgagttcctcgagcagccatattaatgaaaggaacagctgctatacttgaatatttgagagaccgaattcctacttaacatggagttgctttataacccttgtcatgtattattaaccctggttaattctaaggaggatgtaacatttgttttagtatcatcttaaaaggtgattattgtaattgatcttgtagtttcccagtatcacctacccgttggtataattagcctgggccatattcactgccagtaaatatttttacatttttatttaagatttttgtaaggtgttgtatacatttgtaatggtgataaccacaatgtgttcatacatttgttctaaatgttttgcatatgatttatcctgctaactttcattttcttatagcaagcagttttttcaaaaatgaatttttatttaatgtggttcagtattataataacaaagcatttttgtagaactggnnnnnnnnnnnnnnnnnnnnngtattccatacaatgtgaccaattgacttgaatatgactagccagtttctatgtttttgttagatataaaattaaatcgaattttgttgaatactgttctttggcatttaaaaaataagaccttcttatcttgggccacatgtcanaagaaaaaggaaacaaaaatatatttaaaataagacttttcattacccatgataggacttttgtgatatggctaatctcagtacacatttcaactttaaaccctttttatttacagcaccataattttaaaatttacttgacaatcttggtaagactaaactttgcagtgttttttctaaaaggggatttttgataggtaaacttgattttaataaaaattaaatatc

SEQ ID NO: 68010 - DNA, 459 bp, Homo Sapiens
ggcatttcaaaacgggctttaaatactcatcagggtgccacacaaaggagctggggtgagaacttcgtacatgtgagtgtggggctggggtgccctgaaagagaaaaaggggacccatctgtcagggcagctggggtgccccacccccaccctgggactagggagcagagtagaaaccctctctggagggtcccagggctaactgggagccagccctcccttcgaggtagaccatcggggagggaaccgagaagtagctcccatggtggcagtggcttcctcagtggtactgctgatagctggggtagcctgggcgcacagcatggaaaaggagctcgggaggacagggttggggcctccagggtctgacacaaccccactcctcttcctagcaccatggggtagggacaggcagctttgaacagaggaaacaaaactccaacttcctcccctcgtgcc

SEQ ID NO: 68011 - DNA, 1067 bp, Homo Sapiens
  misc_feature (786)..(809): n is a, c, g, or t
ttacggctaggtacgaggctgggtgtgtgaattcggcacgaggacagcacagtgactgtgacgtccaccaagcagacagaagactactgcctcgcatccaacaaggtgggtcgctgccggggctctttcccacgctggtactatgaccccacggagcagatctgcaagagtttcgtttatggaggctgcttgggcaacaagaacaactaccttcgggaagaagagtgcattctagcctgtcggggtgtgcaaggcccctccatggaaaggcgccatccagtgtgctctggcacctgtcagcccacccagttccgctgcagcaatggctgctgcatcgacagtttcctggagtgtgacgacacccccaactgccccgacgcctccgacgaggctgcctgtgaaaaatacacgagtggctttgacgagctccagcgcatccatttccccagtgacaaagggcactgcgtggacctgccagacacaggactctgcaaggagagcatcccgcgctggtactacaaccccttcagcgaacactgcgcccgctttacctatggtggttgttatggcaacaagaacaactttgaggaagagcagcagtgcctcgagtcttgtcgcggcatctccaagaaggatgtgtttggcctgaggcgggaaatccccattcccagcacaggctctgtggagatggctgtcgcagtgttcctggtcatctgcatttgtgggtggtggtagccatcttgggttactgcttcttcaagaaccagagaaaggacttccccggannnnnnnnnnnnnnnnnnnnnnnncctgccagctcccctgtctccactaccgaggacacggagcacctggtctataaccaccccacccgggcccctctgagcctgggtctcaccggttctcactgggccctgcttcctggctggccaggcaaaagcccttgggctgggaaaaaacttttggaacccaactcttggccttgtttcccaaggccccctggtggctccaaagaaccaggggctcccggccccccttctgtgaagaaaagcctccccttaaggcta

SEQ ID NO: 68012 - DNA, 847 bp, Homo Sapiens
ccatatacggcagtagctcggtcaactcggacgagggcagcgccatggaggagtacgctcgggagccctgcccatggcgaattgtggatgattgcggtggagccttcactatgggtgtcatcggtggcggagtcttccaggccatcaagggtttccgcaatgcccctgttggaattcggcaccggttgagaggtagtgccaatgctgtgaggatccgagccccccagattggaggtagcttcgcagtgtgggggggcctgttctccaccattgactgtggcctggtgcggcttcggggcaaggaggatccctggaactctatcaccagtggagcattgaccggggctgtgctggctgcccgcagtggcccactggccatggtgggctcagcaatgatggggggcatcctgttggccctcattgagggcgttggcatcctcctcactcgctacacagcccagcagttccgaaatgcgcccccattcctggaggaccccagccagctgccccctaaggatggcaccccggccccaggctaccccagctatcagcagtaccactgaggaagccactgccaccatgggagctacttctcggttccctccccgatggtctacctcgaagggagggctggctcccagttagccctgggaccctccagagagggtttctactctgctccctagtcccagggtgggggtggggcaccccagctgccctgacagatgggtcccctttttctctctcagggcaccccagccccacactcacatgtacgaagttctcaccccagctcctttgtgtggcaccctgatgagtatttaaagcccgttttgaaatgccaaac

SEQ ID NO: 68013 - DNA, 853 bp, Homo Sapiens
ggggtggcctgactgcgcggccagacgccagcgccatggaggagtacgctcgggagccctgcccatggcgaattgtggatgattgcggtggagccttcactatgggtgtcatcggtggcggagtcttccaggccatcaagggtttccgcaatgcccctgttggaattcggcaccggttgagaggtagtgccaatgctgtgaggatccgagccccccagattggaggtagcttcgcagtgtgggggggcctgttctccaccattgactgtggcctggtgcggcttcggggcaaggaggatccctggaactctatcaccagtggagcattgaccggggctgtgctggctgcccgcagtggcccactggccatggtgggctcagcaatgatggggggcatcctgttggccctcattgagggcgttggcatcctcctcactcgctacacagcccagcagttccgaaatgcgcccccattcctggaggaccccagccagctgccccctaaggatggcaccccggcccccaggctacccccagctatcacacagtaccacttgagggaacccactgcccaccatggggagcttacttcctcgggttcccctcccccgatggtcctaccctccaaagggaagggctgggcccccagattagcccctggggaaccctcccagaggagaggtttcctacttctgggtcccctagatccccagctggcccttgaaaagatgggggtcccccttttttctccctctcacagggccaccccccaacccccacaaacttttccctgggaacggaagagtttctgtacaccccagggctccctctttggtggtgcgggaccccccgg

SEQ ID NO: 68014 - DNA, 2886 bp, Homo Sapiens
  misc_feature (1578)..(1601): n is a, c, g, or t
tggaccggtccggaattcccgggatccagcaccctcggaacccagaggcccgcgctctgaaggtgacccccctggggaggaaggcgatggcccctgcgaggacgatggcccgcgcccgcctcgccccggccggcatccctgccgtcgccttgtggcttctgtgcacgctcggcctccagggcacccaggccgggccaccgcccgcgccccctgggctgcccgcgggagccgactgcctgaacagctttaccgccggggtgcctggcttcgtgctggacaccaacgcctcggtcagcaacggagctaccttcctggagtcccccaccgtgcgccggggctgggactgcgtgcgcgcctgctgcaccacccagaactgcaacttggcgctagtggagctgcagcccgaccgcggggaggacgccatcgccgcctgcttcctcatcaactgcctctacgagcagaacttcgtgtgcaagttcgcgcccagggagggcttcatcaactacctcacgagggaagtgtaccgctcctaccgccagctgcggacccagggctttggagggtctgggatccccaaggcctgggcaggcatagacttgaaggtacaaccccaggaacccctggtgctgaaggatgtggaaaacacagattggcgcctactgcggggtgacacggatgtcagggtagagaggaaagacccaaaccaggtggaactgtggggactcaaggaaggcacctacctgttccagctgacagtgactagctcagaccacccagaggacacggccaacgtcacagtcactgtgctgtccaccaagcagacagaagactactgcctcgcatccaacaaggtgggtcgctgccggggctctttcccacgctggtactatgaccccacggagcagatctgcaagagtttcgtttatggaggctgcttgggcaacaagaacaactaccttcgggaagaagagtgcattctagcctgtcggggtgtgcaaggtgggcctttgagaggcagctctggggctcaggcgactttcccccagggcccctccatggaaaggcgccatccagtgtgctctggcacctgtcagcccacccagttccgctgcagcaatggctgctgcatcgacagtttcctggagtgtgacgacacccccaaccgccccgacgcctccgacgaggctgcctgtgaaaaatacacgagtggctttgacgagctccagcgcatccatttccccagtgacaaagggcactgcgtggacctgccagacacaggactctgcaaggagagcatcccgcgctggtactacaaccccttcagcgaacactgcgcccgctttacctatggtggttgttatggcaacaagaacaactttgaggaagagcagcagtgcctcgagtcttgtcgcggcatctccaagaaggatgtgtttggcctgaggcgggaaatccccattcccagcacaggctctgtggagatggctgtcgcagtgttcctggtcatctgcattgtggtggtggtagccatcttgggttactgcttcttcaagaaccagagaaaggacttccacggannnnnnnnnnnnnnnnnnnnnnnncctgccagctccactgtctccactaccgaggacacggagcacctggtctataaccacaccacccggcccctctgagcctgggtctcaccggctctcacctggccctgcttcctgcttgccaaggcagaggcctgggctgggaaaaactttggaaccagactcttgcctgtttcccaggcccactgtgcctcagagaccagggctccagcccctcttggagaagtctcagctaagctcacgtcctgagaaagctcaaaggtttggaaggagcagaaaacccttgggccagaagtaccagactagatggacctgcctgcataggagtttggaggaagttggagttttgtttcctctgttcaaagctgcctgtccctaccccatggtgctaggaagaggagtggggtggtgtcagaccctggaggccccaaccctgtcctcccgagctcctcttccatgctgtgcgcccagggctgggaggaaggacttccctgtgtagtttgtgctgtaaagagttgctttttgtttatttaatgctgtggcatgggtgaagaggaggggaagaggcctgtttggcctctctgtcctctcttcctcttcccccaagattgagctctctgcccttgatcagccccaccctggcctagaccagcagacagagccaggagaggctcagctgcattccgcagcccccacccccaaggttctccaacatcacagcccagcccacccactgggtaataaaagtggtttgtggagtttctggctctgttctgtgggccaggagagggactaggttgatggggggtgatgggaccgtcctgttcagatggttcaggcttcagccaccctgttgagcaggttttcccatcgtctctctctcgaaactggcctggcccatgactttggagagcagtgccatgtttgaccaccagaggggaggagtgagcgggccacgggagccacgagtgtggggaggctgcagtgctgctgtgtagcatttcttcctggtgtgagcctctccacaagcctgttgagtggttgagctctccacaattctgctcatttggaggttggggttaggggtgcacaggcaccttggctcctacctccatgttagggcccaggtgactagctgtctccctcccaacagaagccctggcttctgcgctggagtgcagcacccccaaccaggctctgagctccttcccaggagcctttagtagagacacgccactccaacccacacccctgcatttgttcaagctacctcccggtgccaaaaaaa

SEQ ID NO: 68015 - DNA, 1347 bp, Homo Sapiens
  misc_feature (46)..(80): n is a, c, g, or t
  misc_feature (562)..(607): n is a, c, g, or t
gccaggaaacgacgagcgcccgagttttgagcgaggaagcggccgnnnnnnnnnnnnnnnnnnnnnnnnnnnnnnnnnnncagtcgaacggtaccggacatatgcccgggaattcggccattacggccgggggcacaaacatggctgggaggaattggtatattacacagttccacttattacaggaaatggaatccagaatcatgatcccactgaagacctcgcccctccagtaaagctgtagagtttctatgtgcctacatacatttctgtgacaagtatttgtcgtaaattaattttaattgtgtatcaagtgaaaaagaaacactgaggttttaagctgctgtatatagcttgtgagaaacctcttttctttaaaatttacataatcacaagaaaggaaagaattacagttggactgattgtgacagtgccttgtcgtcctctttgaaacaccccgtgttgtccagtataccttataacacttagccacttctccccaccctccagaaggggtccacgttgaattctgaatcatcttgaaaataagattccaaccacnnnnnnnnnnnnnnnnnnnnnnnnnnnnnnnnnnnnnnnnnnnnnntctgttttataatcacagatttttagacaaatttcttgtatcaggaagaaatacaaattttgtcatgtttctcaagcagtttttctgagtagtttctgaggaggaacaaattacaagtgtacccaataactgaaaatgttttaactcactctcatttgtaagcagtccacatagtagacaatgggttttccaagctgggcaaggtacatttaatcagtaaatcagtttcacatcatgtattgtgatgtttcaatgtgagacacaaaaacaatggcttgaaacttgtgtatcatatgtgattttgaaatgaacaccttgaatagcactaatttttatttgtggtatttttctataacaaaacaagtagctctaggaaaagaggttttattttgtaaacgatcatttgtgacctcagacactctctggctaatattttaataagctcacagcagataattctgagatcatgggtgaggggtggtgcatgttgagatttaaattggcataaagctgcatactttttgtctagctgtttgatttcattttttaatatagtatgccaattttgtgactgttaccatgtgaaagtcctgttgaaatgaacaattgtctgccccacaatcaagaatgtatgtgtaaagtgtgaataaatctcatatcaaatgtcaaacttttacatgtgaatgattttctcaaagaacatagaaaagtcaataaaatcctcttaatttccacataaa

SEQ ID NO: 68016 - DNA, 1141 bp, Homo Sapiens
aacttagtgctaggtacgaggctgggtgttgaattcggcacgaggcgccgagcaagatggcggcgcgagtgctgcgcgcccgcggagcggcctgggccggcggcctcctgcagcgggcggccccctgcagcctcctgcccaggctccggacatggacatcttccagcaacagatctcgagaagacagctggctaaaatccttatttgtccggaaagttgatccaagaaaagatgcccactccaatctcctagccaaaaaggaaacaagcaatctatacaaattacagtttcacaatgttaaaccggaatgcctagaagcatacaacaaaatttgtcaagaggtgttgccaaagattcacgaagataaacactacccttgtactttggtggggacttggaacacgtggtatggcgagcaggaccaagctgtccacctctggaggtatgaaggaggctatccagccctcacagaagtcatgaataaactcagagaaaataaggaatttttggaatttcgtaaggcaagaagtgacatgcttctctccaggaagaatcagctcctgttggagttcagtttctggaatgagcctgtgccaagatccggacctaatatatatgaactcaggtcttaccaactccgaccaggaaccatgattgaatggggcaattactgggctcgtgcaatccgcttcagacaggatggtaacgaagccgtcggaggattcttctctcagattgggcagctgtacatggtgcaccatctttgggcttacagggatcttcagaccagggaagacatacggaatgcagcatggcacaaacatggctgggaggaattggtatattacacagttccacttattcaggaaatggaatccagaatcatgatcccacttgaagacctcgcccctccagtaaagctgtagagttctatgtgcctacatacatttctgtgacagttatttgtccgtaatttaacttcttaatcggtcgttccacgttgcaacaagaaaccctgaggttttaagcgctgtattagcttgttgagaaacctcttttccttaacatctcacttaatcccagcaacgaacaaattaccggtgggcttgatgggacagtgccttttcgtcctttgaaaccc

SEQ ID NO: 68017 - DNA, 310 bp, Homo Sapiens
  misc_feature (62)..(62): n is a, c, g, or t
  misc_feature (70)..(70): n is a, c, g, or t
  misc_feature (85)..(86): n is a, c, g, or t
  misc_feature (258)..(270): n is a, c, g, or t
  misc_feature (273)..(273): n is a, c, g, or t
tgatatgctaggaatgatgtggaaaataagggagagaaaaacaggcctgggcaggaactgtnggaaaagntcagacatccaaacnnatatattacatatatagatctataatatgtataatctccataaaacatatattaaggcatgtaaagcaacataaagagccagctttatgaaataagagatgagagagaggtggcagaggcgcagacattatttcttggtattttacatgtatttctaaaaaatattactttnnnnnnnnnnnnnganacggacaaagtggcaggcatggaaggccctgaaaaat

SEQ ID NO: 68018 - DNA, 1191 bp, Homo Sapiens
  misc_feature (46)..(46): n is a, c, g, or t
agcaaacatactgtgtccttgcagaagttgatgtgctgagcagcancttatgggtgggtctttttttcttagttttccaggcttaacatttttgattttgttttttaatgtttggaacataaatgaagatttgatacattatttcattatctaaaaaggattaattattcatgctcattgtaagaacttcattttgtagcaaatggcatatcacaggatctgtccagataatcgatattttcagtatacaaatgtaaataatcacagatgagaatgtacttagctgtattttcaaataagtgatcttccccccttttgtaggactttaaaactaggcatcaatgaacctgtttttcctattatgcctggaatttagtcatgataccttgactcattccatcatatttcaagaggattcagagtgctagaaattattttggtagcctgtaacacacggcaacactggtccttgggcctatgatgacccacagatgactcagtatagagttcattgctaattataaattactagtgaatctttttgatattttaagctctagtgggaaaaatctggccacttttgtgtttttatgaaggccatggaataaaaggatccaaagatttaaatatttttatctaatattttgattggtctcctaactttctccttaaaacattcagtagtgataaagatatagaaactgcactgtaggagaattggaatatttaaggctggttgacattttttattttcattttatatcttttgtatagctctacaaggcagtgttttgtaatttggtttcattatgaagatccagtacttggcagccatagtttagacaatattgttcagtgctgtttgcttgcatgttaacaacaaaaccttttagaggacccacaaatcatgatattgaacacagttccgaggcattcagagcatcagagcaagtaccatggcaatacatgtgtagactgttggagatgtcccgggccaatttcaagaaagaaaactgtaaatactagttctacttgctctgaaattatgagtttatgcgttttcccagccctccgaatcactgactggggcgttttgtgccccagcaataactggcagcatggcatacctgcagtaccccttacaatattaaagcaaagtttttattctaaaacagaataaaactgttcaat

SEQ ID NO: 68019 - DNA, 1230 bp, Homo Sapiens
  misc_feature (1117)..(1151): n is a, c, g, or t
tttttttaagaatctttcaacttttatttctagcatacattcatctggacctttttgtttctttacaatgttccccctaagataaatgaatacaataaaaatataatccaactaccagcaatgtttctaaccagaaaagaatctaaaatctctggtgtgataatataggatttttttaaaaaatataaacttcataccagaaataaagcctgaatattctctttctttaaaaatataatttttccttctttgctcttccaagtaaatcttaaaatgaacctgttctagtctatttttaatctagcaattataacactacctagcagggttttttcctttataccttgttctgtactgtgaatcaactaataattgcaaacgtctttaaaaagtgagatgccatttggctgtagcaagattcttcaagagatgctgaaaatttctattaccttacaccttaatccctattatgcaaactgaaacccacttaacaaattatattatcctgtttctgaaattagaaaatgtataaaagcacttttgcaaactgtaaagttcaaatggaaaacattttttataatctgtttggactataaagactgctgactgggacagaactttagggacacaaggctctgtgaaatccatttttttctgcaactccttagttttgaaggggaggtttataaattgcaaacaagctggggtatggatacaggaatatctcataaagattgattggtttgtcgtgacatgtgactgtttttcttaattgagaataaagaccaaggggcacagggagagttctcttagatcaatactttataccagactgataaaaattagacagtgttttccccacttctgactagttcctctatgcagagcttcattatttaagtacaatccagtttaaaatagtattccaaagctcagcataaatggtctggggatgatttcctttccttgatttaggaagataataaagcctaattataaatatgggtacaacacacctgaatcacagagtagtacccttccaactccaaaccaacagtatgatcctcccggccgtaatggccgaattcccgggcatatgtccggtaccgtcgactgnnnnnnnnnnnnnnnnnnnnnnnnnnnnnnnnnnncggccgcttcctcgctcaataacttcgctgcgctcgtcgttcgtgtgaagagtagcgcctatagtgatcttacactctt

SEQ ID NO: 68020 - DNA, 590 bp, Homo Sapiens
  misc_feature (215)..(215): n is a, c, g, or t
gcatttaaggaagaaataatgtcagttctctataatcacttttagaaaatagaagtaagaggtatacctcgtaactcattcaaggaggcaggcattatcttaatatcaaaaccggggaaatacactacaagaaatgaaacctacagctcaatatattttatgaatatagatggaaaaattttccaataaaatattagcctaagtgaatccaaaanatatataaaaatagtaatacatcacagtaagtgcaatttattttaggcatacccagactgatctgacatttattaactggctaaagaactattttatgattctgtcaattgatgcagagaaagcatttgacaaactccaacatctccaacatctatttatgagaaaaagtcttagaaaactaggaataaaaaacatcctcaacttaatctggaacatctaaaaaataggacttcacgctattttatggtgagaaatgatatgcttttcttctatattgggaacaagacaaggttctttttttgccactcttattcaccatcctactggatgtcctaattagtgcaacaaggcaagaaaaaatatatatacagatt

SEQ ID NO: 68021 - DNA, 1849 bp, Homo Sapiens
  misc_feature (1586)..(1586): n is a, c, g, or t
  misc_feature (1588)..(1588): n is a, c, g, or t
  misc_feature (1590)..(1593): n is a, c, g, or t
  misc_feature (1595)..(1596): n is a, c, g, or t
  misc_feature (1598)..(1598): n is a, c, g, or t
  misc_feature (1600)..(1600): n is a, c, g, or t
  misc_feature (1604)..(1606): n is a, c, g, or t
aataatccggctaggtacgaggctgggtggtgaattcggcacgaggcaaagtcagagtggtggtcatggtcctggaggtggcaagaaggatgacaaggacaagaaaaagaaatatgaacctcctgtaccaactagagtggggaaaaagaagaagaaaacaaagggaccagatgctgccagcaaactgccactggtgacacctcacactcagtgccggttaaaattactgaagttagagagaattaaagactatcttctcatggaggaagaattcattagaaatcaggaacaaatgaaaccattagaagaaaagcaagaggaggaaagatcaaaagtggatgatctgagggggaccccgatgtcagtaggaaccttggaagagatcattgatgacaatcatgccatcgtgtctacatctgtgggctcagaacactacgtcagcattctttcatttgtagacaaggatctgctggaacctggctgctcggtcctgctcaaccacaaggtgcatgccgtgataggggtgctgatggatgacacggatcccctggtcacagtgatgaaggtagaaaaggccccccaggagacctatgcagatattggggggttggacaaccaaattcaggaaattaaggaatctgtggagcttcctctcacccatcctgaatattatgaagagatgggtataaagcctcctaagggggtcattctctatggtccacctggcacaggtaaaaccttgttagccaaagcagtagcaaaccaaacctcagccactttcttgagagtggttggctctgaacttattcagaagtacctaggtgatgggcccaaactcgtacgggaattgttccgagttgctgaagaacatgcaccgtccatcgtgtttattgatgaaattgacgccattgggacaaaaagatatgactccaattctggtggtgagagagaaattcagcgaacaatgttggaactgctgaaccagttggatggatttgattctaggggagatgtgaaagttatcatggccacaaaccgaatagaaactttggatccagcacttatcagaccaggccgcattgacaggaagattgagttccccctgcctgatgaaaagacgaagaagcgcatctttcagattcacacaagcaggatgacgctggctgatgatgtaaccctggacgacctgatcatggctaaagatgacctctctggtgctgacatcaaggcaatctgtacagaagctggtctgatggccttaagagaacgtagaatgaaagtaacaaatgaagacttcaaaaaatctaaagaaaatgttctttataagaaacaggaaggcacccctgaggggctgtatctctaatgaaccatggctgtcatcaggaaaatggttgggagatttctcaatccctgaaagggatgaggttgggggagttgcccagaggaatccctgttcccactgatttttattagcaaaacatcctgtgtcttttggagtacgatgtgtaagtgcccattgggtggcctgttggtcactgtgcagcagtctgcttcccaataaagcgtgctctttcacaaacaaaaananannnncnnananaaannnccctgtcgggccgcctcggcccctccaaaaagcttttctaaaccattccttttggcgcggcgggccccattaggtaaagggaaactgggccatagcctgttttcccaaggagacccctgggtcatgactaagggcctgggaattcctcccccaataaaaaaacgccccgggcgggccaccgaagcgtttttgaaacaaatcccgaaagggaggttcctggagggtcctttaactggggaccca

SEQ ID NO: 68022 - DNA, 1144 bp, Homo Sapiens
  misc_feature (921)..(921): n is a, c, g, or t
  misc_feature (942)..(950): n is a, c, g, or t
cggcagtaactataacggtcctaaggtagcgaggcctgggtggcgaattcggcacgagggcaagatgggtcaaagtcagagtggtggtcatggtcctggaggtggcaagaaggatgacaaggacaagaaaaagaaatatgaacctcctgtaccaactagagtggggaaaaagaagaagaaaacaaagggaccagatgctgccagcaaactgccactggtgacacctcacactcagtgccggttaaaattactgaagttagagagaattaaagactatcttctcatggaggaagaattcattagaaatcaggaacaaatgaaaccattagaagaaaagcaagaggaggaaagatcaaaagtggatgatctgagggggaccccgatgtcagtaggaaccttggaagagattattgatgacaatcatgccatcgtgtctacatctgtgggctcagaacactacgtcagcattctttcatttgtagacaaggatctgctggaacctggctgctcggtcctgctcaaccacaaggtgcatgccgtgataggggtgctgatggatgacacggatcccctggtcacagtgatgaaggtagaaaaggccccccaggagacctatgcagatattggggggttggacaaccaaattcaggaaaattaaggaatctgtggagcttcctctcaaccatcctgaatattatgaagagatgggtataaagcctcctaagggggtcattctctatggtccacctgggcacaggtaaaaccttgttagccaaagcagtagcaaaacaaactcaagcatttctggagagggggtggctctgaacttatgcagaagtacttaagtgatgggccaaatccgtaggggaatcggtccagattgtgaaaattggccgcacgggttttgggaatggggctggngcaacagaattgatccagttnnnnnnnnnacggagatttcggcgaaaaggtttgacgtttgaacctggagggatgatgtagggaagggtagaatattggtggccaggagaaatgtgggtgcatatagagggttatgaaaagagaccgcgtagaaaaaagggtttttacaaggagggtatatcaggactaacactgtgaaagtgtgtacgaaacataacagatg

SEQ ID NO: 68023 - DNA, 1003 bp, Homo Sapiens
acggcagtactatacggttataaggtagcgaggcctgggtggcgaattcggcacgaggcggcagctcaagtggccaaggcaagatgggtcaaagtcagagtggtggtcatggtcctggaggtggcaagaaggatgacaaggacaagaaaaagaaatatgaacctcctgtaccaactagagtggggaaaaagaagaagaaaacaaagggaccagatgctgccagcaaactgccactggtgacacctcacactcagtgccggttaaaattactgaagttagagagaattaaagactatcttctcatggaggaagaattcattagaaatcaggaacaaatgaaaccattagaagaaaagcaagaggaggaaagatcaaaagtggatgatctgagggggaccccgatgtcagtaggaaccttggaagagattattgatgacaatcatgccatcgtgtctacatctgtgggctcagaacactacgtcagcattctttcatttgtagacaaggatctgctggaacctggctgctcggtcctgctcaaccacaaggtgcatgccgtgataggggtgctgatggatgacacggatcccctggtcacagtgatgaaggtagaaaaggccccccaggagacctatgcagatattggggggttggacaaccaaattcaggaaattaaggaatctgtggagcttcctctcacccatcctgaatattatgaagagatgggtataaagcctcctaagggggtcattctctatggtccacctggcacaggtaaaaccttgttagccaaagcagtagcaaaccaaacctcagccactttcttgagagtggttggctctgaacttattcagaagtacctaggtgatgggccaaactcgtacgggaattggtcccgagttgctgaagaacattgcaccggcccatcgtggttttattggatggaaaattggacgcccctttggggaaccaaaaaaggaaaattgaactccccaaatttcct

SEQ ID NO: 68024 - DNA, 799 bp, Homo Sapiens
  misc_feature (616)..(617): n is a, c, g, or t
  misc_feature (763)..(763): n is a, c, g, or t
gggaggaacttccggcagcggcagctcaagtggccaaggcaagatgggtcaaagtcagagtggtggtcatggtcctggaggtggcaagaaggatgacaaggacaagaaaaagaaatatgaacctcctgtaccaactagagtggggaaaaagaagaagaaaacaaagggaccagatgctgccagcaaactgccactggtgacacctcacactcagtgccggttaaaattactgaagttagagagaattaaagactatcttctcatggaggaagaattcattagaaatcaggaacaaatgaaaccattagaagaaaagcaagaggaggaaagatcaaaagtggatgatctgagggggaccccgatgtcagtaggaaccttggaagagattattgatgacaatcatgccatcgtgtctacatctgtgggctcagaacactacgtcagcattctttcatttgtagacaaggatctgctggaacctggctgctcggtcctgctcaaccacaaggtgcatgccgtgataggggtgctgatggatgacacggatcccctggtcacagtgatgaaggtagaaaaggccccccaggagacctatgcagatatttgggggggtggnnacacccaaatcaggaaattaaggaatctgtggagcttcctctcacccatcctgaatattatgaaagagatgggtataaagccctcctaagggggtcaattctctatgggtccaccctgggcacagggtaaaaaccttgtttagccnaaaagcaagtagcaaaaccaaaacctcagccacctt

SEQ ID NO: 68025 - DNA, 1023 bp, Homo Sapiens
ggctataggtgacactatagaaaaagttgtatcaaaaaagcaggctggtacgggtccggaatcccgggatatcgtcgaaccacgcgtccggtcaaagtcagagtggtggtcactggtcctggaggtggcaagaaggatgacaaggacaagaaaaagaaatatgaacctcctgtaccaactagagtggggaaaaagaagaagaaaacaaagggaccagatgctgccagcaaactgccactggtgacacctcacactcagtgccggttaaaattactgaagttagagagaattaaagactatcttctcatggaggaagaattcattagaaatcaggaacaaatgaaaccattagaagaaaagcaagaggaggaaagatcaaaagtggatgatctgagggggaccccgatgtcagtaggaaccttggaagagatcattgatgacaatcatgccatcgtgtctacatctgtggactcagaacactacgtcagcattctttcatttgtagacaaggatctgctggaacctggctgatcggtcctgctcaaccacaaggtgcatgccgtggataggggtgctgatggatgacacggatcccctggtcacagtgatgaaggtagaaaaggccccccaggagacctatgcaaatatagcggggtggacaaccaaattcaggaaatgaaggaatctgtggagcttcctctcacccatcctgaatattatgaaggagatgggtataaaggctcctaagggggtcattcttctatggtccacctgggcacaggtaaaaccctgtttagccaaaggcagttagcaaaccaaaactcaggcactttcttgagagggttggtcgggaactattagaagttcctagtgatggcccacacgtacggattgtccgagttgtgaaattgcccgccatctgtttgacgaatgcgccctggccacgattacccctcgggggggaaacacgacacagtgacgcgaccagcggtcgcctgggacgggagatgcgcacgcaactcc

SEQ ID NO: 68026 - DNA, 543 bp, Homo Sapiens
tttccatgtttggtatctgatccctacaacctgtgagctcctccagggcagagacttgtgctcacaactgtgtccctagagtccagatggtcctggatcagggcgggtgctcaagacatggttattcataactgaccagtctctccagacgttcacagttactgggcagttgttagctggctcctgggagagcagagcctaaagcatgcatggaaggccacgcacagcaagaactgtggccatagggagagccccctgagattgcccattctcaagagaagagctatgcggtgttccctactaaacaaggcaaaataagtatgagaaagtctacctttttgtcccaatggcgtcaatttcatcaataaacacgatggacggtgcatgttcttcagcaactcggaacaattcccgtacgagtttgggcccatcacctaggtacttctgaataagttcagagccaaccactctcaagaaagtggctgaggtttggtttgctactgctttggctaacaaggttttacctattttggatgaaaaaga

SEQ ID NO: 68027 - DNA, 1741 bp, Homo Sapiens
  misc_feature (83)..(117): n is a, c, g, or t
ccagaactgatagatcactataggggctagcgtcttagagccgaacgacgagcgcagcgaagtagtgagcgaggaagcggcgnnnnnnnnnnnnnnnnnnnnnnnnnnnnnnnnnnncagtcgacggtaccggacatatgcccgggaattcggccattacggccgggggccccgcgagcgccgagacttgttggccgcggagactgcgaccctcttctctcagtctgccttactaccatgccgctctacgagggcctggggagcggcggggagaagacggcggtcgtgatcgacctgggagaggcctttaccaagtgtggatttgctggagaaactggtccaagatgtataattcctagtgtgataaaaagagctgggatgcctaagcctgtcagagttgttcagtataatatcaatacagaagaattatattcctacctaaaggaattcatccacatactatatttcaggcatctattggtgaatcccagagaccgccgagttgtgattatcgaatcggtattatgtccttctcacttcagagagacactcactcgtgttcttttcaaatattttgaggttccatctgtcttgcttgctccaagtcatctaatggctcttctgacgcttggaattaattctgccatggtcctagattgtggatatagggaaagcctggtgttacccatatatgaaggaatcccagttctaaattgttggggagcactacccctaggaggaaaagctcttcacaaagagttggaaactcaactattggaacaatgtactgttgacacaagtgttgctaaagaacagagccttccctcagtgatgggttcagttccggaaggtgtcttagaggacattaaagcgcgtacttgctttgtaagtgatctgaagcgaggactaaaaatccaagcagcaaaatttaatattgatgggaataatgagcgtccctccccacccccaaatgttgactatccattagatggagagaagattttacatatccttggatcaatcagagattcagttgtggaaattctttttgaacaagataatgaagagcaatcagttgccactttaatattggattcccttatacagtgtccgatagacaccaggaagcaactagcagagaatttggtagtcataggtggcacttctatgttgccaggatttctccacagattgcttgcagaaataaggtatttggtagaaaaaccaaaatataaaaaagcacttggcactaagacatttcgaattcatactccacctgcaaaagctaattgtgtggcctggttgggaggggctatttttggagcattacaagatatacttgggagccgttctgtttcaaaggaatattataatcagacgggccgtatacctgattggtgttctctcaataacccacctttggaaatgatgtttgatgtcgggaaaactcaaccacctctgatgaagagagcattttccactgagaaatagaagtttgattaaaaatcaaccttgcttcatatcaaatatttaaccaattataagcaaattgtacaaagtatgtaggatgttttgttatagaggactatagtggaagtgaaagcattctgtgtttactctttgcattaatatataattcttttgactttgtttctcttgtgtagtggtaaaatggtagctggtgcttattgagatttgctgtatttatatcaataaagtatagtaaagcagtttgattttg

SEQ ID NO: 68028 - DNA, 734 bp, Homo Sapiens
aacaacaatcagccttgggtctcagaagtcaaacaaaactcttttagcaaaaggcttactgctgactgcatatagcaaaggcagagaaagacgctgcccacaacataatgaaagatcatctacattttgcccagcatcaatcttagtcatgcatatctagcaccgagagccactgcggggtcacactggggcagttacagaacacatctttctcggagtgcagatgctccttcttggttggacaccgtgggccaattcaatttagaagtgcacaggtgagctctgagaaggtgtggccaggagctgccagggcagaaactggggcgcactcgtccacaggcggcaaacgacgcagctggaggacttcttgcttcagccggagctctggcatgaacccccggggaactgtgctcactgagcgagggagccccagaggctcacacagagcgggctgggtcttaagacgaggggacgatcaccgatgtgagttccggacactttgtccactccacattggccatcagagggggaatcaatgcaacccagtgcgaatgaccacagaatcgcattccttttcgtagcaaggaccaaaaaaagatgacattaacaaaaatgatgaaaaacattgtgcaatgaattcttgcagctaagaaaacagtgctatttgccaacctaaagcccctcagtatcatcagcacacgctggcataaacacattcactgttgtcccacagc

SEQ ID NO: 68029 - DNA, 1318 bp, Homo Sapiens
aaactatacggtaggtacgaggctgggtggctgaattcggcacgaggaagatggcggcggcgtgagttgcatgttgtgtgaggatcccggggccgccgcgtcgctcgggccccgccatggccgtcaccatcacgctcaaaacgctgcagcagcagaccttcaagatccgcatggagcctgacgagacggtgaaggtgctaaaggagaagatagaagctgagaagggtcgtgatgccttccccgtggctggacagaaactcatctatgccggcaagatcttgagtgacgatgtccctatcagggactatcgcatcgatgagaagaactttgtggtcgtcatggtgaccaagaccaaagccggccagggtacctcagcacccccagaggcctcacccacagctgccccagagtcctctacatccttcccgcctgcccccacctcaggcatgtcccatcccccacctgccgccagagaggacaagagcccatcagaggaatccgcccccacgacgtccccagagtctgtgtcaggctctgttccctcttcaggtagcagcgggcgagaggaagacgcggcctccacgctagtgacgggctctgagtatgagacgatgctgacggagatcatgtccatgggctatgagcgagagcgggtcgtggccgccctgagagccagctacaacaacccccaccgagccgtggagtatctgctcacgggaattcctgggagccccgagccggaacacggttctgtccaggagagccaggtatcggagcagccggccacggaagcagcaggagagaaccccctggagttcctgcgggaccagccccagttccagaacatgcggcaggtgattcagcagaaccctgcgctgctgcccgccctgctccagcagctgggccaggagaaccctcagcttttacagcaaatcagcggcaccaggagcagttcatccagatgctgaacgagccccctggggagctggcggacatctcagatgtggagggcgaggtgggcgccataggagaggaggccccgcagatgaactacatccaggtgacgccgcaggagaaagaagctatagagaggttgaaggccctgggcttccagaagagcctggtcatcccacgcctatttcgcgtggttgaccaccccatggagaaccttggctggccaattcctccttgaagtccagaactctgatgcacgagtgatgccaggaagccaggccaccgaaagccccaacctaaccttattccatgaaagtctattcacaacgacaacatttatattcttcctgttactttcagcacc

SEQ ID NO: 68030 - DNA, 1828 bp, Homo Sapiens
  misc_feature (1303)..(1329): n is a, c, g, or t
  misc_feature (1798)..(1798): n is a, c, g, or t
gcagtaactataacggtcctaaggtagcgaggcctgggtggcgaattcggcacgagggtgagttgcatgttgtgtgaggatcccggggccgccgcgtcgctcgggccccgccatggccgtcaccatcacgctcaaaacgctgcagcagcagaccttcaagatccgcatggagcctgacgagacggtgaaggtgctaaaggagaagatagaagctgagaagggtcgtgatgccttccccgtggctggacagaaactcatctatgccggcaagatcttgagtgacgatgtccctatcagggactatcgcatcgatgagaagaactttgtggtcgtcatggtgaccaagaccaaagccggccagggtacctcagcacccccagaggcctcacccacagctgccccagagtcctctacatccttcccgcctgcccccacctcaggcatgtcccatcccccacctgccgccagagaggacaagagcccatcagaggaatccgcccccacgacgtccccagagtctgtgtcaggctctgttccctcttcaggtagcagcgggcgagaggaagacgcggcctccacgctagtgacgggctctgagtatgagacgatgctgacggagatcatgtccatgggctatgagcgagagcgggtcgtggccgccttgagagccagctacaacaacccccaccgagccgtggagtatctgctcacgggaattcctgggagccccgagccggaacacggttctgtccaggagagccaggtatcggagcagccggccacggaagcaggagagaaccccctggagttcctgcgggaccagccccagttccagaacatgcggcaggtgattcagcagaaccctgcgctgctgcccgccctgctccagcagctgggccaggagaaccctcagcttttacagcaaatcagccggcaccaggagcagttcatccagatgctgaacgagccccctggggagctggcggacatctcagatgtggagggggaggtgggcgccataggagaggaggccccgcagatgaactacatccaggtgacgccgcaggagaaagaagctatagagaggttgaaggccctgggcttcccagagagcctggtcatccaggcctatttcgcgtgtgaaaaaaatgagaacttggctgccaacttcctcctgagtcagaactttgatgacgagtgatgccaggaagccaggccaccgaagcccccaccctacccttattccatgaaagttttataaaagaaaaaatatatatatattcatgtttatttaagaaatggnnnnnnnnnnnnnnnnnnnnnnnnnnncaagcaaacagtccagcttcctgtcctcctaaagtggcccctgttcccatctcccgggccagacagctgtccccccgtcctcctccccagcccagcctgctcagagaagctggcaggactgggaggcgacagatgggcccctcttggcctctgtcccagctctctgcagccagacggaaaggcggctgcttgcctctccatcctccgaaaaacccctgaggaccgccccccatcctcttctaggatgaggggaagctggagccccaactttgatcctccattggagtggcccaaatctttccatctagggcaagtcctgaaaggcccaaggccccctccccagtctggccttggcctccagcctggagaagggctaacatcagctcattgtcaaggccacccccaccccagaacagaaccgtgtctctgataaaggttttgaagtgaataaagttttaaaacctacatnccaccaccaacccaaccaaaaaatcctgtc

SEQ ID NO: 68031 - DNA, 517 bp, Homo Sapiens
aggatgtggctgtctacttctcccaggaggaatggagattgcttgatgacgctcaaaggctcctctaccgcaatgtgatgctggagaactttacacttctggcctctctgggacttgcgtcttccaagacccatgaaataacccagctggagtcatgggaggagcccttcatgcctgcttgggaagttgtgacttcagccataccgagagaaactctgaggatggcctttatgagggagctggcaattgaacatcattcatctaaatatgcacactggaggcaagatgagaattcctgacagattgtccttcctgagaagacagccctctgccttggagctccagagagagggagccctgtattcttggctgtacccgtcgaatggagttttgatctcgctgagtttggagttgggggaggaaaggagtggtcttggttcaaatgtgactcacttttgctgttcttatgaatgttagatcttctttaataaatatttacttgccataaacccttaaa

SEQ ID NO: 68032 - DNA, 1000 bp, Homo Sapiens
  misc_feature (923)..(923): n is a, c, g, or t
  misc_feature (956)..(956): n is a, c, g, or t
gcgctaggtagcgaggcatgggtggcttcatcggcacgaggcgctgcggcgaccagctccggaaagcgcggtggggacgcgctgtgttctcgcagctcagaggcgggtctgaggctcggtggcggcgcccagggtggcccgggccctttcctcggtcgttgtctcaccgccacaggctccgatggcggcggccacgctgagggaccccgctcagcagggctatgtgacctttgaggatgtggctgtctacttctcccaggaggaatggagattgcttgatgacgctcagaggctcctctaccgcaatgtgatgctggagaactttacacttctggcctctctgggacttgcgtcttccaagacccatgaaataacccagctggagtcatgggaggagcccttcatgcctgcttgggaagttgtgacttcagccataccgagaggttgttggcatggagccgaggctgaggaggctcctgagcagattgcttctgtaggactgctcagttcaaacattcagcaacaccagaagcagcactgtggagagaaacccttaaaaagacaacagggcagggtcccagttttgaggagttgcaaagttcacctatcagagaagtccttgcaaagcagggaggttgggaaggccctcctgatcagctcaggtgttctcaagcaccaggtgactcacacaggagagaagtcacataggagctccaaaagtagggaggcctttcatgctggaaaaaggcattacacatgcagtgaatgtgggaaagcctttggtcagagatatttactcgttcagcaccagagactacatgctgcgcaaaagacgtatgaatgcagtgaatgtgggaaagtattagagatatgtcccacctttttatacaccaaatagttcacacttggagaaaggccttacnggtgtagttactgtggaaaagtctttagccgtnatgctcacctcattgacaccagagagtcacactggagagagcct

SEQ ID NO: 68033 - DNA, 490 bp, Homo Sapiens
gcttgcggccgcccatgagggaccccgctcagcagggctatgtgacctttgaggatgtggctgtctacttctcccaggaggaatggagattgcttgatgacgctcagaggctcctctaccgcaatgtgatgctggagaactttacacttctggcctctctgggacttgcgtcttccaagacccatgaaataacccagctggagtcatgggaggagcccttcatgcctgcttgggaagttgtgacttcagccataccgagagaaactctgaggatggcctttatgagggagctggcaattgaacatcattcatctaaatatgcacactggaggcaagatgagaattcctgacagattgtccttcctgagaagacagccctctgccttggagctccagagagagggagccctgtattcttggctgtacccgtcgaatggagttttgatctcgctgagtttggagttgggggaggaaaggagtggtcttggtt

SEQ ID NO: 68034 - DNA, 464 bp, Homo Sapiens
ctttaaaaaactcctgaaaaccctgaaggccttgttggggaaaccccctttctccttcaaaaacccccaggaattccctgcaaaaaaccaaagaaaagacgtggaactgtttcgggggctcaattcaaactccctgtttctccctgaaacaccttgtaaacttcaagattctttgtcgatgacaaggctgcttggaggctgaagcatggtctaagggtctgctgttcgcctcccaccccgctggcagcagtctttgactccagggcattgttgaagttggagatattttcagaagagtagaggccagctgggttgttgtactggtttgtgatgaccctggcagtagtgctggaggcaggcgaggcggtaaagggcatggcacttcggttgtgggcgcttcctatgtgcaggacctcctggggttcagaggctaaattcatcttgtatggatgacgcttcccttc

SEQ ID NO: 68035 - DNA, 1479 bp, Homo Sapiens
gggcagccccaggctccccgggcccgcgccgcgccgctctttctccgacagccgccgggggtgccctgcaagctgttccgcgcgtcctgcccgtctgtccccgcgggtcgtcgcccgccacagccgcgccatgaccacccagcagatagacctccagggcccggggccgtggggcttccgcctcgtgggcggcaaggacttcgagcagcctctcgccatttcccgggtcactcctggaagcaaggcggctctagctaatttatgtattggagatgtaatcacagccattgatggggaaaatactagcaatatgacacacttggaagctcagaacagaatcaaaggctgcacagacaacttgactctcactgtagccagatctgaacataaagtctggtctcctctggtgacggaggaagggaagcgtcatccatacaagatgaatttagcctctgaaccccaggaggtcctgcacataggaagcgcccacaaccgaagtgccatgccctttaccgcctcgcctgcctccagcactactgccagggtcatcacaaaccagtacaacaacccagctggcctctactcttctgaaaatatctccaacttcaacaatgccctggagtcaaagactgctgccagcggggtggaggcgaacagcagacccttagaccatgctcagcctccaagcagccttgtcatcgacaaagaatctgaagtttacaagatgcttcaggagaaacaggagttgaatgagcccccgaaacagtccacgtctttcttggttttgcaggaaatcctggagtctgaagaaaaaggggatcccaacaagccctcaggattcagaagtgttaaagctcctgtcactaaagtggctgcgtcgattggaaatgctcagaagttgcctatgtgtgacaaatgtggcactgggattgttggtgtgtttgtgaagctgcgggaccgtcaccgccaccctgagtgttatgtgtgcactgactgtggcaccaacctgaaacagaagggccatttctttgtggaggatcaaatctactgtgagaagcatgcccgggagcgagtcacaccacctgagggttatgaagtggtcactgtgttccccaagtgagccagcagatctgaccactgttctccagcaggcctctgctgcagctttttctctcagtgttctggccctctcctctcttgaaagttctctgcttactttggttttccctctgcttgtaaaacattgagtcccctccctgccttggttaattgactcacaccagctgtgcgatgcccgcttttacaattaaaggaaaactgttttgttcagtgtcaccttgtcagcaacactgtgtcccttcgccccaccgttcttctctgctgcatttggacatcagccaaatttgaacccaatcaaatataacgtgtctgacactgattttgtttttactcaataaatgtatagactacaaagcaaaa

SEQ ID NO: 68036 - DNA, 725 bp, Homo Sapiens
gtggtaccggtccggaattcccgggatatcgtcgacccacgcgtccgcggacgcgtgggcgcggagcttagctgtcgccacctcgcgccgggtccgcgcggcccacgggaccccccactgacgcccccggccagcggtccacatggacgtgcggggccctgaagcccccggcgggcgcgcgctgcgggacgcggcagaaaatctatttcaggaacttcaggaacattttcaagctctgacggcaacattaaacctcagaagaaatgggaaatcgcattgaggacttacagaagaatgtcaatgacttaatggtgcaagctggcattgaaaattctattaaagaacaaatgctgaagacctaactgcagcatgtctgtatttggagatggggcctctacagaagtcattaaggttacatcggtcctgagggtggggccctcatccaacaggattcgtctttctgagaagagacgcaaggggctcgcctgctctccccccgtgcctgcaccagagaaggaggccatcggcaagccaaggagagccctccccagaaatcacacggaccagcaccttgatctgggacttccagaaaacagaactgtgaaaagacaagtttctgttgtttaaaccacccaatctgaagtattttgttatggcagtcctgggcagactaatacaatatgcaacacatttacaataaatatacaataaacttacaaaggtgg

SEQ ID NO: 68037 - DNA, 762 bp, Homo Sapiens
ccagagagccactagtatatccaacttgattaaagcaccacagtgccacagacgaggcaaggcttggcagccatgcaggcctaggtttcaaattcttatcctctgttgctggctgtaacctggggaaatctaagctttagttttcttctctgccgaatatctacctggtaaggagttgtaaggatttaagaaaattgcttgcaaagcacttaagtcagggcaaggtagacagcaggtacataatgagataaacttgaaatacagagtccaaatcattatgatttcaactgtactgcagccacaaagcaccagtgagaacgttattaaaatcaggggtgaacatacttaatacacctgataggagttacggcctgaacgtttatgtctccctaaatagctgaagacctaactgcagcatgtctgtatttggagatggggcctctacagaagtcattaaggttacatcggtcctgagggtggggccctcatccaacaggattcgtctttctgagaagagacgcaaggggctcgcctgctctccccccgtgcctgcaccagagaaggaggccatcggcaagccaaggagagccctccccagaaatcacacggaccagcaccttgatctgggacttccagaaaacagaactgtgaaaagacaagtttctgttgtttaaaccacccaatctgaagtattttgttatggcagtcctgggcagactaatacaatatgcaacacatttacaataaatatacaataaactt

SEQ ID NO: 68038 - DNA, 727 bp, Homo Sapiens
  misc_feature (389)..(497): n is a, c, g, or t
  misc_feature (548)..(661): n is a, c, g, or t
aggccttaggactataaaccagttgttaaaaaagcaggctggtacggtcggaattcccgggatatcgtcgacccacgcgtcggcggagcttagctgtcgccacctcgcgccgggtccgcgcggcccacgggaccccccactgacgcccccggccagcggtccacatggacgtgcggggccctgaagcccccggcgggcgcgcgctgcgggacgcggcagaaaatctatttcaggaacttcaggaacattttcaagctctgacggcaacattaaacctcagaatggaagaaatgggaaatcgcattgaggacttacagaagaatgtcaaggacttaatggtgcaagctggcattgaaaattctattaaagaacaaatgctgaagacctannnnnnnnnnnnnnnnnnnnnnnnnnnnnnnnnnnnnnnnnnnnnnnnnnnnnnnnnnnnnnnnnnnnnnnnnnnnnnnnnnnnnnnnnnnnnnnnnnnnnnnnnnnnnacgcaaggggctcgcctgctcttccctccgtgcctgcaccagagaaggagnnnnnnnnnnnnnnnnnnnnnnnnnnnnnnnnnnnnnnnnnnnnnnnnnnnnnnnnnnnnnnnnnnnnnnnnnnnnnnnnnnnnnnnnnnnnnnnnnnnnnnnnnnnnnnnnnncaccccatctggaagtattttggttatggcaagtcccggggcaaacttataccaatatggccaccc

SEQ ID NO: 68039 - DNA, 1042 bp, Homo Sapiens
  misc_feature (117)..(493): n is a, c, g, or t
  misc_feature (502)..(502): n is a, c, g, or t
cccccttgcttagctcgatttttgtcctctcagggggccggccttatgaaaaacccagcaccccgcttttaacgttcttgccctttgttgccttttgctcacatgtcttccctgcgnnnnnnnnnnnnnnnnnnnnnnnnnnnnnnnnnnnnnnnnnnnnnnnnnnnnnnnnnnnnnnnnnnnnnnnnnnnnnnnnnnnnnnnnnnnnnnnnnnnnnnnnnnnnnnnnnnnnnnnnnnnnnnnnnnnnnnnnnnnnnnnnnnnnnnnnnnnnnnnnnnnnnnnnnnnnnnnnnnnnnnnnnnnnnnnnnnnnnnnnnnnnnnnnnnnnnnnnnnnnnnnnnnnnnnnnnnnnnnnnnnnnnnnnnnnnnnnnnnnnnnnnnnnnnnnnnnnnnnnnnnnnnnnnnnnnnnnnnnnnnnnnnnnnnnnnnnnnnnnnnnnnnnnnnnnnnnnnnnnnnnnnnnnnnnnnnnnnnnnnnnnnnnnnnnnnnnnnncccaagatntcggcacgaggccgccagtgggttgctctggttgtgggacatgaacttgcccatcaatggtttggaaatcttgttactatggaatggtggactcatctttggttaaatgaaggttttgcatcctggattgaatatctgtgtgtagaccactgcttcccagagtatgatatttggactcagtttgtttctgctgattacacccgtgcccacgagcttgacgccttagataacagccatcctattgaagtcagtgtgggccatccatctgaggttgatgagatatttgatgctatatcatatagcaaaggtgcatctgtcatccgaatgctgcatgactacattggggataaggactttaagaaaggaatgaacatgtatttaaccaagttccaacaaaagaatgctgccgcaggtaatctttaatagcttgagatagaaatggagagaaagtattgtcactctatccaggctgggacattttatttttgttctgaatacttaactcaaggtcaggatccatgtaataaataaattagcctt

SEQ ID NO: 68040 - DNA, 511 bp, Homo Sapiens
tgggtaaatgaaggtttttgcatccgggattggaaaatctggtgtgtagacccctgggcttccccagagtatgatatttggactcaggtttgtttctgctgattacacccccgtgccaggagcttgacgcctttagataacagcccatcctattgaatataacaggccacctccctcctgtcataaccctgaatcacacttgtctgccaggtcagggtgggccatccatctgaggtggatgagatatttgatgctatatcatatagcaaaggtgcatctgtcatccgaatgctgcatgactacatgggggataaggactttaagaaaggaatgaacatgtatttaaccaagctccaacaaaagaatcctgccgcaggtaatctttaatagcttgagatagaaatggagagaaagtattgtcactctatccaggctgggacattttatttttgttctgaatacttaactcaaggtcaggatccatgtaataaataaattagccttatttgaa

SEQ ID NO: 68041 - DNA, 2694 bp, Homo Sapiens
  misc_feature (163)..(178): n is a, c, g, or t
  misc_feature (693)..(721): n is a, c, g, or t
  misc_feature (832)..(844): n is a, c, g, or t
  misc_feature (1107)..(1152): n is a, c, g, or t
attgacatttttattaacgccaactgttttttaattgtgtgtttaaaacaatagcacaaaaatgtttcaaggaagcagtctcacaatctgatgaccttctgaaataccgttaagccacaccaaatatgaatttctgttaataacacaaaatatttttttaagnnnnnnnnnnnnnnnnggtagggaaagaagaagggaatgagatttagatttaaaactcattggattaaataggtgaggcttattagtaggatatactgttgaagcaaacagtggcacacacaggcttacagtctttgttttttaaaccagttaccactaatgtattaagccctgcagcagttaccactgacttctcgcacgcataaaatgaaccgggagaagccagtgttgatactgttgtgaagaggttcaagagctggcttttcagacaactaagaccatttttagcagaataactccttcagaaaggcctggctgaagatctttttatttctattgtctcacctatataaatttcagggttcttataagtcatctttagaaagaaaaaaataatgtatatcagtttctcttatttaatgtggctatgaaagatgtttccttattatttcttcatctctaagaaggacaccagggaatgggggttggggggtggaactaaagggaggaaaaaaacagaacagggtaggnnnnnnnnnnnnnnnnnnnnnnnnnnnnngggcaaggggtcggtcacacagaagggaaggcaaggaggaaaactaaactacaatccttggttcagattgagttatgcaggaatatatcttcctgatcagtccccgtgccnnnnnnnnnnnnngccacttggaattatgcactgactccaactatgtgataccagctatcagccttttgtgtttaaccattcccagaaatggacaccacccttggctttataggctccttgcagaacccacttcacaaaaatgctcttcaccaagaagcctctagtttccttttggtaggttataaaaacagaacatctgtcattaacagtagagtgttaaatacttttaaccactgacaaggcttcagaaagtttcacagtttcgttatgctctnnnnnnnnnnnnnnnnnnnnnnnnnnnnnnnnnnnnnnnnnnnnnngctgaattgctgattttcctttttcaatagaatttaattctggagtgtgagcaggaaccagttaactacattcattgtccaacccccactggtttgaaagaagactccaaattcttggcatatgaatcagctgttcggtagctccaccttatccctgcagcgaagcagcagaaccgccaatggcggcacctcaggattcacactgtgggtggtgaggccttccgctgaaggaggtactggtggatgctctcagcatctcgctttagccaggcagcattcagcagaatattttcacaacactgctggatggtacgctcagctgaaggagctgggtgactctcgaagaaagccttaacctctccagccattttatcaactgcaaatccctcaactgatagctttattagtctggatattaagaatcctccctggtatcggttataaagttcttcccagttgtcctttatgaatttccaagcagctttcctaccatgcttgctgcctccagctactccaccaattaccgatacagtgtcctgtggacgtacctcttctgaaagtgcaaacgtgaggactttttgaatcaggtcaggcaaaagagtagcgccaaggactctttcgattcggtttttctcttcttgcatatctgcttgtttatgaagttttaacataatatctaaagtagtgccatcaccatgcttcaaaacagtcagatagacaggactcctcagatcagcggagagaatctgttttccttccacgtggtccttaaaccgacgacgggcttcttctaacgttgccttatgtcctgcttttcctagttttcccagaaccaagcccctcaggagtgcatcgagatgaccttctccaggtttggggtcccagcccagtctctcccctataggtgaaaagacatctttcacaaactcctggatttcctcatagaagtctgtgtgggacaagagagttgagagaatccccaggttacagctcaggtcgctccatacagtataattgggctcattcacaaaagcctccatgacttttagaacctctacagtgctaatgattccagctcgagccaaggagaagaggtcattctgtaatccaagtcgatccacagggggcagagaaaggtcacgaatgcctggtaataaactttccagcatggcagagctgtactgggtccgataaaacccaactgttcctaagtttaacttcacccattggtctggtttgacatttttcaaaaccacattcatctctggcttgtccattagaatttttagtttggcctggttggggtcttcactagtagagattgtgatagggaccatccactggggacaatcttcaccaacatatgacccaccagcacagaacttcttttgggacaacctcaataatctgtcatcttctacctgttcagcttccacataaatgaggggaaatcccatttgtttggtccaggtattcatcacagctgctataggtttaccactagcattttctaaactttcccagagatcctctcctcgtgcc

SEQ ID NO: 68042 - DNA, 1420 bp, Homo Sapiens
  misc_feature (120)..(120): n is a, c, g, or t
gggcttattaagggatattaggcattccaaaatatcttcattcaacctcaggaagggagtggccccacacctgacttccaattaggatggctgttattctagggcgtcaagctcctgggncccgggtgtattcagcagaaacaaactgagtccaaatatcatactctgggaagcagtggtctacacacagatattcaatccaggatgcaaaaccttcatttaaccaaagatgagtccaccattccatagtaacaagatttccaaaccattgatgggcgagttcatgtcccacaaccagagcaacccactggcgggatgaagaacaggaattttttggatcaataagcaatgcagtctccctataagtaacaaggccccagttctccatggcaccagctgcaaagtctgcaatagcaatgagatcaattttaggtagaggataaggaacattgaagtagtccttataaaaaggcaaggttttagcagcaacctctaacgcaaattttccttgctctgctttgccaacaggagtgtaaacacggacacacacaccatcttttgaccttgtttctacaaagtcatattcacccacaacaaatgccaccagatatgtagacataacaggtgtgcgggcaaacttcacttccactaaattttcatcatcagggtatggtttccggtcaattacattcatgtttgataaagctactctgtctttaggaacaaccaatgagatatcaaaagttgctttgatagcaggctcatcccagcaaggaaaagcccttcgggcatcagtagcctcaaactgtgttacagcagccatagcgcacctctccagaaggggttagtatacttacttctatagaaacctgttcattgttgtcattcagctcgtccaacaaaatctatctttaaggttcccgtacctgtttgcagagtactagggaaagacaaggtgactttttcaatcttcattctgatagttaaatcctgtagcatgtatttgcttcatctgccttctggtgcatatgaagctgtaataatatcatatatcagcacaattcatcacaatctgattagtcgcctgcctcacctcggcggcggcctccagcttgcacctcgaaggtgaagtccaagcaagtcgggcttgaggcaaaggctgcagttgatgggggagacatcggcaggcaccaagctcgaagggcctctttcccaggcatcgcggcgaggcccaggctgtggagcgcgcgagagaggagcggcctgaagacgagaaggaggaggggaggagcaggaggccgaggaagagcagacaggcgacgagggagcggctgcagctcccaaccactatccaaccgagccgcgccgaccgccggaggagagcgaccggggagcatgggggcgggggagagacccagca

SEQ ID NO: 68043 - DNA, 1794 bp, Homo Sapiens
  misc_feature (44)..(78): n is a, c, g, or t
tagctggacgagcgcagcgagctcattgagcgaggaagcggcgnnnnnnnnnnnnnnnnnnnnnnnnnnnnnnnnnnncagtcgacggtaccggacatatgcccgggaattcggccattacggccggggatcgcgggcgcgacgcctgagggacagtctggggtttggctgtccggacggtgcagcggcgaggccggccgcgaagatgccagtggcggtgatggcggaaagcgcctttagtttcaaaaagttgctggatcagtgcgagaaccaggagctcgaggcccctggaggaattgctacacccccagtgtatggtcagcttctagctttatatttgctccataatgacatgaataatgcaagatatctttggaaaagaataccacctgctataaaatctgcaaattctgaacttgggggaatttggtcagtaggacaaagaatctggcagagagatttccctgggatctatacaaccatcaacgctcaccagtggtctgagacggtccagccaattatggaagcacttagagatgcaacaaggagacgcgcctttgccctggtctctcaagcgtatacttcaatcatcgccgatgattttgcagcctttgttggacttcctgtagaagaggctgtgaaaggcatattagaacaaggatggcaagctgattccaccacaagaatggttctgcccagaaagccagttgcaggggccctggatgtttcctttaacaagtttattcccttatcagagcctgctccagttcccccaatacccaatgaacagcagttagccagactgacggattatgtggctttccttgaaaactgatttatcactctgagttcaagattcatcttcagaatcctgtatactgacaaacgtagaaatgtaaagtttgtattttcaatttattggatggcttaagcacctcagcattccttactatgtgataaaatacatatagaatataagatatactatatacattttgtccataaacgttatgctgaatagttgttgaaacaggtctcattttgtaggattttaataatctggatggagcctgtcagtattacagttagttttctagtgactcataaaataagatttcctgtttcatgtagaatagtgtttgtcaactgtcttttctctgtcccagcacatgccgtactcttatatgtaccattggttgataattataatgattcatttggacttgaagaaagattgtccccaggcacagtatctgaatcactggggattatgattcaccctctttggagaacatgctctcttttcaccccccacctcctgagagccactaatgtaagatacagaaacatagctgaggaacaaatagaccatttccatactaaaccagtttgttaactttagattttttccaatagtgtgagtatatccattgctggcagtggagggcttgccatgaaaatgcaacttatttaagacatttatgagacatattaacttgtgctgtcgccttttagaaggagaaacttaagtgtggaatgcattatatgggcaaagaagctatgaagatacatgatacactttgtacaactatcctgcagcccattggttgcttatatttatcgcttggctcaagttctgccctttggagaaatactgagcaagtctttcattctctgtgtgacagccctctgaatatttgaagttgtttgttgtaacttaaggttataacagcccttagttcatttactctgcatttgttcaataaatatttaactgaattcttcaattatttc

SEQ ID NO: 68044 - DNA, 1343 bp, Homo Sapiens
  misc_feature (52)..(441): n is a, c, g, or t
  misc_feature (483)..(499): n is a, c, g, or t
  misc_feature (1281)..(1291): n is a, c, g, or t
acccagcacgcagcatttaacgttctggcttttgctgccttttgctcactgnnnnnnnnnnnnnnnnnnnnnnnnnnnnnnnnnnnnnnnnnnnnnnnnnnnnnnnnnnnnnnnnnnnnnnnnnnnnnnnnnnnnnnnnnnnnnnnnnnnnnnnnnnnnnnnnnnnnnnnnnnnnnnnnnnnnnnnnnnnnnnnnnnnnnnnnnnnnnnnnnnnnnnnnnnnnnnnnnnnnnnnnnnnnnnnnnnnnnnnnnnnnnnnnnnnnnnnnnnnnnnnnnnnnnnnnnnnnnnnnnnnnnnnnnnnnnnnnnnnnnnnnnnnnnnnnnnnnnnnnnnnnnnnnnnnnnnnnnnnnnnnnnnnnnnnnnnnnnnnnnnnnnnnnnnnnnnnnnnnnnnnnnnnnnnnnnnnnnnnnnnnnnnnnnnnnnnnnnnnnnnnnnnnnnnaagaattcggcacgagggttggagcggccgcggctgtaggcnnnnnnnnnnnnnnnnnaacaactttcaatcttcagatgtttcgttgaatctatttagagcttcaccatggcaatatgtatttcccttaaaacactgcaaacaaatatactaggagtgtgcccttttaatctttactagttattgtgagattgctgtgtaagctaataaacacatttgtaaatacattgtttgcaggacgaaaacttctgagttacagctcaggaaaagcctgctgaatttatgttgtaagcattacttaacacagtataaagatgaaaagacaacaaaaatatcttcatacttcctcatcccctcattggaacaaaaccttaaactgggagaaccttagtcccctctctttcctcttcctcctccacttcccacttattgtcaccttgtaatattcagagagcacttggattatggatctgaatagagaaatgcttacagataatcattagcccacataccagtaacttatacttaaagatgggatggagttgtaaagtgcttttataatacaatataattgttaaaggcaagggttgactctttgttttattttgacatggcatgtcctgaaataaatattgattcaatatggcagatgggtcatattctttatttggaagaagttgtgacttctgacatgggtgtgattgtcttcctacactgttgcatttgattctttttatgtatttttaagaaagtaaccagttatactgcttttaatattgattggtctttttatttggcttggagttcttcaaagcattgaagtgtgttcatagtccaggnnnnnnnnnnnaataaacacaattttgctgccaaaaatatataaataaaacacgaaagaaaac

SEQ ID NO: 68045 - DNA, 260 bp, Homo Sapiens
aggggacagaggtcgtgaactattagagcttcacatggcactatgtatttcccttaaaacactgcaaacaaatatactaggagtgtgcccttttaatctttactagttatgtgagatgctgtgtaagctaataaacacattggtaaatacattgtttgcaggacgaaaacttctgagttacagctcaggaaaagcctgctgaatttatgttgtaagcattacttaacacagtataaagatgaaaagacaacaaaaatatc

SEQ ID NO: 68046 - DNA, 542 bp, Homo Sapiens
aaaaaaaggagggggagtagggggaagaaaataattttcctttattaaaatgtactgtcacaatataaaagaaattttgttctttttaaaaaataggtagaatcacctgcatcatgtaatggccgtaattgtgtccagcagatatttttaaaaaagaaaagacagtgaacagaaactgctacctaaggattctagaggcaatgagacacagagtcctgtttttcaggacagaccgtattgcccaagcctctaagcatttacggagcataaattaagaatcttgttttgccttgagtctcaccatgaaataatgacacggtagccacatttggctggagggcctaatatgtaccaggcattgtgctaagtagtttcatatccatgtctcatttattccgaacttttttcctcagggagagaaaaatcaattacagtcttgttcataggaaaaaccaaacttacaattttgggaaagccagaacatgtacagtagaggaggaggcctcaagctacttacagaattctaagagctgtggtgctat

SEQ ID NO: 68047 - DNA, 852 bp, Homo Sapiens
gcacttttaaatcttatcctgccccctaaaaacaaaaggttttgatcacaaggggaaatttaagattgttaaccctgtttttcagaagggctactgttaattgcacataaacatgaaatgtgttttcccctgtgtactaacacattctaggcaaaattcaaacttatagtggtaaagaaacaggttgttcacttgctgaggtgcaaaaattcttaagacttctgtttgaaattgctcaatgactaggaaaagatgtagtagtttactaaaattgtttttctaccatatcaaattaaacaattcatgcctttatagggtcaggcctacaatgaataggtatggtggtttcacagaattttaaaatagagttaaagggaagtgatgtacatttcgggggcattagggtagggagatgaatcaaaaaatacccctagtaatgctttatattttaatactgcaaaagctttacaaatggaaaccatgcaattacctgccttagttcttttgtcataaaaacaatcacttggttggttgtattgtagctattacttatacagcaacatttcttcaattagcagtctagacattttataaacagaaatcttggaccaattgataatatttctgactgtattaatattttagtgctataaaatactatgtgaatctcttaaaaatctgacattttacagtctgtattagacatactgtttttataatgttttacttctgccttaagatttaggttttttaaatgtatttttgccctgaattaagtgttaatttgatggaaactctgcttttaaaatcatcatttactgggttctaataaattaaaaattaaacttgaaa

SEQ ID NO: 68048 - DNA, 895 bp, Homo Sapiens
  misc_feature (56)..(94): n is a, c, g, or t
  misc_feature (98)..(132): n is a, c, g, or t
  misc_feature (423)..(432): n is a, c, g, or t
ttcacgaacccctaacataacaaatgggggaggccggccattagctcgcctaagtnnnnnnnnnnnnnnnnnnnnnnnnnnnnnnnnnnnnnnnccgnnnnnnnnnnnnnnnnnnnnnnnnnnnnnnnnnnncagtcgacggtaccggacatatgcccgggaattcggccattacggccgggaaaataaagccccattctccaactgcaaaatgtgctttcccataatgaacactagtcaccagcacagaataatctccaacattttctaaattctaattgccaactgtttctatttatatttgatttatatttcatttggagtctgttacatggcagcttaggcagactagatcttgtgttttccaatgcagcataatgagtatgatctatttcttttcaaataatctttgagatcccaggnnnnnnnnnntgctctgctccattgagctataatgtaaatgtgtttgtttaaaaaacaggtgaggcaagtgagtgatttattgttcctgaggaagtatatctgattttttttctcatactccaaaagctagtccctactctttaataaaaataatgggtaactttttgtttttcactagcgaacttccatgacatttcctttctatgtagtgtgattaatgcaatacatattatagttatctatacacagtgtaagatttaacaaactgaaatgatccacctcatatgtgagtccgtccaaaagatgttactgctctgggtgggccagtgttctatatcggttatactaactttcatttaaagtatttattctaaaatgcctctgagaaacagtaaaaaataaaaacaacaagttgtctaaaatgcaacagcttttatagtaaatgtacatttataaataaaatactcaaatc

SEQ ID NO: 68049 - DNA, 966 bp, Homo Sapiens
agctgatgcatgagaaccctcgaggcactagattaggagtcttcaataagagacttaacatgaggtatatggaagatgaggcaccgagataagttcatcattaggtgtgagcactgctcacccttgctggcaagttctccttaagggcctgaagcacaggtgtccaaagaaaagcgttaagtccatcttaatagaatctatgtggtatatgatgtggtcagcccctggtctgtgatcagcaagaacctacagcacagattatgccctgcccacttcaatgaatacctactctcctccattctccatcactttttttgctatcaagaactccggaccttgcccatggagaagtttagagaggaactcttgtggagagctggtttattttctgccctgtgcgacgagtttcagctggccaagaaaggagtcaagttattaaaaagcatcacaatgtagatctccaggctggttttaggttttttgttgttaagactggggaaagggggactatttattctgccttaaatcaatggcaaataagtcaagatgacattttgtgaatgtagactatggatacactcctaatagattgatgtagtcataaaagggggtcaagtagatgtttttctgttatgtaagcaataatttttccgtgtcttattgagtatggctagcgattatttattacatgctagatgggttctttgcatgtgggttccatataggtgcagaaatttcctcagccactggagggatttcgaccatatttgtcatttggatgagctgttattagattgaaatctacacatcatttcattaaaaattgtgccttagaaaacgcaaagctgttgcacatggcgataaattatggatgcagtacattgaagagagatgaagtcacttccaagtttccaagacttctcatggaggtgtttgctgttttacaggaaaaaatccggccccaaa

SEQ ID NO: 68050 - DNA, 1459 bp, Homo Sapiens
  misc_feature (419)..(474): n is a, c, g, or t
cagtcgacggtaccggacatatgcccgggaattcggccattacggccgggctcctaatagattgatgtagtcataaaagggggtcaagtagatgtttttctgttatgtaagcaataatttttccgtgtcttattgagtatggctagcgattatttattacatgctagatgggttctttgcatgtgggttccatataggtgcagaaatttcctcagccactggagggatttcgaccatatttgtcatttggatgagctgttattagattgaaatctacacatcatttcattaaaaattgtgccttagaaaacgcaaagctgttgcacatggcgataaattatggatgcagtacattgaagagagatgaagtcacttccaagtttccaagacttctcatggaggtgtttgctgttttacannnnnnnnnnnnnnnnnnnnnnnnnnnnnnnnnnnnnnnnnnnnnnnnnnnnnnnntggttctgaaacatgtacagatcaagtccaatatttggattatccacctgcatgttttattaaatatttggataatgtggatgtttacactttgcatgatattagcagagtaccactagtaatgcacaaacatgtacaatatggtcattcataaccgatttttatagaatactttttacatgtgcaactccatccgttatgtaaggattacatgaatattgcacattcccttctggtttcacaaacccatttatacatatttcttagtgaggctcattgtacatgtattgaagctagaatcgagtcaagaaaaataaagccccattctccaactgcaaaatgtgctttcccataatgaacactagtcaccagcacagaataatctccaacattttctaaattctaattgccaactgtttctatttatatttgatttatatttcatttggagtctgttacatggcagcttaggcagactagatctgtgttttttccaatgcagcataatgagtatgatctatttcttttcaaataatctttgagatcccaggaaaaaaatgctctgttccattgagctataattgtaaatgtgttttgtttaaaaaaacaggtgaggcaagtgagtgatttatgtgttcctgaggaagtatatctgatttttttctcatactccaaaagctagtcctactctttaataaaaataatgggtaactttaggtttttcactagcgaacttccatgaacatttcctttctatgtagtgtgattcaatgcaataccatattatagttattcaatacacaggtggttagattctacaaagtggaaatgatccaacctcatatgttgagtgcgtccaaaaagattgtaatggactggggggggccagggtctaaatgggatatataagattcattcaaggatttatttaaaggctttgaaaaattaaaatataaaacagttgtttaaggaaggtttatagaag

SEQ ID NO: 68051 - DNA, 1861 bp, Homo Sapiens
  misc_feature (1764)..(1768): n is a, c, g, or t
  misc_feature (1774)..(1774): n is a, c, g, or t
  misc_feature (1794)..(1794): n is a, c, g, or t
tacaccatagagcaggtacgaggccgggtggtgaattcggcacgagggcggccaggcagccgggaggagcggcgcgcgctcggacctctcccgccctgctcgttcgctctccagcttgggatggccggctacctgcgggtcgtgcgctcgctctgcagagcctcaggctcgcggccggcctgggcgccggcggccctgacagcccccacctcgcaagagcagccgcggcgccactatgccgacaaaaggatcaaggtggcgaagcccgtggtggagatggatggtgatgagatgacccgtattatctggcagttcatcaaggagaagctcatcctgccccacgtggacatccagctaaagtattttgacctcgggctcccaaaccgtgaccagactgatgaccaggtcaccattgactctgcactggccacccagaagtacagtgtggctgtcaagtgtgccaccatcacccctgatgaggcccgtgtggaagagttcaagctgaagaagatgtggaaaagtcccaatggaactatccggaacatcctgggggggactgtcttccgggagcccatcatctgcaaaaacatcccacgcctagtccctggctggaccaagcccatcaccattggcaggcacgcccatggcgaccagtacaaggccacagactttgtggcagaccgggccggcactttcaaaatggtcttcaccccaaaagatggcagtggtgtcaaggagtgggaagtgtacaacttccccgcaggcggcgtgggcatgggcatgtacaacaccgacgagtccatctcaggttttgcgcacagctgcttccagtatgccatccagaagaaatggccgctgtacatgagcaccaagaacaccatactgaaagcctacgatgggcgtttcaaggacatcttccaggagatctttgacaagcactataagaccgacttcgacaagaataagatctggtatgagcaccggctcattgatgacatggtggctcaggtcctcaagtcttcgggtggctttgtgtgggcctgcaagaactatgacggagatgtgcagtcagacatcctggcccagggctttggctcccttggcctgatgacgtccgtcctggtctgccctgatgggaagacgattgaggctgaggccgctcatgggaccgtcacccgccactatcgggagcaccagaagggccggcccaccagcaccaaccccatcgccagcatctttgcctggacacgtggcctggagcaccgggggaagctggatgggaaccaagacctcatcaggtttgcccagatgctggagaaggtgtgcgtggagacggtggagagtggagccatgaccaaggacctggcgggctgcattcacggcctcagcaatgtgaagctgaacgagcacttcctgaacaccacggacttcctcgacaccatcaagagcaacctggacagagccctgggcaggcagtagggggaggcgccacccatggctgcagtggaggggccagggctgagccggcgggtcctcctgagcgcggcagagggtgagcctcacagcccctctctggaggcctttctaggggatgtttttttataagccagatgtttttaaaagcatatgtgtgtttcccctcatggtgacgtgaggcaggagcagtgcgttttacctcagccagtcagtatgttttgcatactgtaatttatattgcccttggaacacatggtgccatatttagctactaaaaaggctcttccnnnnncccaanaaaacccctaatacacaaanccctggtggggcgcctcgggcccctcgaaaaagcctttcctaaaccttttcttttgggcgggggggg

SEQ ID NO: 68052 - DNA, 1312 bp, Homo Sapiens
  misc_feature (950)..(1204): n is a, c, g, or t
  misc_feature (1213)..(1245): n is a, c, g, or t
ggctaaggtagcgaggctgggtgttgaatcggcacgaggcaaaacatccacgcctagtccctggctggaccaagcccatcaccatgggcaggcagtagggggaggcgccacccatggctgcagtggaggggccaggctgagccggcgggtcctcctgagcgcggcagagggtgagcctcacagcccctctctggaggcctttctaggggatgtttttttataagccagatgtttttaaaagcatatgtgtgtttcccctcatggtgacgtgaggcaggagcagtgcgttttacctcagccagtcagtatgttttgcatactgtaatttatattgcccttggaacacatggtgccatatttagctactaaaaagctcttcacaaaattgtctgctgtgtttgtccctgaggggaggaggtagtgggaccctgaggcagaggccctgctagagctggcaggttcccctggggcagaccagagcacctcaggaaggggctgccacggcagggaagggaccaggcagccctgggagcccgcattccacaggggcccactgcggagttctcggacactcagggcacaggcctgtgggttccctggaattttctagcatgatccagtttctgtgtccagttctccattctgagagtcaatcagttcctgataggttgtcattgatttttttcttcgttggttttaaccttctaaacatctccaggccactttcttagcctttttctaggtactaaaaagaggtcctacccacacctgcctcacacttctcctttccaaggctgcctgagtttggaggggcttgggtgtgtgtgaacaagggccctgcattgtctaggcctgcagttcccaggcttgggttcactttcaccatgcattggcaaaactagaaaagtaagcttgtgacaaattgttctcggccgggcacagtggcgcannnnnnnnnnnnnnnnnnnnnnnnnnnnnnnnnnnnnnnnnnnnnnnnnnnnnnnnnnnnnnnnnnnnnnnnnnnnnnnnnnnnnnnnnnnnnnnnnnnnnnnnnnnnnnnnnnnnnnnnnnnnnnnnnnnnnnnnnnnnnnnnnnnnnnnnnnnnnnnnnnnnnnnnnnnnnnnnnnnnnnnnnnnnnnnnnnnnnnnnnnnnnnnnnnnnnnnnnnnnnnnnnnnnnnnnnnnnnnnnnnnnnnnnnnnnnnntctgtctcnnnnnnnnnnnnnnnnnnnnnnnnnnnnnnnnnttgctctatgcaagttttttagccccatgtaaaaaggaaaaataaaaggtgctctaaagctacatat

SEQ ID NO: 68053 - DNA, 1176 bp, Homo Sapiens
  misc_feature (700)..(758): n is a, c, g, or t
tttttcatcattacaaaccctttaaccaaggatttattttttgtttccagcattacaatttgcaataattcatagatttccattccagtaagttttaagacacagatctcacacaggcagttgggtccacatgttaagaactcattaattcagcaaagagatcacccagccgccattctcatatgaacaatgctcactgctacctgaacattttaaagtatgttatgagttgttttgatgatgacagctgcagcttttcaccacattttcaattactgaattgcatgttttttttccaccttgataacttagggtcagtagaaagctatttacttacatgttatagtcaatataactatactaaatgcccatttgtaattgaagaaactcacagacacagtatgaactatattatacaaaatcatgaccatgagtttcagtgagagattctgtctctctcttaaagcaagaaatatcccacagctcagatttacataagtagtgccgccttttaaataaaagtcaaatgctgtcctgcctgtaaaattataaatatttctaacccactttacagaattttaaaatgcttataaatgcattatcttccagtaaataaacattatggtactgaacctcatttaaaaaaaagtcatcacactggcccatggaaatatctaggactatatctcctaacattagnnnnnnnnnnnnnnnnnnnnnnnnnnnnnnnnnnnnnnnnnnnnnnnnnnnnnnnnnnngcaactactatgacctaaaagagtgtactgagatgtcttcattcaattcagtaactaaacatttctggaatgaacatttgtagataactaggtaaggagagtgattctcttagcactcaggtcaaaatcacaaggtatggagaaataatttccacattctataaggaaagacagactttgaaacggagtgactgtttaaaaaccacataccaagatttagccagaatattgaagattggcagatcttgatggagtgaaatcttcagaggcaacaaattaaaaatcatgatcctatggatgccacttatttttaccaatgtgaaaaaaggaaagatgattgcaaagtacagtatacactgaacaggtgaaatatgggacattatgaacaatttaaataaccaaaatgttccctatggcc

SEQ ID NO: 68054 - DNA, 685 bp, Homo Sapiens
  misc_feature (18)..(18): n is a, c, g, or t
  misc_feature (71)..(71): n is a, c, g, or t
cagcaatcagaaagtctntggtctaccacacatctccctccctactatctcttcattgtttggctgaagtntgcctcttgtgagaaaacaatacaactccccttctccacacactttttttccagcccagattaataggtatcccctaccctaatcccaactctatgatctaataccttttttaggaggaaccacttctttttaatattgaaatctgctggttactttatgttttctcaagttcagttgactagagctgaccacagggtgtcatcaattcagattcctaaataaccctttctctccacacccagtcctccagctggtgagccctgggccagattgtttgatcttcaggtattttaaattttaggtacatcaattaatgtaaattaatccaaatgctaatttttgtggtgcaagaagtttcttatgtaaattcagggtatggataagctaattaagatatccatcgttggtggctctaagtgtattatttgtttttaaataaagtgtacaaatatagataacatgctataggtgtctcatgaattggaatatttgtcagatttgggatctagctgtggctttacagtaatcagttaaattaacatagtctgatttggggcttttgggggaggagttgtagaggggtgcagagaaataaaaggatattagacaaagt

SEQ ID NO: 68055 - DNA, 788 bp, Homo Sapiens
  misc_feature (583)..(602): n is a, c, g, or t
ccagtccacagcagcagtcagccatttaccacgcggggcttgcgccaactccaccctccatgacacctgcctccaacacgcagtcgccacagaatagttttccaagcagcacaacagactgtctttacgatccatccttctcacgttcagccggcgtataccaacccaccccacatggcccacgtacctcagtacaagcccaccaccaacagcagttgtaaggctgccctggaggaaccgaaaggccaaattccctcctcccttctactgcttctaccaactggaagcacagaaaactagaatttcatttattttgtttttaaaatatatatgttgatttcttgtaacatccaataggaatgctaacagttcacttgcagtggaagatacttggaccgagtagaggcatttaggaacttgggggctattccataattccatatgctgtttcagagtcccgcaggtaccccagctctgcttgccgaaactggaagttatttattttttaataacccttgaaagtcatgaacacatcagctagcaaaagaagtaacaagagtgattcttgctgctattactgctnnnnnnnnnnnnnnnnnnnntcaagacttggaacgcccttttactaaacttgacaaagtttcagtaaattcttaccgtcaaactgacggattattatttataaatcaagtttgatgaggtgatcactgtctacagtggttcaacttttaagttaagggaaaaacttttactttgtagataatataacataaacacttaaaaaaaat

SEQ ID NO: 68056 - DNA, 1375 bp, Homo Sapiens
ctgtaaatgctgactgctgctgtgactggccagatggagagcctggcggcctggtgctgatggtgctgaacaggactgggtgcaggatgacttccaccatgttggctttgctgctgtccagtgggggtagctgaaggccgagggtgtggagtatgtgggtgcagggtagcgttagggtgcgcatactgctgagcaagggagcccgtggaaatggcaaagtagaaagaagggcttgtctcccttgttgtatggtaatttgggacatgcatacatcgcatgcgtctgctcatgagccccgtactgagttgctgaagaagatactaaaccaggctgggcgtgtgttggtggtgccatcattctagcattaccctgtattacaggactatagacatgaggatgctgagactgataatgtggcacatgctgaacaaggggctgatttgggaactgctgaggactgtaggcaacatattgcgtggagtaagctggtggggtggctgcaatcggtgggcccgctgctgacgctgggtgcatcatggcactctgatgatgctggtcttgccgctgttggggcatatttggtactttacctgctctatatgtcttggcttgattcactggcatgggcgtcataggtattgggtataaaggttgcacgcctgggctcactgggactggatacatcatatttggtgcaaaacaaacaggctgagtataaactggagttggctgttgatgacccaccatagatgggctaggttgtgcttgaggccgaggtgaagttggggtagtagaaggctttggctgagagaaggaacgtgggttgaactcctttgcattgggattcaatgttgatttcctaacttgctcagctgcgtctttcttctcttccttatcgtctttctcttgtttacatgctgggctggaagtctgaaccccttgggaagtgacctcaggtcccctcttgtgctccgtgttactaagtattgaaggggaaatgctggggctattcggcttgctgctgccactggtacagttgctgctgctattttcaatgaaagaatccttagcacttggttcaattttgtctttgatcaaatctcttgatttttctccctctctatttttgtttagtagttgatccatagattcagaagtagaacttggctgtaacctaaaatcattcttaaatttctttaaatcatcaatctgttttctatgttcagaaacaactggtgatatacctttgttttcagcttttgagaagctaggtgatgtttcattgggtttaatattttctttattccctgcaggagagttctgcctctgatcttgaagcctggaatctttagcctcactagaaggggtaacagct

SEQ ID NO: 68057 - DNA, 369 bp, Homo Sapiens
aactccaccctccatgacacctgcctccaacacgcagtcgccacagaatagtttcccagcagcacaacagacggtctttacgaatccatccttctcacggtcagccggcggataacaacccacccccaacatggcccacgtaccttcaggctcatgtacagtcaggaatggttccttctcatccaactgcccatgcgccaatgatgctaatgacgacacagccacccggcggtccccaggccgccctcgctcaaagtgcactacagcccattccagtctcgacaacagcgcatttcccctatatgacgcacccttcagtacaagcccaccaccaacagcagttgtaaggctgccctggaggaaccgaaa

SEQ ID NO: 68058 - DNA, 925 bp, Homo Sapiens
tgcggccgccaactccagtttatactcagcctgtttgttttgcaccaaatatgatgtatccagtcccagtgagcccaggcgtgcaacctttatacccaatacctatgacgcccatgccagtgaatcaagccaagacatatagagcaggtaaagttaaatacctagaattggaattgctgaggtatgtttccacgggctcccttgctcagcagtatgcgcaccctaacgctaccctgcacccacatactccacaccctcagccttcagctacccccactggacagcagcaaagccaacatggtggaagtcatcctgcacccagtcctgttcagcaccatcagcaccaggccgcccaggctctccatctggccagtccacagcagcagtcagccatttaccacgcggggatagcgccaactccaccctccatgacacctgcctccaacacgcagtcgccacagaatagtttcccagcagcacaacagactgtctttacgatccatccttctcacgttcagccggcgtataccaacccaccccacatggcccacgtacctcaggctcatgtacagtcaggaatggttccttctcatccaactgcccatgcgccaatgatgctaatgacgacacagccacccggcggtccccaggccgccctcgctcaaagtgcactacagcccattccagtctcgacaacagcgcatttcccctatatgacgcacccttcaggtgaggcgtgtgtgtgcaggggccgccggggcaccccaaagcattctgctcgcacaggtggaatggcaggcagggccagtgcttcaagccccgcatttgagaactagcaagacccgtccaggagtgtgcacaggagggactgtgacgatcagttcagcatcagggcctgaggcttccgggagccgagtctgtgtgt

SEQ ID NO: 68059 - DNA, 1222 bp, Homo Sapiens
  misc_feature (97)..(114): n is a, c, g, or t
cagtaccggctcctgtacagagacgcgtctctcacatctgagctgcatattgagcggcaagttggttgtaagttcagtaaaagccgctgatgatgcnnnnnnnnnnnnnnnnnngtattaagtttcacaagctgtttgtactcaaatatattttctcagtttcagatcctctgctattttattgagtggaaagtcttgagctaaaagggttcaagaagaataatgttgcatttccttatgtctcaggaaacactttttatggtaacttgtcagattgtctatgaacaaacccacttttttagacattgataaagtcttcttcacgtgatattttatacaagaacacttcagatgtattagatgtgactgattttaacaaatcctattagatttgtatcaactagttacatgttctattcatagtcttttgtgaatcattgcctttttgtttaaaaagatggcctattttgagcctttgtataggtacattcctgtttttgtgacaaaagaaaaactttaaaattgtcccaaacagaaaaataatggctatcagaagtatgttttgttttagtgtgagttaccgttactgtatttgtttattgtaaaggtggacatttagcgttcagtgcagttttcaataaaaagtaattaaaatttgttaagttctgaaattcaagtacatctcactaatgtaaatgttctctacttgagatgtttaaggcagttgcattgtcaattagccaatttccagctcttgttactacagggttccataaccagactcaagaccgctgacaattaattacctgtgataacaaaaagtttaattgaaaaatcaaaacctcacacaagtccatcattatcacgtcatgccgtccttaagatgcaatggtgggttagtgctaaatcaattcaaaaaaaaccaaagttgctcaacttttagagttctgactttaatctaccccaaagcaaaatgacctggacctggttcaagggagggaagtgaaccttgaaactgttttgccaataacctaacaaacaaaatgatatttacaaagaagtgttgcaaatagtcccatgagttaagagcttgatttaatggatcttctttttaaatagaattaaacctttatactaaaagtatttgcaagtgtcaattaagtccaacaattccaggtatgaaactccctctgagctcttccttatacttcccttcccaatt

SEQ ID NO: 68060 - DNA, 1676 bp, Homo Sapiens
  misc_feature (84)..(118): n is a, c, g, or t
aagaatgtatcgatcatatagggcgctagctcggttacagccgaacgacgagcgcagcgaagtcagtgagcgaggaagcggcgnnnnnnnnnnnnnnnnnnnnnnnnnnnnnnnnnnncagtcgacggtaccggacatatgcccgggaattcggccattacggccgggggtaaccgtgatagtagcagctccggcggcagcaacagcgactacgagggatggcggcggctgcagcaggaactgcaacatcccagaggtttttccagagcttctcggatgccctaatcgacgaggacccccaggcggcgttagaggagctgactaaggctttggaacagaaaccagatgatgcacagtattattgtcaaagagcttattgtcacattcttcttgggaattactgtgttgctgttgctgatgcaaagaagtctctagaactcaatccaaataattccactgctatgctgagaaaaggaatatgtgaataccatgaaaaaaactatgctgctgccctagaaacttttacagaaggacaaaaattagatagtgcagatgctaatttcagtgtctggattaaaaggtgtcaagaagctcagaatggctcagaatctgaggtgtggactcatcagtcaaaaatcaagtatgactggtatcaaacagaatctcaagtagtcattacacttatgatcaagaatgttcagaagaatgatgtaaatgtggaattttcagaaaaagagttgtctgctttggttaaacttccttctggagaggattacaatttgaaactggaacttcttcatcctataataccagaacagagcacgtttaaagtactttcaacaaagattgaaattaaactgaaaaagccagaggctgtgagatgggaaaagctagaggggcaaggagatgtgcctacgccaaaacaattcgtagcagatgtaaagaacctatatccatcatcatctccttatacaagaaattgggataaattggttggtgagatcaaagaagaagaaaagaatgaaaagttggagggagatgcagctttaaacagattatttcagcagatctattcagatggttctgatgaagtgaaacgtgccatgaacaaatcctttatggagtcgggtggtacagttttgagtaccaactggtctgatgtaggtaaaaggaaagttgaaatcaatcctcctgatgatatggaatggaaaaagtactaaataaattaatttgctctcatcgtattgtgtatattcacctaatgcccattgtgtattgatattgcattcttgaattttgaacactgaatatctttttgaaagattatacttctttacctctttgtgctttagaaattattttccttcaagtgttcaagtctaatgaagaatgaagataacattttatcacttctgtccttaaagatttcagacatggtgaaactgaataaagcatgtcatttgctcctagatagattcattctatctagttgtggggatggagaaatctttaatggtatattttcggttattgccttatttttgatacagtattctgtcagtaatttattagacctggcagctttgggtgagcttagatttttcaccttcagtgttacattgtgtttgcttttaaaaactgcttttgaatggagttgtaaatacaatttttctatg

SEQ ID NO: 68061 - DNA, 751 bp, Homo Sapiens
  misc_feature (531)..(540): n is a, c, g, or t
aattttgaaagcccagccaaaatgaggtgtgaatttgtcatactgttacattgaaattggtaacaaaatatatcccctcccatttggacttttagggtaaatgaaaattttattgtattttaaagtagtttctaagtgttagcaagactgactataattccagtttctgttttctatggacagacctgataaactggagaccctaaagcaggaatacccaaattatagtgtcaggattttagctgtaccagaggcctttatgtgctacacataatttgtataaaattttatatgtgcagattgggtacataaacagttctccatttttctaagggaatgcaataaatgtagcatcgtgaataaatataacttttataatccgtaaagtggtcttttctttccatttctttaattgttttctcaatttttattcactttttcctttaggacacatttcccttaattggatatctttcccttaaatttctattagtagttgttttcatctgcccacatgtaattgaagatttnnnnnnnnnnttctgatacctgcagtattactaatactgcttaatttcttgaaatgtggaattgctgctgttaatgtcaagcaaaacgcagtatttatggcaaattgtaaagtaatttgaatttagtgctacctcaaaattaactttttaaatactatgttagattcttaacagttaaaggtctaatacatgcatgaggaatggttacttatgaaaggaaa

SEQ ID NO: 68062 - DNA, 829 bp, Homo Sapiens
atgagcccgaactagggatgtgacagagcgcgagacccagcctaaagagagcccggagccagcgtgggaggccgctgccgtcgcgcgccttggtcgtgctgcggttgtcccattggggacttggcggcgactgtccctgtgctggtttgcagtgtgtgggttcattcacctggtgatcgagggctggttcgttctctactacgaagacctgcttggagaccaagccttcttatctcaactctggaaagagtatgccaagggagacagccgatacatcctgggtgacaacttcacagtgtgcatggaaaccatcacagcttgcctgtggggaccactcagcctgtgggtggtgatcgcctttctccgccagcatcccctccgcttcattctacagcttgtggtctctgtgggccagatctatggggatgtgctctacttccctgacagagcaccgcgacggattccagcacggagagctgggccaccctctctacttctgggtttactttgtcttcatgaatgccctgtggctggtgctgcctggagtccttgtgcttgatgctgtgaagcacctcactcatgcccagagcacgctggatgccagggccacaaaagccccagagccagaaaaacttgaggaatgtgggacccaggctcgaaccccgggcccgaggaggaactcttctggcctggccaaaaaaagtctaggccctggctcccacagtttgggaagggacaaagctaattggatctggtccccctccaggcctcaggggcaggccaacagaaaggggaattaaaggggcctggggtgaaaggcccttgcctg

SEQ ID NO: 68063 - DNA, 1088 bp, Homo Sapiens
  misc_feature (75)..(92): n is a, c, g, or t
gagacccagcctaaagagagcccggagccagcgtgggaggccgctgccgtcgcgcgccttggtttttctgttccnnnnnnnnnnnnnnnnnnaacttcctgcctatacacacgcagccatcagcccacaaagacatgactaccaacgcgggccccttgcacccatactggcctcagcacctaagactggacaactttgtacctaatgaccgccccacctggcatatactggctggcctcttctctgtcacaggggtcttagtcgtgaccacatggctgttgtcaggtcgtgctgcggttgtcccattggggacttggcggcgactgtccctgtgctggtttgcagtgtgtgggttcattcacctggtgatcgagggctggttcgttctctactacgaagacctgcttggagaccaagccttcttatctcaactctggaaagagtatgccaagggagacagccgatacatcctgggtgacaacttcacagtgtgcatggaaaccatcacagcttgcctgtggggaccactcagcctgtgggtggtgatcgcctttctccgccagcatcccctccgcttcattctacagcttgtggtctctgtgggccagatctatggggatgtgctctacttcctgacagagcaccgcgacggattccagcacggagagctgggccaccctctctacttctggttttactttgtcttcatgaatgccctgtggctggtgctgcctggagtccttgtgcttgatgctgtgaagcacctcactcatgcccagagcacgctggatgccaaggccacaaaagccaagagcaagaagaactgaggagtggtggaccaggctcgaacactggccgaggaggagctctctgcctgccagaagagtctagtcctgctcccacagtttggagggacaaagctaattgatctgtcacactcaggctcatgggcaggcacaagaaggggaataaaggggctgtgtgaaggcactgctgggagccattagaacacagatacaagagaagccaggaggtctatgatggtgacgatttttaaaatcaggaaataaaagatcttgactctaaaa

SEQ ID NO: 68064 - DNA, 969 bp, Homo Sapiens
  misc_feature (126)..(144): n is a, c, g, or t
gcaagagaacccactaggggatgagcccgaactagggatgtgacagagcgcgagacccagcctaaagagagcccggagccagcgtgggaggccgctgccgtcgcgcgccttggtttttctgttccnnnnnnnnnnnnnnnnnnnaacttcctgcctatacacacgcagccatcagcccacaaagacatgactaccaacgcgggccccttgcacccatactggcctcagcacctaagactggacaactttgtacctaatgaccgccccacctggcatatactggctggcctcttctctgtcacaggggtcttagtcgtgaccacatggctgttgtcaggtcgtgctgcggttgtcccattggggacttggcggcgactgtccctgtgctggtttgcagtgtgtgggttcattcacctggtgatcgagggctggttcgttctctactacgaagacctgcttggagaccaagccttcttatctcaactctggaaagagtatgccaagggagacagccgatacatcctgggtgacaacttcacagtgtgcatggaaaccatcacagcttgcctgtggggaccactcagcctgtgggtggtgatcgcctttctccgccagcatcccctccgcttcattctacagcttgtggtctctgtgggccagatctatggggatgtgctctacttcctgacagagcaccgcgacggattccagcacggagagctgggccaccctctctacttctggttttactttgtcttcatgaatgccctgtggctggtgctgcctggagtccttgtgccttgatgctgtgaagcacctcactcatgcccagagcaccgctggatgccaaggccacaaaagccaagagcaaagaaaaacctgaagggaggggtggaaccaggctcgaacactggggccgaggaggagctcttctgccctgccagaagagtctagtcctggctccccaaa

SEQ ID NO: 68065 - DNA, 1015 bp, Homo Sapiens
  misc_feature (13)..(13): n is a, c, g, or t
aagttccgcatgngaacaaccatgttctgcgggtgcttcttgcagaagtagatccatgaggcaaccgctgggacacactgttcctgctggcgcgggcaagacacggtgctcacgcctgacttcctgaaccgctgccgcatgcatgccatctccggctggcaggccttctttcccatgcatttccagagccttccacccagctgtggccccaccacaagggcctgggcccccagagctgggccgtgacactggccgctttgatcgccaggcagccagcgaggcctgcttctacaactccgactacgtggcagcccgtgggcgcctggcggcagcctcagaacaagaagaggagctgctggagagcctggatgtgtacgagctgttcctccacttctccagtctgcatgtgctgcgggcggtggagccggcgctgctgcagcgctaccgggcccagacgtgcagcgcgaggctcagtgaggacctgtaccaccgctgcctccagagcgtgcttgagggcctcggctcccgaacccagctggccatgctactctttgaacaggagcagggcaacagcacctgaccccaccctgtccccgtgggccgtggcatggccacaccccaccccacttctcccccaaaaccagagccacctgccagcctcgctgggcagggctggccgtagccagaccccaagctggcccactggtcccctctctggctctgtgggtccctgggctctggacaagcactgggggacgtgcccccagagccacccacttctcatcccaaacccagtttccctgccccctgacgctgctgattcgggctgtggcctccacgtatttatgcagtacagtctgcctgacgccagccctgcctctgggccctgggggctgggctgtagaagagttgttggggaaggagggagctgaggagggggcatctcccaacttctcccttttggaccctgccgaagctccctgcctttaataaactggccaagtgtggacttgtg

SEQ ID NO: 68066 - DNA, 2815 bp, Homo Sapiens
  misc_feature (2300)..(2300): n is a, c, g, or t
aagtatgaagtcacggcgcgccgaattcggcacgaggcggacagctgcggccgcggctgaggctccagtgccgagcgcaagaaccctgcgcagcccagagcagctgctggaggggaatcgaggcgcggctccggggattcggctcgggccgctggctctgctctgcggggagggagcgggcccgcccgcggggcccgagccctccggatccgccccctccccggtcccgccccctcggagactcctctggctgctctgggggttcgccggggccggggacccgcggtccgggcgccatgcgggcatcgctgctgctgtcggtgctgcggcccgcagggcccgtggccgtgggcatctccctgggcttcaccctgagcctgctcagcgtcacctgggtggaggagccgtgcggcccaggcccgccccaacctggagactctgagctgccgccgcgcggcaacaccaacgcggcgcgccggcccaactcggtgcagcccggagcggagcgcgagaagcccggggccggcgaaggcgccggggagaattgggagccgcgcgtcttgccctaccaccctgcacagcccggccaggccgccaaaaaggccgtcaggacccgctacatcagcacggagctgggcatcaggcagaggctgctggtggcggtgctgacctctcagaccacgctgcccacgctgggcgtggccgtgaaccgcacgctggggcaccggctggagcgtgtggtgttcctgacgggcgcacggggccgccgggccccacctggcatggcagtggtgacgctgggcgaggagcgacccattggacacctgcacctggcgctgcgccacctgctggagcagcacggcgacgactttgactggttcttcctggtgcctgacaccacctacaccgaggcgcacggcctggcacgcctaactggccacctcagcctggcctccgccgcccacctgtacctgggccggccccaggacttcatcggcggagagcccacccccggccgctactgccacggaggctttggggtgctgctgtcgcgcatgctgctgcaacaactgcgcccccacctggaaggctgccgcaacgacatcgtcagtgcgcgccctgacgagtggctgggtcgctgcattctcgatgccaccggggtgggctgcactggtgaccacgagggggtgcactatagccatctggagctgagccctggggagccagtgcaggagggggaccctcatttccgaagtgccctgacagcccaccctgtgcgtgaccctgtgcacatgtaccagctgcacaaagctttcgcccgagctgaactggaacgcacgtaccaggagatccaggagttacagtgggagatccagaataccagccatctggccgttgatggggaccgggcagctgcttggcccgtgggtattccagcaccatcccgcccggcctcccgctttgaggtgctgcgctgggactacttcacggagcagcatgctttctcctgcgccgatggctcaccccgctgcccactgcgtggggctgaccgggctgatgtggccgatgttctggggacagctctagaggagctgaaccgccgctaccacccggccttgcggctccagaagcagcagctggtgaatggctaccgacgctttgatccggcccggggtatggaatacacgctggacttgcagctggaggcactgaccccccagggaggccgccggcccctcactcgccgagtgcagctgctccggccgctgagccgcgtggagatcttgcctgtgccctatgtcactgaggcctcacgtctcactgtgctgctgcctctagctgcggctgagcgtgacctggcccctggcttcttggaggcctttgccactgcagcactggagcctggtgatgctgcggcagccctgaccctgctgctactgtatgagccgcgccaggcccagcgcgtggcccatgcagatgtcttcgcacctgtcaaggcccatgtggcagagctggagcggcgtttccccggtgcccgggtgccatggctcagtgtgcagacagccgcaccctcaccactacgcctcatggatctactctccaagaagcacccgctggacacactgttcctgctggccgggccagacacggtgctcacgcctgacttcctgaaccgctgccgcatgcatgccatctccggctggcaggccttctttcccatgcatttccaagccttccacccagctgtggccccaccacaagggcctgggcccccagagctgggccgtgacactggccgnctttgatcgccaggcagccagcgaggcctgcttctacaactccgactacgtggcagcccgtgggcgcctggcggcagcctcagaacaagaagaggagctgctggagagcctggatgtgtacgagctgttcctccacttctccagtctgcatgtgctgcgggcggtggagccggcgctgctgcagcgctaccgggcccagacgtgcagcgcgaggctcagtgaggacctgtaccaccgctgcctccagagcgtgcttgagggcctcggctcccgaacccagctggccatgctactctttgaacaggagcagggcaacagcacctgaccccccctggtccccgtggggccggtggcatggccacaccccaccccaattctccccccaaaccagaagccacctgccaagcttcgctgggggcaggggctgggccctaacccagaacccccaagcctgggcccaactggttcccccttctccgggcttctgggggggtccctgggggctctgggacaaa

SEQ ID NO: 68067 - DNA, 1051 bp, Homo Sapiens
  misc_feature (58)..(58): n is a, c, g, or t
  misc_feature (68)..(68): n is a, c, g, or t
  misc_feature (145)..(145): n is a, c, g, or t
  misc_feature (171)..(227): n is a, c, g, or t
  misc_feature (302)..(302): n is a, c, g, or t
  misc_feature (328)..(351): n is a, c, g, or t
  misc_feature (410)..(410): n is a, c, g, or t
ggagacgccatacgcaccgcttccccggcgtgccgatcatatgcagctgcacgacagnttccgactgnaagcggcatgagcgcacgcattatgtgagtagctcctcatagccaccccagcttacacttatgctccggctcgtatntgtgtggattgtgagcgataccatgnnnnnnnnnnnnnnnnnnnnnnnnnnnnnnnnnnnnnnnnnnnnnnnnnnnnnnnnnggccctcgaggccaggaattcggcacgagggaagtgtcaaaacagaaggcgaaatggaagaaggatgagaagtcngagcgagaaaatatcctgctacagcnnnnnnnnnnnnnnnnnnnnnnnnttcgaaatggagtcaggagaagaagataagaaaataaatgaatcctgcagtgctgtctntgagaacttcattcaagagaaggaggagctcttgaaacaacatcaaagtgacaccttgcaattagaagagctgagaaaaaccaaagaggtcatgcaggaagaattgcatgcacaagcccttatcctagagtcactgaacacaaacctctactatacccagttggaactccagaaagagaaagctatagtgggaaatctggagaaaatgcttcaaaccaagtttgctgaaactgaagaaaagtataagcacaccatacagatcctgacagaagagaacattcatctgaagcaaaagataatttctaagaatgaagaaatttgtgaaggatgttctgggagattggcctctattactgtttctaaggatgattctgacactgtgcaagatggtagcaagaaaggacaagaatcataaacaaaaagttgctctgcattgttgaagatggttggcacaccatttctgtaggcccaggaaactcctgggagggttttcttgagaaaatgcatataatgagtttagttcttgggttgctctgactcgctgaatgtctgaaaatgtttgaattctcatctgaatttcacagcttatcacggactcttcactgaaaaatgatgctctccatactgggagctgagctttc

SEQ ID NO: 68068 - DNA, 1036 bp, Homo Sapiens
taggctagggtacgaggcctggggtggtgaattcggcacgagggccatggcgcggaagaaggtgcgtccgcggctgatcgcggagctggcccgccgcgtgcgcgccctgcgggagcaactgaacaggccgcgcgactcccagctctacgcggtggactacgagaccttgacgcggccgttctctggacgccggctgccggtccgggcctgggccgacgtgcgccgcgagagccgcctcttgcagctgctcggccgcctcccgctcttcggcctgggccgcctggtcacgcgcaagtcctggctgtggcagcacgacgagccgtgctactggcgcctcacgcgggtgcggcccgactacacggcgcagaacttggaccacgggaaggcctggggcatcctgaccttcaaagggaagactgagagcgaggcgcgggagatcgaacacgtcatgtaccatgactggcggctggtgcccaagcacgaggaggaggccttcaccgcgttcacgccggcgccggaagacagcctggcctccgtgccgtacccgcctctcctccgggccatgattatcgcagaacgacagaaaaatggagacacaagcaccgaggagcccatgctgaatgtgcagaggatacgcatggaaccctgggattaccctgcaaaacaggaagacaaaggaagggccaagggcacccccgtctagaatgccagaaccagcgggtggccttaggggctgtgaggcagtggggaccttattgatgaaagaaaccgtctttgcgttacacccgagtctgcctctcggagcagggagctcaccttccgcgacgtgttctgagggtctgcatcttaggggggagggctggggcaaatcgccacctgtgcctttcctctggccctgctgcccccacacccaactccgagggcccacgctggggaaagcgggaagcgctcgctccctttcccccattagtgctctctctgcctggatcccggcagaagctatgaaagggaataaagagaaaagaagtacccaggg

SEQ ID NO: 68069 - DNA, 847 bp, Homo Sapiens
caaactggtgagaacatacaatttaaagttgaaaactcatcatttggggctattttggaataggcctgaaatatggtgacatgtcaggcactcagttttttggagctgtcttaaaggtgaggtggaaagtgagagatgattttgctctaattacccacacattctccctaaccctccattttaagacacttagctataatagcttaagactatcaaaactgcttttgtgattctcagtaggatctagttcaaagccatctcagtgctagtgattggtaattgttaatttgatggtaattaccctacttgtaaagttgacattcatactggctaatcctccctgcccctagtcgtggacaatgaaacagtgagtggctggtgaattagatcagattcaaactaagccattccttgatgctattcttcactgctgttccttagggtatctaaatgtgttatttataaacatttttgggggctcctgcctgcaaacttcggtaggtgttggtcttccccacctctacaactgagccaaggacttgttctgaaaggtgagtaataaataagggaacaaggtttctattttctgtgtttgtaattaccagattttcacctctgtttatatattattctgatgtaaaagaacctcatagttatataaaattagaccttttgtaaataaatataatttattagaaaaaatggtatcttttactaaattggatttgtgtcagttttttcctttaagcaccactcaggcagcaagctctatgctgtgagagttgctggaggcccacgttatgttttctcagtgtaattcctctttttcttgataaaaagacttaaa

SEQ ID NO: 68070 - DNA, 961 bp, Homo Sapiens
caaactgttgggattacaggcgtgagccccatgcccagctgagactaccttctggatctgatgaagtattagaaaggagcgggtggcttctcctttgtctctggtttggcaatcggagctttcagggcacagtgtttgtctccagatgttgatggaagtgggcactccttggtggccgccaacaggaaaagcgtgttctttcattgtttcctatacacacagacaaccgtttttccaggaaggcagccccatctttagtcattgactgcgggcctatcatcagtcatgacgaagaccgagtgaggtgtgtgcaggcccagaactagcacatcacagccccagagtgggctccaaaccggtagaccagagagcctgcaggataatttcccccttaagatgggtagatttactgttccacagccaacaggtggatacgcgtaactagaacaatctgtcatgggactaagtggaagaatccatcagcactacacagcatcttttcttcaaatacaactgtaaaatctccactgaagagacagtcataccttgggggtgctcagggaatctaggtatttgcactccaagctggcaagcctgggggcactgaagggaaacaataattggaaatgtcagaaggaaatgtatatggagaaattaatagagaaatgattattttaacatgacacgtaagtgtaaataggacagccaattgaagcagtcctgcagtaggggcaggcattgtcaacggagaggtgagactgaagaccccgagcagcatctgcatatgcggcagcaggacttcagggcatgattccttaagaacaggacatagaagaggggaagcatagtgtcaggaattaagtcagaaaacaccttcagctgtgagtggaagaaagaaaaaattccaggaaagacaacaggatggaatggggcggtgagggctatgagacaagttagacac

SEQ ID NO: 68071 - DNA, 907 bp, Homo Sapiens
  misc_feature (661)..(714): n is a, c, g, or t
  misc_feature (716)..(735): n is a, c, g, or t
  misc_feature (737)..(757): n is a, c, g, or t
  misc_feature (764)..(779): n is a, c, g, or t
ggtgaggtggaatccatagagctccccatggacaacaagaccaataagaggcgtgggttctgctttattacctttaaggaagaagaaccagtgaagaagataatggaaaagaaataccacaatgttggtcttagtaaatgtgaaataaaagtagccatgtcgaaggaacaatatcagcaacagcaacagtggggatctagaggaggatttgcaggaagagctcgtggaagaggtggtgaccagcagagtggttatgggaaggtatccaggcgaggtggtcatcaaaatagctacaaaccatactaaattattccatttgcaacttatccccaacaggtggtgaagcagtattttccaatttgaagattcatttgaaggtggctcctgccacctgctaatagcagttcaaactaaattttttgtatcaagtccctgaatggaagtatgacgttgggtccctctgaagtttaattctgagttctcattaaaagaaatttgctttcattgttttatttcttaattgctatgcttcagaatcaatttgtgttttatgccctttcccccagtattgtagagcaagtcttgtgttaaaagcccagtgtgacagtgtcatgatgtagtagtgtcttactggttttttaataaatccttttgtataaannnnnnnnnnnnnnnnnnnnnnnnnnnnnnnnnnnnnnnnnnnnnnnnnnnnnnannnnnnnnnnnnnnnnnnnntnnnnnnnnnnnnnnnnnnnnnttggggnnnnnnnnnnnnnnnnaaaaaattttcttaaaaccttcttgtgggggcggcggcgcccccaaaaggaaaaggaaacgggggctaaagggggtccccgaaggaaaacccgggccagaaaataagggggtggggactccccccaaa

SEQ ID NO: 68072 - DNA, 684 bp, Homo Sapiens
  misc_feature (557)..(567): n is a, c, g, or t
gagttaatcagagtaaatgcatttctggagttgtttctgtgatgtaaattatgatcattatttaagaagtcaaatcctgatcttgaagtgctttttatacagctctctaataattacaaatatccgaaagtcatttcgtggaacacaagtggagtatgccaaattttatatgaatttttcagattatctaagcttccaggttttataattagaagataatgagagaattaatggggtttatatttacattatctctcaactatgtagcccatattactcaccctatgagtgaatctggaattgcttttcatgtgaaatcattgtggtctatgagtttacaatactgcaaactgtgttattttatctaatccattgcttaatgagtgtgtttttccatgaatgaatataccgtggttcatatgttagcatggcagcattttcagatagctttttgtttgttgggaagttggggttttggggggagggggagtattagtacgttgcatgaaatagcttactttataatgatggaattgctttttcttttgtcttgtgannnnnnnnnnngaagtgaaatttaactttttgtgcaagtagtactattatacccatcttcagtgtcttacttgtactgtatcacattccataccctcatttaattcttaataaaactgttcacttgtt

SEQ ID NO: 68073 - DNA, 603 bp, Homo Sapiens
agaaagaaaagtgacccccatcgactcaccccctgtgggagcccagagggctacatggcactgcagagcaagggctacccgctcccgcacccgaagtcgagtgacaccttggctatggacatgcgtgtcagatccccagacgaggccttgcctggaggtcttagtggctgcagcagtgggagtggccactccccctatgccctggagcgggcagcccatgccagtgctgaccttcccgaagcctccagtaaaaaggcagagaaggaggccaagttggctgctccgagggcaggtgaacagggagaggccatgaaacagtttgacctgaactatggaagtgccatcattgaaaattgcgggtccacccccggggaggagagtgaggtgggttctatggtgggcgaaggcttcatcgaagtcctgaccaagaagcagcgccccctgctggaggaagagagaagaaggcttagaagaaaaccccacaaaccccattactaaacccacactcaacagaaacaaagcatacatcattattttcgcacggactacaaccacgaccaatgatatgaaaaaccatcgttgtatttcaactacaagaacccc

SEQ ID NO: 68074 - DNA, 135 bp, Homo Sapiens
ggcacgagggttgtggatgatggacccggagcacataaatagtatggctttgaagaaggcgtgggtacagatgtgcaggaatgctaggtgtggttggttgatcatccacaaccttaacaatgaacaagatattcg

SEQ ID NO: 68075 - DNA, 1146 bp, Homo Sapiens
  misc_feature (1001)..(1001): n is a, c, g, or t
ggcacgagggctcatggactctactgttcagctttaatttataaaacatatcacacatttaatgttatacagtatttacatatagtggaacatagggataactcagttttatgtaaatttttgttaagtgttgtagcctgcccagagtgacttctattttttcttctttgtctccaggtggtgaagcagtattttccaatttgaagattcatttgaaggtggctcctgccacctgctaatagcagttcaaactaaattttttgtatcaagtccctgaatggaagtatgacgttgggtccctctgaagtttaattctgagttctcattaaaagaaatttgctttcattgttttatttcttaattgctatgcttcagaatcaatttgtgttttatgccctttcccccagtattgtagagcaagtcttgtgttaaaagcccagtgtgacagtgtcatgatgtagtagtgtcttactggttttttaataaatccttttgtataaaaatgtattggctcttttatcatcagaataggaaaaattgtcatggattcgagttattaaaagcataagtttggaagacaggcttgccgaaattgatgacatgattatgattgcagagaagtttgatatgtttttagcaaaatctaatttttgccataatgtgtcctccctgtccaaattgtgaatgacttaatgtcaatctggattgttgcgtgtgttaataatacttccttatgtaggcattaagatttatatgaatattttcccaaatgcccagtttttgcttattatgaattgcgctttttagaacaactctggataaatgggcaaaagtacccctttgcacagataattaaggggttatgccttccataaaataaaagggacttaaaaaccggtaatttataaaagaaacgccggctagttccaaaaagaatttttaaaggctggggggggacttacacaaaaggaactcaaaggggtgacgggccggtattctcngaaaggaaacatgaaaatctgccgcggagactcgggcgggccggcccccgcgccctccaaaaagctttctccaaaactgttccatttggggggcccgcgggaccccctatagagataagtggaaaacagggggttaaaagcgcgc

SEQ ID NO: 68076 - DNA, 670 bp, Homo Sapiens
atttagggggaatgatggttgtctttggatatactacagcgatggctattgaggagtatcctgaggcatgggggtcaggggttgaagtcttgtgttaaaagcccagtgtgacagtgtcatgatgtagtagtgtcttactggtttttttaataaatccttttgtataaaaatgtattggctcttttatcatcagaataggaaaaattgtcatggattcaagttattaaaagcataagtttggaagacaggcttgccgaaattgaggacatgattaaaattgcagtgaagtttgaaatgtttttagcaaaatctaatttttgccataatgtgtcctccctgtccaaattgggaatgacttaatgtcaatttgtttgttggttgttttaataatacttccttatgtagccattaagatttatatgaatattttcccaaatgcccagtttttgcttaatatgtattgtgctttttagaacaaatctggataaatgtgcaaaagtacccctttgcacagatagttaatgttttatgcttccattaaataaaaaggacttaaaatctgttaattataatagaaatgcggctagttcagagagatttttagagctgtggtggacttcatagatgaattcaagtgtcgagggaggattaaagaaatatataccgtgaa

SEQ ID NO: 68077 - DNA, 1033 bp, Homo Sapiens
  misc_feature (136)..(136): n is a, c, g, or t
  misc_feature (140)..(140): n is a, c, g, or t
  misc_feature (185)..(185): n is a, c, g, or t
  misc_feature (211)..(211): n is a, c, g, or t
atattgatgtcatctgcacccagctacattatctccgctgttgtgttgaattgacgatacatcacacagaacacttgacagatacgacttatcgactcatataggattgccctcgagccagaatcgcacgagttcncagnccggtgagaccactctggtctgtggtggagagtgggacccgtctntgctgagtctgccaccattcccagancagcggagtgaacttcgtcgcgctgcaacccccggctcgggtaacggttctctccagccttagccagagcccagaagacctgcctttaccagcagttccagagagagagggaggaaaagggtaggggggttcagactcctggtgtgcccagtagtgtgggggaacacattctcctcaccctgtagcgttggggtatccggtgtctatggtccagccctgaggctgtggttcctatttggttttcctagccgatatggtgctttgtgcagctaggtggatgattgttctcgagtatataccgtgtactcctctcggtgaagagagaaatgaagcagtgtttgagggcctagactatcgctagagaattggggcataagcttgcatatgttactacttacccaagccaagaaaatggtgagatacaatgcacatttattgtgaagccttggtgtgtcatctttaagtaaaaagggagaatttgtgagaacaaggagcgaaaggtagcttttttctttgagtacctgctatgtattccagtggttcttaactttttggagataacttatttcttgaaagtttgtggaaagccaggaacaattctttaaaaaatgggcacacatacagtttgtaatacacttaatgagattggtggactctgaagcccatccgtggaccctctgggtgtctgtaaactttaaatgaaaaccccattactaaacccacactcaacagaaacaaagcatacatcattattctcgcacggactacaaccacgaccaatgatatgaaaaaccatcgttgtatttcaactacaagaacacc

SEQ ID NO: 68078 - DNA, 2284 bp, Homo Sapiens
ctgccgatccttaccgccctcgttaaccctaacaaaaaaaactcatacccccattatgtaaaatccattgtcgcatccacctttattatcagtctcttccccacaacaatattcatgtgcctagaccaagaagttattatctcgaactgacactgagccacaacccaaacaacccagctctccctaagcttcaaactagactacttctccataatattcatccctgtggcattgttcgttacatggtcaatcatagaattctcactgtgatatataaactcagacccaaacattaatcagttcttcaaatatctactcatcttcctaattaccatactaatcttagttaccgctaacaacctattccaactgttcatcggctgagagggcgtaggaattatatccttcttgctcatcagttgatgatacgcccgagcagatgccaacacagcagccattcaagcaatcctatacaaccgtatcggcgatatcggtttcatcctcgccttagcatgatttatcctacactccaactcatgagacccacaacaaatagcccttctaaacgctaatccaagcctcaccccactactaggcctcctcctagcagcagcaggcaaatcagcccaattaggtctccacccctgactcccctcagccatagaaggccccaccccagtctcagccctactccactcaagcactatagttgtagcaggaatcttcttactcatccgcttccaccccctagcagaaaatagcccactaatccaaactctaacactatgcttaggcgctatcaccactctgttcgcagcagtctgcgcccttacacaaaatgacatcaaaaaaatcgtagccttctccacttcaagtcaactaggactcataatagttacaatcggcatcaaccaaccacacctagcattcctgcacatctgtacccacgccttcttcaaagccatactatttatgtgctccgggtccatcatccacaaccttaacaatgaacaagatattcgaaaaataggaggactactcaaaaccatacctctcacttcaacctccctcaccattggcagcctagcattagcaggaatacctttcctcacaggtttctactccaaagaccacatcatcgaaaccgcaaacatatcatacacaaacgcctgagccctatctattactctcatcgctacctccctgacaagcgcctatagcactcgaataattcttctcaccctaacaggtcaacctcgcttccccacccttactaacattaacgaaaataaccccaccctactaaaccccattaaacgcctgacagccggaagcctattcgcaggatttctcattactaacaacatttcccccgcatcccccttccaaacaacaatccccctctacctaaaactcacagccctcgctgtcactttcctaggacttctaacagccctagacctcaactacctaaccaacaaacttaaaataaaatccccactatgcacattttatttctccaacatactcggattctaccctagcatcatacaccgcacaatcccctatctaggccttcttacgagccaaaacctgcccctactcctcctagacctaacctgactagaaaagctattacctaaaacaatttcacagcaccaaatctccacctccatcatcacctcaacccaaaaaggcataattaaactttacttcctctctttcttcttcccactcatcctaaccctactcctaatcacataacctattcccccgagcaatctcaattacaatatatacaccaacaaacaatgttcaaccagtaactactactaatcaacgcccataatcatacaaagcccccgcaccaataggatcctcccgaatcaaccctgacccctctccttcataaattattcagcttcctacactattaaagtttaccacaaccaccaccccatcatactctttcacccacagcaccaatcctacctccatcgctaaccccactaaaacactcaccaagacctcaacccctgacccccatgcctcaggatactcctcaatagccatcgctgtagtatatccaaagacaaccatcattccccctaaataaattaaaaaaactattaaacccatataacctcccccaaaattcagaataataacacacccgaccacaccgctaacaatcaatactaaacccccataaataggagaaggcttagaagaaaaccccacaaaccccattactaaacccacactcaacagaaacaaagcataa

SEQ ID NO: 68079 - DNA, 528 bp, Homo Sapiens
  misc_feature (431)..(444): n is a, c, g, or t
ggtgttcttatagttgaaatacaccgatggtttttcatatcattggtcgtggttgtagcccgtgcgagaataatgatgtatgctttgtttctgtttagtgtgctgtttagtaatgttaggttttgttttggaggaaactaggcatacaagacatgttaataagactatgtgaataatgaatttaaaaagatcttgagtatatactcataactccagaaataacattaacttgaagctttatttcttgacaaaagctttatgaatgttatgagtttaaaatatgtcaatttaatactatgatttaaaaaacaatagcagatttcgtatgactgtggggacatggaaaaatcaagatcctattgattgctagctctggctcacttattctccggtaatgatactattggatatataccaaaattatataagcnnnnnnnnnnnnnntaagttttcctggcccaggtcttccattcttctggtccccttactatagtaattctagttactctcatcttattctgaggaaaa

SEQ ID NO: 68080 - DNA, 2172 bp, Homo Sapiens
  misc_feature (351)..(393): n is a, c, g, or t
  misc_feature (1744)..(1744): n is a, c, g, or t
  misc_feature (1806)..(1816): n is a, c, g, or t
  misc_feature (2027)..(2039): n is a, c, g, or t
  misc_feature (2122)..(2130): n is a, c, g, or t
  misc_feature (2134)..(2134): n is a, c, g, or t
aaggctaggtacgaggcctgggtcgaattcggcacgaggccattaagcgaggaggaggcgagagcggccgccgctggtgcttattcttttttagtgcagcgggagagagcgggagtgtgcgccgcgcgagagtgggaggcgaagggggcaggccagggagaggcgcaggagcctttgcagccacgcgcgcgccttccctgtcttgtgtgcttcgcgaggtagagcgggcgcgcggcagcggcggggattactttgctgctagtttcggttcgcggcagcggcgggtgtagtctcggcggcagcggcggagacactagcactatgtcggaggagcagttcggcggggacggnnnnnnnnnnnnnnnnnnnnnnnnnnnnnnnnnnnnnnnnnnngagcaggagggagccatggtggcggcgacacagggggcagcggcggcggcgggaagcggagccgggaccgggggcggaaccgcgtctggaggcaccgaagggggcagcgccgagtcggagggggcgaagattgacgccagtaagaacgaggaggatgaaggccattcaaactcctccccacgacactctgaagcagcgacggcacagcgggaagaatggaaaatgtttataggaggccttagctgggacactacaaagaaagatctgaaggactacttttccaaatttggtgaagttgtagactgcactctgaagttagatcctatcacagggcgatcaaggggttttggctttgtgctatttaaagaatcggagagtgtagataaggtcatggatcaaaaagaacataaattgaatgggaaggtgattgatcctaaaagggccaaagccatgaaaacaaaagagccggttaaaaaaaattttgttggtggcctttctccagatacacctgaagagaaaataagggagtactttggtggttttggtgaggtggaatccatagagctccccatggacaacaagaccaataagaggcgtgggttctgctttattacctttaaggaagaagaaccagtgaagaagataatggaaaagaaataccacaatgttggtcttagtaaatgtgaaataaaagtagccatgtcgaaggaacaatatcagcaacagcaacagtggggatctagaggaggatttgcaggaagagctcgtggaagaggtggtggccccagtcaaaactggaaccagggatatagtaactattggaatcaaggctatggcaactatggatataacagccaaggttacggtggttatggaggatatgactacactggttacaacaactactatggatatggtgattatagcaaccagcagagtggttatgggaaggtatccaggcgaggtggtcatcaaaatagctacaaaccatactaaattattccatttgcaacttatccccaacaggtggtgaagcagtattttccaatttgaagattcatttgaaggtggctcctgccacctgctaatagcagttcaaactaaattttttgtatcaagtccctgaatggaagtatgacgttgggtccctctgaagtttaattctgagttctcattaaaagaaatttgctttcattgttttatttcttaattgctatgcttcagaatcaatttgtgttttatgccctttcccccagtattgtagagcaagtcttgtgttaaaagcccagtgtgacagtgtcatgatgtagtagtgtcttactggttttttaataaatccttttgtataccncaccccccccaacattataacccctcttccacatcgcaaaaggcgagaactcgctcttccannnnnnnnnnntccatcttacacccctcgtaaggcaaccttctgtctgggccctctcccccaccacaaaacctttttttggccctttctcctctccgcccccgcccccacccttgtgtaaagcgatttcggggcggaggcccgggcccccacaagaaaacacccggctccgcgacctaacgctttgtggctttcccacccacctgtgaacaccgcccccgtnnnnnnnnnnnnnaaaccgtccctaaaaaaccaaaacccccccgaggggaggtctccgcgacgcgcttttttctcgcggagctctcttctcccccnnnnnnnnntctnctctagggagcgcaatcccccccaggggtccccaaccc

SEQ ID NO: 68081 - DNA, 784 bp, Homo Sapiens
  misc_feature (724)..(732): n is a, c, g, or t
gggaagaagataatggaaaagaaataccacaatgttggtcttagtaaatgtgaaataaaagtagccatgtcgaaggaacaatatcagcaacagcaacagtggggatctagaggaggatttgcaggaagagctcgtggaagaggtggtggccccagtcaaaactggaaccagggatatagtaactattggaatcaaggctatggcaactatggatataacagccaaggttacggtggttatggaggatatgactacactggttacaacaactactatggatatggtgattatagcaaccagcagagtggttatgggaaggtatccaggcgaggtggtcatcaaaatagctacaaaccatactaaattattccatttgcaacttatccccaacaggtggtgaagcagtattttccaatttgaagattcatttgaaggtggctcctgccacctgctaatagcagttcaaactaaattttttgtatcaagtccctgaatggaagtatgacgttgggtccctctgaagtttaattctgagttctcattaaaaaaatttgctttcattgttttatttcttaattgctatgcttcaaaatcaatttgtgttttatgccccttttcccccgtattgtaaaaccaagtcttggtgttaaaaaccccggggtggccgtgtcatgaaagaaattagtgggcttaatgggttttttttaaaaaatccgtttttggnnnnnnnnngttaccccgccccattcttcgccaaaattggtgggtcgcgccttgggcccct

SEQ ID NO: 68082 - DNA, 989 bp, Homo Sapiens
  misc_feature (229)..(229): n is a, c, g, or t
  misc_feature (323)..(388): n is a, c, g, or t
cggtatgtcgtacggacgagacgccatagcacgcttcgcgcgatgcgatatatacactcctgcagttctgatgtatggcatgggccaaccagtatgtgatgagtcgtcatagcacacacgattacatgtttgctccgctctagtctctctgaatgtgagcgatactatgtcacacagatacagtatgacagcgtacgacataatacgcctcaatctggggagattgccntcgagctcagagttcggcacgtggcgtagtagcacttctgcagcatagaacagttacgtgtatgaatatgtacctttcagtattagacagtcannnnnnnnnnnnnnnnnnnnnnnnnnnnnnnnnnnnnnnnnnnnnnnnnnnnnnnnnnnnnnnnnngtaaaggggggaaggtgttatgcggctgctccctccgtcccagaggtggcagtgattccataatgtggagactagtaactagatcctaaggcaaagaggtgtttctccttctggatgattcatcccaaagccttcccacccaggtgttctctgaaagcttagccttaagagaacacgcagagagtttccctagatatactcctgcctccaggtgctgggacacacctttgcaaaatgctgtgggaagcaggagctggggagctgtgttaagtcaaagtagaaaccctccagtgtttggtgttgtgtagagaataggacatagggtaaagaggccaagctgcctgtagttagtagagaagaatggatgtggttcttcttgtgtatttatttgtatcataaacacttggaacaacaaagaccataagcatcatttagcagttgtagccattttctagttaactcatgtaaacaagtaagagtaacataacagtattaccctttcactgttctcacaggacatgtacctaattatggtacttatttatgtagtcactgtatttctggatttttaaattaataaaaaagttaattttgaaaaatc

SEQ ID NO: 68083 - DNA, 930 bp, Homo Sapiens
  misc_feature (764)..(834): n is a, c, g, or t
ggaccggtccggaattcccgggatatcgtcgaccacgcgtccggtttgttttaatttttgctagattgatattaaaaactcatgtggaggaactcaaggaatgtttagaagaccaaaagtccccaatgacaggaacaaaagcaaccaatttttaactttctcttctcattcctgttttcattgatttcccacatgtagtccttttgctcaggaagtctttggggaaattaaggatctttgaagctctgaaataggtgatcaggttagtggtgtctgtcagctgtctaagaggttggaaaatgaactactcaagatagtcacgaaaatactgaaagtttgatttttctttccatatttgaattaattttttctgtttgactggaaggggtttttgtataactaaaacctcagcgcataaaggagatttaaaaggagcacatgatttagtgggtgggccatgaaactagagatgggatttgggggtgaatttgtcaatatctggattttaatccagacatctctgctaacaagccttgggtaagtcacttcagatacttttcctcctttttacaaagagagggctggcttagttatttgccaaagccccttccaggcctgaattccacaagtacgatttactgtagtgtgcttatcactctttcatgtcacaatagcgtggagcattagagaaaagcctagacttttagttgatagccagttgaaatatcattgatagaattttagttttaggaaaaattggtttnnnnnnnnnnnnnnnnnnnnnnnnnnnnnnnnnnnnnnnnnnnnnnnnnnnnnnnnnnnnnnnnnnnnnnntcaaaatgagaacattaggcctaaatgatttccgaggtttccagctagtcctagagttccatatttctacataagtggaattattttatcatgctg

SEQ ID NO: 68084 - DNA, 1536 bp, Homo Sapiens
  misc_feature (14)..(14): n is a, c, g, or t
  misc_feature (83)..(84): n is a, c, g, or t
  misc_feature (108)..(108): n is a, c, g, or t
  misc_feature (147)..(147): n is a, c, g, or t
  misc_feature (226)..(227): n is a, c, g, or t
  misc_feature (996)..(1052): n is a, c, g, or t
  misc_feature (1095)..(1110): n is a, c, g, or t
  misc_feature (1221)..(1231): n is a, c, g, or t
atcgagtgcattcngattcgagccttttgtgttaatttgtagatgtataaaatcattgagactcaggatttagagacaaatcnncatgcaggacaaagcaccaatttnaattcttctcatctgtttcatgattcccacattatcctntgctcagaagtcttggggaaataagaatcttgaagctctgaaatagtgatcagttagtgtgtcttcagctgtctagagnnttgaaaatgactactcaagatagtcacgaaaatactgaaagttgattttctttccatatttgaataattttttctgtttgactggaaggggtttttgtataactaaaacctcagcgcataaaggagatttaaaaggagcacatgatttagtgggtgggccatgaaactagagatgggatttgggggtgaatttgtcaatatctggattttaatccagacatctctgctaacaagcctttggtaagtcacttcagatacttttcctcctttttacaaagagagggctggcttagttatttgccaaagccccttccaggcctgaattccacaagtacgatttactgtagtgtcttatcactctttcatgtcacaatagcgtggagcattagagaaaagcctagacttttagttgatagccagttgaaatatcattgatagaattttagttttaggaaaaattggtttgatttctagctttattactattaggtatgtgagcttgggcaaatcgcttaatctttgagtctagttttctctcaaaatgagaacattaggctaaatgatttccgagtttccagctagtcctagagttctatatttctacatagttgaattattttatcatgctgttgctggggaatatgactaacccttttgaagctactaattttatgtcgagctttaaagtccataattgttatcttcagaaaatattatttgacctacagtatgtccaaatcaatttaataaaatcgctttataacagggnnnnnnnnnnnnnnnnnnnnnnnnnnnnnnnnnnnnnnnnnnnnnnnnnnnnnnnnncgaaccgacacgaccccataaggttaagaaaaaacttttgcgnnnnnnnnnnnnnnnnaaaaattttttaaaacctttctttgggcgcggggccccaaaaggaaaagagaaggggacaaaccttttcccaagaaaacccgggcaaaaaatagggttggaattcccaccnnnnnnnnnnncccccggcggggaaaccaaggggttttagaaaaaatccaaaaggggttcctggggggctattatggggattctttaaacggggaacccaacgagacccttatatttaaatttaaccccccgccccgtgaaattttatggaaaaaatgggtgggaaatcacataaaccttttccgcccccacagggaaacccccttccccaaaccggtcttgggataaccctaatttcctcgccggggtttccaccacccttggcccctctgggggataaaatatattccccccacggggggaaaacgcggggggg

SEQ ID NO: 68085 - DNA, 436 bp, Homo Sapiens
aattgcataagttattttaaaaataggtgtttaaagtaacaaatggacttctcaaaactcaccaagtttttggagactctttgctttgccaataacatctttggcagttcttttgactccaaaggaagaatgtatgttcatgtaattagcaataacttcccatctgataggatatattatacaataatatgaatagtagtaaggaaaaacaaaatgaaacgacaaaaaccattagatttttactgcagaaaggttatagtatgtacagaatgagctcagattggtggtctaattatgctgctactataaattcctgttgcctggactacggtttttgcttttcatgtgtttaaatcaacgataatcttggttttaagtccatacatcttacaaatttggtgtacaaatcaacataaataaaaccacttatttgtgt

SEQ ID NO: 68086 - DNA, 750 bp, Homo Sapiens
  misc_feature (46)..(46): n is a, c, g, or t
gaatgaaacactcacatcatgcacaaaagaagtaggaaagctgctntggaaaaacagatagaagaaataaatgagcaaatcagaaaagagaaagaggaagctgaggctcgtatgcgacaagcatctaagaacacagagaaatcaactggtggaggtggaaatggaagtaaaaattggtcagaagatgatctacaattactaattaaagctgtgaatctgttccctgctggaacaaattcaagatgggaagttattgctaattacatgaacatacattcttcctctggagtcaaaagaactgccaaagatgttattggcaaagcaaagagtctccaaaaacttgaccctcatcaaaaagatgacataaataaaaaggcatttgataagttcaaaaaagaacatggagtggtacctcaagcagacaacgcaacgccttcagaacgatttgaaggtccatatacagacttcaccccttggacaacagaagaacagaagcttttggaacaagctttgaaaacatacccagtaaatacacctgaaagatgggaaaaaatagcagaagcggtgcctggcaggacaaagaaggactgcatgaaacgatacaaggaacttgtcgagatggtaaaagcaaagaaagctgctcaagaacaagtgctgaatgcaagtagagccaagaaatgacaatctttgttgtgtgtgcatttttataataaaactgaaaatactgtaaacattttcattcttaaaatt

SEQ ID NO: 68087 - DNA, 1053 bp, Homo Sapiens
  misc_feature (98)..(98): n is a, c, g, or t
  misc_feature (219)..(219): n is a, c, g, or t
  misc_feature (320)..(320): n is a, c, g, or t
ggagaaaccaaccttgttcaaggagtaagtttttggggtggatatggattttgagagccctatgtccatcattggagtcagccctgtgtccccagcgntataatcagtaagcccggagaagatgatatgctgtgtcctgcagccggaccaaatgtgagcagtagacagctacaggatgcagcatcaaaatgagctctgatggggtgtatacgtgccttnacagataaggaaagcagtgtccagggatgaatgtaaaagcaacatcagcttgaccagtataaaataacagtggattgctcatctcagtcctcaaagctttntgaaaaccaacaccatcacagcttgttttggactttgttacactgttattttcagcatgaaaatgtgtgtttttttagggtttctgattcttcaaagaggcacagagccaaattggtagaggaaggatgcaaagtataaatttgtgtaatattactttaacatgcccatattttacttggaaatattaaaagaaagggttctgtaaaatggaaaacttagtttgtgaattgattttgaggagtggtttttcttttcttggacgcttaattctgttctgatattaatttatcagattgcttttgtgcattggataacaccaccattcacaagttaagattcttggtatttggatatctgttagatgctactaagaaaatagagatgagctttctttttaaagcttttgatgtggtgtcatagaatagcatgttgtagatacaatcagctgctttgttaccttaaaactaggcatttgtaaatattaaaccataagatggcaggtgatgtcctgtaaacactcagctgttcagattggacataactgacttagttcttcccttctctctctctcaaaattataggagacttgtagtttagtgtggttttctgtttctaatttgctgctgataatgtatatgaacttaacatgctgtgtaagctgtgtcctagttcttgaacagtttatgcagtgctgctttgccaaataaagttaaaagtaaaagaggcaaaaaa

SEQ ID NO: 68088 - DNA, 1017 bp, Homo Sapiens
ggagcgaggcctgggtggcgaattcggcacgaggcggcgacggcagtaacagcggcagctacagcggggacgcgagcggggcggtgacggtgtgggaggtggtctcactcttgggaaaactgctgggcaccgtcgtcgcgctgaaggtggttctgtacctgctccgagtgtgcttagcgatggcctggaaatccggcggcgccagccactcggagctaatccacaatctccgcaaaaatggaatcatcaagacagataaagtatttgaagtgatgctggctacagaccgctcccactatgcaaaatgtaacccatacatggattctccacaatcaataggtttccaagcaacaatcagtgctccacacatgcatgcatatgcgctagaacttctatttgatcagttgcatgaaggagctaaagctcttgatgtaggatctggaagtggaatccttactgcatgttttgcacgtatggttggatgtactggaaaagtcataggaattgatcacattaaagagctagtagatgactcaataaataatgtcaggaaggacgatccaacacttctgtcttcagggagagtacagcttgttgtgggggatggaagaatgggatatgctgaagaagccccttatgatgccattcatgtgggagctgcagcccctgttgtaccccaggcgctaatagatcagttaaagcccggaggaagattgatattgcctgttggtcctgcaggcggaaaccaaatgttggagcagtatgacaagctacaagatggcagcatcaaaatgaagcctctgatgggggtgatatacgtgcctttaacagataaagaaaagcagtggtccaggtggaagtgattttatcttctgctctttcttcttccacacatgcaaggtgaaagggtgtggattttaagacattagactacaagagctgtttttggttgtcacctttatgctcctccattataacgtcagaaattcattacattaaaaatgtgaaaaatgtaaa

SEQ ID NO: 68089 - DNA, 902 bp, Homo Sapiens
taggatctggaagtggaatccttactgcatgttttgcacgtatggttggatgtactgggaaaagtcataggaattgatcacattaaagagctagtagatgactcaataaataatgtcaggaaggacgatccaacacttctgtcttcagcgagagtacagcttgttgtgcgggatggaagaatgggatatgctgaagaagccccttatgatgccattcaatgtgggagctgcagcccctgttgtaccacaggcgctaatagatcagttaaagcccctgaggaagattgatattgcctgttggtcctgcaggcggaaaccaaatgttggagcagtatgacaagctacaagatggcagcatcaaaatgaagcctctgatgggggtgatatacgtgcctttaacagataaagaaaagcagtggtccaggtggaagtgattttatcttctgctctttcttcttccacacatgcaagggatgaattgtaaaagcaacatcagcttgaccagtataaaattacagtggattgctcatctcagtcctcaaagctttttgaaaaccaacaccatcacagcttgttttggactttgttacactgttattttcagcatgaaaatgtgtgtttttttagggtttctgattcttcaaagaggcacagagccaaattggtagaggaaggatgcaaagtataaatttgtgtaatattactttaacatgcccatattttacttggaaatattaaaagaaagggttctgtaaaatggaaaacttagtttgtgaattgattttgaggagtggtttttctttttcttggacgctttaattcttgttcttgatattaattttattcaaatttgctttttggtgcattgggataacacccacccatttcccaaggtttaagaa

SEQ ID NO: 68090 - DNA, 844 bp, Homo Sapiens
tttttgagacggagtctcgctctgccaccatgcccggcctcacaaagtattttctaaaatataatttgctatagagttcacagatgagcacttttcacattaggtgatatgcaaacaaatcactattggctcagcaggaaacagactttttgtacactctagttaacatgaagttttccaataaaacaaatgacagcgggagggggtagtgaggaattcaactctgtaatgtccacctagaatccaagtaggaaaaaaataaagctattgaaataatttagtaatatcctataggtcaccagtgatttccataaaatgctgcacagatacaaagtcttgagtatgttacttagtagctaaaaagagagccttgtgtgaggcacagctgacttggaacattaaagagcctggcttccctttctgctttccattctcccaacagaaaaaaaggtcttcaaagaattggccagtcttacagctcaccttggggtgtagatgactctccactgtggtgctaggcaattttattgaacaggtggccactggtggtgatggctgaaccactcattaaacaaattgctctaaatggcctcagtatcaaggtgtgctttctgtacccttaatctgactttaatcctgcagaacctcagtcttaccatgtttaacagcattgccatgtacgatatgcctttatcctacactgtatatatactctttatgcagaagtatatctaactgaaaagtataaaaatataatggtggaaaacaaatgaattaaaaaatgtatcacggccgatagcccaggtaactgcaggtgaaatgtagccagaagtcagaatcttgg

SEQ ID NO: 68091 - DNA, 1344 bp, Homo Sapiens
aaccaacgtagttgtattagtagttctataaagagaactgcttttaacattagggactgggagcagtccatgggataaaaaggaaagtgttttctcacgagaaaacatgtcaggaaaaataaagaacactttctacctctgtttcagatttttgaaacacttattttaaaccaaattttaatttctgtgtccaaaataagttttaaggacatctgttcttccatacgaaataggttaggctgcctatttctcactgagctcatggaatggttctgcttatgatactctgcacactgccttttagtgagtgaggagtttggggttgcctagcaacttgctaacttgtaaaaagtcatctttccctcacagaaagaaacgaaagaaagcaaagcaaagtcagtgaaagacaatctttatagtttcaggagtaaatctaaatgtggcttttgtcaagcacttagatggatataaatgcagcaacttgttttaaaaaaatgcacaatttacttcccaaaaaagttgttacttgccttttcaagttgttgacaaacacacatttgatattctcttatatgttatagtaatgtaacgtataaactcaagcctttttattctttgtgattaaatcctgttttaaaatgtcacaaaacaggaaccagcattctaattagatttactatatcaagatatggttcaaataggactactagagttcattgaacactaaaactatgaaacaattactttttatattaaaaagaccatggatttaacttatgaaaatccaaatgcaggatagtaatttttgtttacttttttaaccaaactgaatttttgaaagactattgcaggtgtttaaaaagaaagaaaagttgttttatctaatactgtaagtagttgtcatattctggaaaatttaatagttttagagttaagatatctcctctctttggttagggaagaagaaagcccttcaccattgtggaatgatgccctggctttaaggtttagctccacatcatgcttctcttgagaattctatttggtagttacaattacagaaactgattagtttgtcagtttgcagatagatttagcacagtactcatcactcggatagattgagatgttctttcacatcagatgatctgtaacactgtaagatactgatctttacaactgtttaatcagttttatttttgtacagtattagtgacctaagttattttgctgtcccgtttttgtaaatcaaatgaaattataaaagaggattctgacagtaggtattttgtacatatgtatatatgttgtccaaataaaaataataaatgataaagactgaaa

SEQ ID NO: 68092 - DNA, 1239 bp, Homo Sapiens
ctgcttctggccatggtgcagcttcgcgcgtattacatgacgacagtattatacgattgacgtagatataatccgaaatggaaacgcagagcgccagggcagaggagggctttacccaggtcacccgcaagggtggccgacgggcgaagaaacgacaggctgaacagctgtccgcagcaggagagggcggggatgcgggccgcatggacacagaggaggccaggccggcgaagaggcccgtcttcccacccctctgtggggacgggctcctgagtgggaaagaagaaacaaggaaaattccagtcccagctaacagatacacaccattgaaagaaaactggatgaagatatttactcctattgtggaacatttgggacttcagatacgctttaacttgaaatcaaggaatgtagaaatcaggacttgtaaggaaaccaaggatgttagtgctctgacaaaagcagctgattttgtgaaagcttttattctcggctttcaggtggaggatgcacttgccctcatcaggttggatgacctcttcctagagtcttttgaaattacagatgttaaacccctaaagggagaccatctatccagggcaataggaagaatcgctggcaaaggaggaaaaaccaaattcaccatagagaatgtgacacggacaaggatagttttggctgatgtgaaagttcacatccttggctccttccaaaatatcaagatggcaagaactgccatttgcaacctaatcttgggaaatcctccttccaaggtttatggcaatattcgagctgtggctagcagatcagcagatcgattctgatttcaagtcagagactttttatcttgcctttggactctggtgaaaaatactttacagtggtcggtcacaagaaaccatctgaacaatttcagtcatttgaagcctccgtcccttcttccattctcagccagaagcataaacagaaaagaaagatttaagaggattcacactcaacaggttttaggataatttaaatatcaaaaattgattgttatacttacacattaggtataatttatcatttatctgaaatcacatgtagcagattgcatagtctgtaatcctctcagagggaaacttcttgtttaaacagctctatatggatttatacttttatatttataaatttataacttcatacaaatttataaacatttctttataaattgtaatttaatagattatctcagaaaaa

SEQ ID NO: 68093 - DNA, 639 bp, Homo Sapiens
  misc_feature (23)..(23): n is a, c, g, or t
  misc_feature (89)..(103): n is a, c, g, or t
  misc_feature (120)..(227): n is a, c, g, or t
gcacgaggctgatgttggagcgnccgcggctgaggcaggagggttgcttgagactagcctaggtaacatagtgagaccctgtctcattnnnnnnnnnnnnnnnggcatggtggcacgcannnnnnnnnnnnnnnnnnnnnnnnnnnnnnnnnnnnnnnnnnnnnnnnnnnnnnnnnnnnnnnnnnnnnnnnnnnnnnnnnnnnnnnnnnnnnnnnnnnnnnnnnnnngcgggtgggggggagttgggctgtgttggaatgggcctgcagcccaacaaacaagggaactaggaccgacagtgacttcaccagcttgctaggtcagaatgagagactggtgggtctgtctacctgtttcttctacaagatccctatttgactgtaaaagtagctaatactcacatgttctccaatcccaggtagccatggtagagttgggtagagttgagcagctgccccaggatccaaatgtggtgtctgaaatggaaagaactaaggcaaccaggaaggcactgatctgccttataagcacagtcatctgaaagtcaggcctgctgcaggacaggatcccccagagaccccatttgcctctcaacactcagaccttcaactgttttttaataaatctactttttaaaaa

SEQ ID NO: 68094 - DNA, 856 bp, Homo Sapiens
cagtcgcaggaggagctgctgctgcggagccggggcgagctggacctccagctccaggagtaccagcacagcctggagcggctgagggagggccagcgcctggtggagagggagcaggcgaggatgcgggcccagcagagcctgctgggccactggaagcacggccggcagaggagcctgcccgcggtgctccttccgggtggccccgaggtaatggaacttaatcgatctgagagtttatgtcatgaaaactcattcttcatcaatgaagctttagtacaaatgtcatttaacactttcaacaaactgaatccatcagttatccatcaggatgccacttaccctacaactcaatctcattctgacttggtgaggactagtgaacatcaagtagacctcaaggtggacccttctcagccttcgaatgtcagtcacaaactgtggacagccgctggttccggccatcagatacttcctttccatgaaagcagcaaggattcttgtaaaaatgatttggacacctcccacactgagtccccaaccccccatgactcaaattcacaccgccctcaactgcaggcgtttataacagaagcaaagctaaatctaccgacaaggacaatgaccagacaagatggggaaactggagatggagccaaagaaaatattgtttacctctaattgtgttgtcatttttccaaacaaaacaaaacactggcacttttgggagaaactttttgtctccattccttatgtatgtgtgattgtctgtgtccaaattgctttaagaataatatttaatatttcctggaagctcatttttttggcatgagtctaattaaattattgaaagccc

SEQ ID NO: 68095 - DNA, 673 bp, Homo Sapiens
  misc_feature (73)..(73): n is a, c, g, or t
agtctaatgcaatcaaggagtaaattataaataaccagttagcataaatggaaagaaaatagttccttttctntgaattcatttcatgtttaattttcttgcgcacatatagaaatgaatagaaatattcccatttcaatgtgcaaattcagccactatatagtttgtttctttttggtagctaataataataaatttttaagtaagatctgattttgaaatatgaaaagaagtttatcctttcctgttttaataccacctgatacccgtttaacttactgtgtttgattcttggggacatttatgttcaaggttctgtcaaagcaatctattattcttgtttttacctgatggatcatggagaaaaataatggattcagttatgagaaacagtaatagatttttttaactgccataaatttctctccctgtattaaataaaaggatcaggaaaagataagttgaattttcctacaatgagccagctcttcttaaatttacctcccataaattgtagcaaagcacttttcatataatgttttatttatgtaattcagttatttggagatggtggtgagggatgtgagtacatcatttcatgttgtatttcaaatctcttttgacagaaaccctaagaatttgcaataaagaaaattcaatgttccaataaaaa

SEQ ID NO: 68096 - DNA, 1008 bp, Homo Sapiens
  misc_feature (646)..(646): n is a, c, g, or t
  misc_feature (716)..(716): n is a, c, g, or t
  misc_feature (732)..(732): n is a, c, g, or t
  misc_feature (807)..(807): n is a, c, g, or t
  misc_feature (813)..(813): n is a, c, g, or t
  misc_feature (873)..(873): n is a, c, g, or t
  misc_feature (887)..(887): n is a, c, g, or t
  misc_feature (932)..(932): n is a, c, g, or t
  misc_feature (939)..(939): n is a, c, g, or t
  misc_feature (944)..(945): n is a, c, g, or t
cttgtgataacagatcaattttaattctagcacctgaagctatacaagggtatgctctataaacttcatgggactgttgtacacacttgataaagtgacaactgtgcaataccacttagcatctcaaaatcaggaacatactattgaattgcttaaacacaatccacagaattaaaaacaaaatcagatgccatccacagttatactaattatccattaaaagcttacacttaatacttgaaataacaatcaatatctagcagggaatactgaaagtgatttcagagtctcatcctgttgtactctattgggaaggtttcttgagtagttatgtgactggccaaagatgggtacaaccaagaccagaccagcaagtaaaagttctaccacagtttctgtagtttccacttgtttttctttgtcagttaaaagtgaacagtgagaattaaatacttatctttacatatacacaaggtatgctatgaaagcatatctgcttacaaacatataaaaatacttgttaactagtttgataagaaaataatgtataaaagtatatagcaaaaacattaatcatctctgaccctggaaagatcaattccatattttatattacaaacaaaaacagttttagttttttgaatcncttacccagaaatacttgaaaaggaagacagaaggaaattattcctttttacccttagcgtggctgtganaaagagttaaattaanaaatcaagtacactgaaatatctaagtcctaaatgagtccaaatatttgaccacatagaatattatcatctccangagtangagtagtacacagggtttttatagcagtttttatccataatacacaggcattggtatttnggcatcagaaacanagtgtatatcagtaaggctgaatggtcactttgtagatcaatcantgtattnaggtnnacaagtgacatgaatgtttaagatagaaaatcaattaaaaaaactatatctattaagtacata

SEQ ID NO: 68097 - DNA, 657 bp, Homo Sapiens
  misc_feature (159)..(170): n is a, c, g, or t
tttgttgaaaagacgtgcttgtcattcttaataaacaactagagtaagaatacataagagaaacagagtggtatctttatatgatacacaagtgtatgttacaagaattccatcaggcacaggagcctcaggttttaaggcctcaatgttaggccaacnnnnnnnnnnnnggcatggtaaagtttttacttttacatctaaaatgtcacttgtcataaaggagggtgtaatagaaattgtctttaataaatcataattgaagttcccctcatttttcttccattaagatgctaagtttatgtctgatcatgaagaaagaaaagaacatcgttcccctgtggtcagcaaagtctgtcagcccagtggaagtcggctggggagattccctccagggtccatccatcattaattccatctctcttgaagatggaaaggggccacatttcttttcacagtccaagccctttccccaggccccagacaaaaaagagtcagccagcaactttctaggacatatgacactcaaggaaacccagagccaccatcggctgaggagtctgccgcagcaggtttatgaagatgcaaagggggcaaagttttcttttatattttaaacagaagcagcctgaaaggcttcgtaactacaccaataaaaaa

SEQ ID NO: 68098 - DNA, 2362 bp, Homo Sapiens
  misc_feature (2265)..(2267): n is a, c, g, or t
  misc_feature (2269)..(2272): n is a, c, g, or t
cagtcgacggtaccggacatatgcccgggaattcggccattacggccggggggaagaaacacagatggcggcggcgcagcgccattccgggccgggagcaggcagccagcagccctgtcctcaccgcggtccgcccgccgccgctaaatacccggatgcgccgcccaagcgccagacgcggagctgggaaaagggaggcagaggaggcagaggcagaggcagagcccggtgccgagaccaagcgacagaccggcggggctgggcctcgcaaagccggctcggcgagctctcccgacacccgagccggggaggaaaagcagcgactcctcgctcgcatccccgggagccgcactccagactggcccggtagtcaggggctcaggagcagatcccgaggcaggctttgctcagcctccgacgagggctggccctttggaaggcgccttcaacagccggaccagacaggccaccatgaccgagaattccacgtccgcccctgcggccaagcccaagcgggccaaggcctccaagaagtccacagaccaccccaagtattcagacatgatcgtggctgccatccaggccgagaagaaccgcgctggctcctcgcgccagtccattcagaagtatatcaagagccactacaaggtgggtgagaacgctgactcgcagatcaagttgtccatcaagcgcctggtcaccaccggtgtcctcaagcagaccaaaggggtgggggcctcggggtccttccggctagccaagagcgacgaacccaagaagtcagtggccttcaagaagaccaagaaggaaatcaagaaggtagccacgccaaagaaggcatccaagcccaagaaggctgcctccaaagccccaaccaagaaacccaaagccaccccggtcaagaaggccaagaagaagctggctgccacgcccaagaaagccaaaaaaaccaagactgtcaaagccaagccggtcaaggcatccaagcccaaaaaggccaaaccagtgaaacccaaagcaaagtccagtgccaagagggccggcaagaagaagtgacaatgaagtcttttcttgcggactactccctcctgtctcctattttctgtaaataattttctccttttttctctcttaatactcaccaccaccttttgcccccttctgttctgactttataagagacaggatttggattcttcagaaattacagaataattcatttttccttaaccagttgtgcaaggacagcaacaaccaatctaatgatgagaatgtacttatattttgttttgctattaacctacttacggggttagggatttgcgggggggcttgtgtgttttgttggcttgtttgccatgaaggtagatgtgggtggggagaagacacaaggcagtttgttctggctagatgagagggaacccaggaattgtgaggttagcaggaatatctttagggtgagtgagttttccttgagttgggcacccgttgtgagagtttcagaacctttggccagcaggagagaggtggtagggagcagccagccggcaaaggaaggaggtggaaaaaaaccgccaccgggctgacttccacctcccagtggtgagcagtgggggcccaaacccagtttccttctcatttttgttagtttgccctttcggcctccctattttcttagggaaggggagtggggtccaagtgacagctggatgggagaagccatagtttctcccagtcagctaggatgtagccattgggggatctttgtggcttcagcaaattctcttgttaaaccggagtgaaaacttcaggggaagggtggggagtcagccaagtgcctcagtgtgccctgttgaaacttaggtttttccacgcaatcgatggattgtgtcctaggaagacttttcttttcctctggatttttgttcctcctgtacaagaggtgtctttgcttggtttggtggggctgcggccacttaaaacctcccgatctctttttgagtcctttattataagtagttgtagctgcgggagggggagggggagtgggcgggcagtggatagtaagacttactgcagtcgatttgggatttgctaagtagttttacagagctagatctgtgtgcatgtgtgtgtttgtgtatatatacatatctagggctagtacttagtttcacacccgggagctgggagaaaaaacctgtacagttgtctttctcttatttttaataaaatagaaaaatcgcgcacttgcgcgtccccccnnnannnnattttttaaacaagtgttacttgtgccgggaaaattttgctgtctttgtaattttaaaactttaaaataaattggaaaagggagaaactg

SEQ ID NO: 68099 - DNA, 1026 bp, Homo Sapiens
acttagggctaggtacgaggctgggtgtgtgaattcggcacgagggggaaaagggaggcagagtgaggcgtgaggcagagtgcagaggcagatgccctggtgccgagaccaatgcgacagacctggcggggctgggcctcgcaaagccggctcggctgagctctcccgacaccctgagccggggaggaaaagcatgcgactcctcgctcgcatcccctgtggagcctgcactccagactggccctggtagtcagggtgctcagtgagcagattcccgaggcagtgctttgctcatgcctcctgacgaggtgctggccctttgtgaaagtgcgccttcaacagcctggaccagacatggccaccatgaccgagaattccactgtcctgcccctgcggccaatgcccaaagcgggccaaggcctccaagaagtccacagaccaccgccaagtattcagacatgatctgtggcttgccatccaggccgagaagaacctgcgctggctcctcgcgccagtccattcagaagtatatcaagagccactacaaggtgggtgagaacgctgactcgcagatcaagttgtccatcaagcgcctggtcaccaccggtgtcctcaatgcagaccaaaggggtgcgggcctcggggtccttccggctagccaaggagcgacggaaaccaagaagtcagtggccttcaagaagaccaagaaggaaatcaagaaggtagccacgccaaagaaggcatccaagcccaagaaggctgctccaaagcccaatccaagaaacccaaagccacccggtcagaaggcaagaagaagctggtgcagcccaagcaagcaaaaaccaagactggcaaagcaagccggtccagcatcaagccaaaaggcaacagtggaaccaaagcaagtcagtgccagaggcggagaaactgcactgagcttctggggactctcgggtctattcggaacatattccttatcctgagtccacacttgccttgtcgcttagacgcggtccaaacaatatc

SEQ ID NO: 68100 - DNA, 1105 bp, Homo Sapiens
gggaatgatctgaaagttcatgcaggaaaacaccacaattgaagagttagaggcgcttggagagtccttagggaaaggcgatgatcataaggacatggacatcatcaccaaattcctgaagtttcttcctggcgtttgggctaaagaattgaatgccagagaagattatgtgaaacgcagtgtgcagggtaaactgaacagtgcgacccagaaacagaccgagtcctacctaagaccactttttagaaagctacggaaaaggaatcttcctgctgatattaaagaatcaataacggatattattaaattcatgttgcagagagaatacgtgaaggcaaatgatgcttatcttcagatggccattggaaatgcgccttggcccatcggtgtcactatggttggtatccatgccagaactggcagagaaaagattttttccaagcatgttgcacatgttttaaatgacgaaactcagcggaaatatattcagggattgaagaggttaatgaccatttgccagaaacactttcctacagacccatccaaatgtgtggagtacaatgcactgtgagatctgtgtatggtgtgttaataacaataagaaacttagggaagcaggctgtggacttctggaattaccaacaggaatgaggaaagaagaaaactggagtttccagtctctgagttctacctgatgtaactcttgattggttttaagaactttgttggccttcatttcatatctgactgcaagctgatttttctttcttgctttcattttaattagtccaaaattaagttttaaagatttttcctcacaatttaaatccatagacaacagaagggggtttaaaatgacctttttttcagttgacccgaaagttgtggttagatgattaaaaagaaacatttgaggatggacttaattatttcagtaaaatattataatttgcctattgtcttttatgtaatatttatataaaatatttttatatatttcaaaaacatgggaccattgaatgaaactttatagtccttaaatgttgctgaacttttgctgtcttgcaatagaatttgaatgtaaatattattactggtataaccc

SEQ ID NO: 68101 - DNA, 822 bp, Homo Sapiens
accggcgacagtaactctacggtcctaaggtagcgaggctgggtggcgaattcggcacgaggggcaacatggcgtcttcgggagctggtgaccctctggattctaagcgtggagaggccccgttcgctcagcgtatcgacccgactcgggagaagctgacacccgagcaactgcattccatgcggcaggcggagcttgcccagtggcagaaggtcctaccacggcggcgaacccggaacatcgtgaccggcctaggcatcggggccctggtgttggctatttatggttacaccttctactcgatttcccaggagcgtttcctagatgagctagaagacgaggccaaagctgcccgagcccgagctctggcaagggcgtcagggtcctaatctggatgggtattgatcatgtccaacctgctggagccccttcacatggtggatgatgccccatgaccctgtagaaattgaatcctgctcacaacattgttggccttcttactaaccttggaccgtgattgagcccaagaaaccagggacttacgcatttggccaatgtcaaaagaacagaactttgcccactgcacacttgctgtgtacaatgactgagccctttcttgtagtttgtttccttgtttgagaggtgtgcatgcgaccgtggcttttcccaaagtttctgactttgtggtttacccccttcaccttccagggacgcagttgttacgaggttagacgtggcagctctgtgcagtgtttgagcctacagtgggatacatagggtcaaattgagaataataaactgagtcattctcctggaaacaca

SEQ ID NO: 68102 - DNA, 1933 bp, Homo Sapiens
  misc_feature (1565)..(1606): n is a, c, g, or t
  misc_feature (1831)..(1846): n is a, c, g, or t
cagtcgacggtaccggacatatgcccgggaattcggccattacggccgggggagcggcggtcgggcggggggagcgcggcggcccaagctcgcttggccacgcgccccgccccctcagaggccggcctcccgcacgcaccgcgcagcctgctgtgcccgtgggtcccgagtgctccgccgcccgccccgacccgggcccagccgcctccacggcccgcgctcgtactggagcgaagagcggcctcctgaaggaggggaagggacgtgggggcggccacggcaggattaacctccatttcagctaatcatgggagagattaaagtctctcctgattataactggtttagaggtacagttccccttaaaaagattattgtggatgatgatgacagtaagatatggtcgctctatgacgcgggcccccgaagtatcaggtgtcctctcatattcctgccccctgtcagtggaactgcagatgtctttttccggcagattttggctctgactggatggggttaccgggttatcgctttgcagtatccagtttattgggaccatctcgagttctgtgatggattcagaaaacttttagaccatttacaattggataaagttcatctttttggcgcttctttgggaggctttttggcccagaaatttgctgaatacactcacaaatctcctagagtccattccctaatcctctgcaattccttcagtgacacctctatcttcaaccaaacttggactgcaaacagcttttggctgatgcctgcatttatgctcaaaaaaatagttcttggaaatttttcatctggcccggtggaccctatgatggctgatgccattgatttcatggtagacaggctagaaagtttgggtcagagtgaactggcttcaagacttaccttgaatgtcaaaattcttatgtggaacctcataaaattcgggacatacctgtaactattatggatgtgtttgatcagagtgcgctttcaactgaagctaaagaagaaatgtacaagctgtatcctaatgcccgaagagctcatctgaaaacaggagcaatttcccatacctgtgcagaagtgcagaggtcaatctttatgtacagatacatttgctgcaattccatggaaccaaatacgcggccattgacccatcaatggtcagtgccgaggagcttgaggtgcagaaaggcagccttggcatcagccaggaggagcagtagtgtgtctctcgctgtcaatgatgagttgacccggtgtgttcttgtatagtcagtggcatcagcacccgtcagccggccttttccttcaggttcgtcaggctcaccggttctcactgtgtctgggaagtaggactgatggtcatcttcatgacaggcggcatctccactaagcctgtgtaactgttccctctttggttttcttagcttttgaatttgaagaagtacttttgaagactcccattttaagaaccgtgcaaattttgctaccaaaagtcttcaccactgtgttcttaagtgaatgttaatttctgaggtttgggactttgtggtggnnnnnnnnnnnnnnnnnnnnnnnnnnnnnnnnnnnnnnnnnnatgttgtttgctgtaaatgctgcacatccagattgcatatcaggacattggttattttatgctttcttggatataaccatgatcagagtgccatggccactaccccactgtttgctctcctgcaaatcaactgcttttaatttacacttaaacaaattgttttgagtgttagctactgcctttctagatattagtcatttggaataaaaattcaatttcactggnnnnnnnnnnnnnnnncgacgcgtgggtcgacgatatcccgggattccggaccggaccagcctgctttttgtaacactgttctatagtacctaatcacttttt

SEQ ID NO: 68103 - DNA, 1220 bp, Homo Sapiens
aaggggctgtggggtgaaatgttgactggaagccacccacaaacacacacctgctggttaggaacccggctgtgggtggttctgagctgtttggcttcagttgacagtttctgattgccctgagcaccaggtctcatcttgcatctcatcctggcctggagaacattcagtttccttccaacccttcccacctttcccccactcccttggaggaactgaagttggggttgaggagagccagatggctggagtgggtatttgaaggtctttctgtcacctgttcagtgtggtctgccccacccctgctgaccaagactgactgaaatgtaaaataatacagaccatctcacactcagaaagctggcacatttttgaaagcccaagtgtgggtaagtgcgtggaacaacgataattcacactgctttatgagtagaaattgtgagaaatattgtgccaggcaatttgcaaaatcttggaaggttgtgtgcacttaaccacccagcaactactcctggatgcatcctagagaagtgccatgtgaacagagaatgattttaagacttcactgaagtattgtttaggtagcaagattgggaaaagcctgcatttcatcagcagaagaatggataaataaatgggttgtttttggtccttggaaagtgaatatgaaagagttacgtctcaacacagatagatgaaaaattatgctgagaaagttggtgaagctacatacaaggtacccttagtgtaaagttaagcatactgtgtacctgtgggcacgttacttcaacttgtttttcactttttctgtaaaatgggatagtagtggcaatctcacagggtgattgtgggtgggggggtggtcaatgaagtaatgcatgtaaaatgcttagaatagtgtctagcatgtaagccttgtggacatatagaaagtgttattgttttgcacagtaatctattttctgtggattcaaataatatgaaatgagtataaaatcatgtattggaacgatgtgtgcaagtcaccattctgccttcctaaggcaggagacctgatggatttggggagggtacatggggccttcagttgtgttttctttgtttttttctaaaaattgatgcagaggcatcacaatgttaagattttaacagggtagtgtggtgggtactttttaactgtttgcttaaagtgtttcaaagtaaaaatatttcttaagcat

SEQ ID NO: 68104 - DNA, 772 bp, Homo Sapiens
  misc_feature (54)..(54): n is a, c, g, or t
catccaagtgccctgagtatttcactgcagggttgtgaattttcttttcctctntgggaatccaaatgatgatgtgcaatttcatgttttaacttgggaaactgaaagtgttcccatatagcttcaaaaacaaaaacaaatgtgttatccgacggatacttttatggttactaactagtactttcctaattgggaaagtagtgcttaagtttgcaaattaagttggggagggcaataataaaatgagggcccgtaacagaaccagtgtgtgtataacgaaaaccatgtataaaatgggcctatcacccttgtcagagatataaattaccacatttgccttcccttcatcagctaacacttatcacttatactaccaataacttgttaaatcaggatttggcttcatacactgaattttcagtattttatctcaagtagatatagacactaaccttgatagtgatacgttagagggttcctattcttccattgtacgataatgtctttaatatgaaatgctacattatttataattggtagagttattgtatctttttatagttgtaagtacacagaggtggtatatttaaacttctgtaatatactgtatttagaaatggaaatatatatagtgttaggtttcacttcttttaaggtttacccctgtggtgtggtttaaaaatctataggcctgggaattccgatcctagctgcagatcgcatcccacaatgcgagaatgataaaataaaattggatatttgagaaaaaaaa

SEQ ID NO: 68105 - DNA, 881 bp, Homo Sapiens; identical to SEQ ID NO: 15366
  misc_feature (631)..(650): n is a, c, g, or t

SEQ ID NO: 68106 - DNA, 818 bp, Homo Sapiens; identical to SEQ ID NO: 15367
  misc_feature (676)..(722): n is a, c, g, or t
  misc_feature (770)..(770): n is a, c, g, or t

SEQ ID NO: 68107 - DNA, 617 bp, Homo Sapiens
gatttcgacattgaaatgccactacggaagtatcctgtgagatatgaagaaagcatgaatactgtgttagtacaagaaatggaaagatttaacaagactggtataattcaggaaaaccttgtgtgttttggctgtcaggtttctttttcactcaggcctttttaactggagctatgcagaattatgccagaaaatataccacccctattgatttgctaggatatgaatttgaggttatcccatctgatacatctgacacatcaccagaagatggtgtttatatccacggactgtatctcgatggcgcacgctgggaccgagaaagtggattgcttgctgaacaatatcccaaacttctgtttgacctgatgcccatcatatggataaaaccaactcaaaaatctcggattataaagtcggatgcctatgtctgtcccccctacaagacaagtgaacgtaaaggaactctttccactacgggacattctactaactttgtcattgcaatgttgttaaaaacagaccaacctactcggcactggatcaagcgcggggttgctttgctttgtcacttggatgactaaattggacaaatttataaaacatccgaaaagttt

SEQ ID NO: 68108 - DNA, 897 bp, Homo Sapiens
  misc_feature (82)..(82): n is a, c, g, or t
  misc_feature (774)..(839): n is a, c, g, or t
gaagaagcatgatactgtgtagtacaagaaatggaaagattaaccaatttaattataactatacgtaacactctacggaccnttgaaaaagctaataagggtgtggttgtgatggattctgcattggaggcactctccagtagcttacttgttggaaaggttccagaaatatgggccaaacgttcatacccaagccttaagcccctgggaagttacatcacagatttcctagcccggttgaactttttacaggactggtataattcaggaaaaccttgtgtgttttggctgtcaggtttctttttcactcaggcctttttaactggagctatgcagaattatgccagaaaatataccacccctattgatttgctaggatatgaatttgaggttatcccatctgatacatctgacacatcaccagaagatggtgtttatatccacggactgtatctcgatggcgcacgctgggaccgagaaagtggattgcttgctgaacaatatcccaaacttctgtttgacctgatgcccatcatatggataaaaccaactcaaaaatctcggattataaagtcggatgcctatgtctgtcccctctacaagacaagtgaacgtaaaggaactctttccactacgggacattctactaactttgtcattgcaatgttgttaaaaacagaccaacctactcggcactggatcaagcgcggggttgctttgctttgtcagttggatgactaaattggacaaatttataaaacatccaaaagtttnnnnnnnnnnnnnnnnnnnnnnnnnnnnnnnnnnnnnnnnnnnnnnnnnnnnnnnnnnnnnnnnnngcctacagccgcggccgcaagcttattccctttagtgagggtaattttagcttggcac

SEQ ID NO: 68109 - DNA, 1067 bp, Homo Sapiens
  misc_feature (50)..(50): n is a, c, g, or t
  misc_feature (206)..(206): n is a, c, g, or t
  misc_feature (249)..(660): n is a, c, g, or t
  misc_feature (701)..(720): n is a, c, g, or t
cggtggcggaagactacccgaatgggtcccacagggtgattttggaagcncacgtttccgaaggaggaagcgaacagtacccgtaaccgcagggtcgaaccagagagcgccggaggactttccaggggaaacgcatggatcttatagcctgtcggtttgccaccctgactgagctcgattttgtgatgtcgtcagggggcggagcntatgaaaacgccagcaaccggccctttaacgatcctgccctannnnnnnnnnnnnnnnnnnnnnnnnnnnnnnnnnnnnnnnnnnnnnnnnnnnnnnnnnnnnnnnnnnnnnnnnnnnnnnnnnnnnnnnnnnnnnnnnnnnnnnnnnnnnnnnnnnnnnnnnnnnnnnnnnnnnnnnnnnnnnnnnnnnnnnnnnnnnnnnnnnnnnnnnnnnnnnnnnnnnnnnnnnnnnnnnnnnnnnnnnnnnnnnnnnnnnnnnnnnnnnnnnnnnnnnnnnnnnnnnnnnnnnnnnnnnnnnnnnnnnnnnnnnnnnnnnnnnnnnnnnnnnnnnnnnnnnnnnnnnnnnnnnnnnnnnnnnnnnnnnnnnnnnnnnnnnnnnnnnnnnnnnnnnnnnnnnnnnnnnnnnnnnnnnnnnnnnnnnnnnnnnnnnnnnnnnnnnnnnnnnnnnnnnnnnaagttaccattctgatgttggagcggccgcggctgtaggcnnnnnnnnnnnnnnnnnnnnggtggggtagttgaataaaattgggcagctaaatttttcagttccatgtgcctcccaaataaaaaacagaaaataagtagtttttgtgaattgacttgcagacaaagtagaaactgtgctgcatgatgttattttgtaaacagatgacattttctgaccaggcacatgccatccaattttctgtcaatcacactgttgtataaagcagcagaactgaaggggaaaaatgattgttgtatacactgaattgctttgcatggtctcatttgagataattgatgtaagaatcctgacttttttatatttggaaacatcaaataaaaatggaaaaaatgatcatggctttt

SEQ ID NO: 68110 - DNA, 2793 bp, Homo Sapiens
  misc_feature (144)..(154): n is a, c, g, or t
  misc_feature (435)..(444): n is a, c, g, or t
  misc_feature (524)..(545): n is a, c, g, or t
  misc_feature (711)..(711): n is a, c, g, or t
  misc_feature (972)..(986): n is a, c, g, or t
  misc_feature (1026)..(1035): n is a, c, g, or t
tagtctatacctgccagattaaattttcttccagaaatattttaataaaaattggccatttccaagtaacacccactgcatgcccatcaataaaagagaaccataacaaaatagaaaatttaccatatggctatgattttaagnnnnnnnnnnntgcggacacgagcacatgagcaaagtccaatattaaagtaacattccttcttacgggctatgattaggaatctgattagataccagaataaaaatacaaatgctgaactatttaggtcaaagaacctctatagaagcatctgtcttcaaaggcattccagtttgagactcaattttagaataaggcataacaaatatgttaacaaaagacatacacaaagtgatgaaagagggattctataattccccacatactctgaacctaataaaacaaatctagannnnnnnnnnaaacaattgccaagactgaaatcaaagataaatagaaggcacaacagttttgctctggttgttatctgggttttgggaannnnnnnnnnnnnnnnnnnnnnacaaatacaaattaaacatgaaaaaactacttcaaaaaaactaacagttcaagaaaagcctatcagttgcattctagacatttaaaacctattatcacaatttaaatttcaatggtaaaaacagttaggttttagaattgttttgtgatcctttatcaagaaaaanttctattccttttattcagtttttaaacataccagtgagaatcaaaattgtcaaattttccaatggcaatttctccacaccagaaggtagtcatgactctcaaagaagaaacaatttgggtttttcctgccttcaaaatattatcaaatcctgtatttcttacaggcttttcaaacacgtagaaaataagaaatattccaatgaatgaaacataccaaatgtcagtaatatgcaagacattcctttggggaaatggctgtnnnnnnnnnnnnnnntccagtctgtatatgcaaagtaagcaaggaaattcagtcnnnnnnnnnngcttctttaaaagtccgttattcctaaaatatcattccacaaaattggaagtgaaagactaaaggtcaggaaagggaagagagggagagggagcacacaccattaacacacaaaaaaagtaaaattatacaaacttaagcagtttataacagactggggtcatactccaagataccaaaggctgtcgaaaattcaccattctgttggaaccagggtttgtatggctgcatgaagatccatgaagattcactgccgtggcgcaagcccccttcccactccaaatcctggtttctgcaccatgcctccacggggagggcctctcattccaccacccagcccacctcgagggcctccaggtccccgaaggcgattatctcgtcggtcgccttccctggcagctcgagtcttcttctcttcgacattcagacggacctcacctctgaacatgatgggcctgttgctaaggactttctgaacaggctcagaatcatcaaacacaacaaaaccaaaattgggtaatttcccaccactgttaatgcgcaactccaccacgtttccataactttgaaagaaatctttaagctctgatttgtccacttcatgaggcaggttgccaatgaagagttggtgactgtcagggtgtctcaccattcttcggggttcaatgtcaccttgctcaccagcctcacggattggtctgggtcccctttggggaggaatatttattcgttgttctcgcactctttgatcccgctgaggtctttgtggtggaatctgagattcaggcttagactctggacggggctgtgaagctggtactttaacaacatgaggtggtatcccagtaactggaacagctccactgggtggaagattcttactggtcacagatgcccaagaaaatgtcctcaagtcttcctgtactgtctgagctatgtctgcaggtgctggagaagaactcttctgagcatcctcaggggcagtttcttctaatactggctcaggcttttcctcttggatttcagatacaggttcttgttctggttctggttcaggatcaggctctggttcagcaacaggctcctctaaatgttcttccatgtcattactgacaactgcctgatcatagaaagttccagaatcatcaggtaccacctcaggtgtttgctgtctttcttcaggttcctctgacttcttcttcagactcctcctgaggctcagtgacaaacccaccaaagacctcatcttggtatctgaagatatcattgtgaacatagaatttatttgcaacagacccctcaggagcaaggacaaacgtttgcatgaatctcctcaaagcctggttgttgttagagagaagccccatcacctggactaccacaccatcatttagcgtggcatgagcatcaacatggcgaatcttggtgtggcagttggtgaagttttgtgacatcactttcctgtggatttctttctgtccgtagactgcatctgctggctttccatttgaatccaatcccccatggacataagaagagttctttccataaaatctatgcagcatgtctggggcctggttcagcagtgtgtaatactgtctcacaaattcccgcccgaccagcaggggactaggcttctccatcaccattgctttggtcaattcaacctacgcggctgagctggagaggaactagctctgcaccacagcaccgaggatagtacaaacccctcacgcaactcctcggccgactcaccaca

SEQ ID NO: 68111 - DNA, 917 bp, Homo Sapiens
ggaccggtccggaattcccgggatatcgtcgacccacgcgtccgcccacgcgtccggacgcagttgcgtgaggggtttgtactatcctcggtgctgtggtgcagagctagttcctctccagctcagccgcgtaggtttggacatatttgactcttttccccccaggttgaattgaccaaagcaatggtgatggagaagcctagtcccctgctggtcgggcgggaatttgtgagacagtattacacactgctgaaccaggccccagacatgctgcatagattttatggaaagaactcttcttatgtccatgggggattggattcaaatggaaagccagcagatgcagtctacggacagaaagaaatccacaggaaagtgatgtcacaaaacttcaccaactgccacaccaagattcgccatgttgatgctcatgccacgctaaatgatggtgtggtagtccaggtgatggggcttctctctaacaacaaccaggctttgaggagattcatgcaaacgtttgtccttgctcctgaggggtctgttgcaaataaattctatgttcacaatgatatcttcagataccaagatgaggtctttggtgggtttgtcactgagcctcaggaggagtctgaagaagaagtagaggaacctgaagaaagacagcaaacacctgaggtggtacctgatgattctggaactttctatgatcaggcagttgtcagtaatgacatggaagaacatttagaggagcctgttgctgaaccagagcctgatcctgaaccagaaccagaacaagaacctgtatctgaaatccaagaggaaaagcctgaggccagtattagaaaaaaactgccccctgagggatgctcagaagagttcttctcccgcaacctgcagacattagctccaaccgtaca

SEQ ID NO: 68112 - DNA, 507 bp, Homo Sapiens
cagcccggtccagagtctaagcctgaatctcagattccaccaaaaagacctcagcgggatcaaagagtgcgagaacaacgaataaatattcctcccaaaaggggacccagacccaagtaagagctcagaagggcgatttctcgtttgggggattttgaggtgagagcttattttgggagggcagttgatatttatatactttaaaataaaaatattgtagggttgatggaattacctgtttttagtgtagagggaaaactattgaatgtgagcagtcattgaaagatgtcttctttctcttgtctttcattgatgtttttgtctccttttaagtccgtgaggctggtgagcaaggtgacattgaaccccgaagaatggtgagacaccctgacagtcaccaactcttcattggcaacctgcctcatgaagtggacaaatcagagcttaaagatttctttcaaagtaggttattgagttttgaacactaaattcatctagtgtctctct

SEQ ID NO: 68113 - DNA, 687 bp, Homo Sapiens
gggcaattttccagtgatgaaattgtgaatcaggcagtcacactggacaacatctagcaaggtgaattctgcaactccctactttatttacattttaaaataagcaatatattcatacggtttaaaatccaaagtttacaaaagggtatagggtgacatctccttccctcccacctgtgcgccccaaccctgcaggtgctgttctgagggaatcacactgtgcttgcacaaaaattattagcttataagacaccagccttccccttgctttcctcacttgatgtatcttggagcttgttccttattcttgattatagttgtatggtattgcactatctggagctaacacctgtgacccacactcatgttttaaaagtttctgcattagtcaaaaatatttaaaaggagattcaacttcacaacccatatgtctagcttctcttgaaaacacgtaagaactggccatgacagcctgtgtttctatgtaactatgagccagagccaaggagcggggggaccaggagaggtgtgcccctgccatgctgccatttgttatcacccgcctgtcaaatcacaggtttatttcaaggcaagaaccatgttcataggttgtattctaaatggagcggcgtgcccttactgaaggactagatgaggcaaataaagactagttgctgatattcattc

SEQ ID NO: 68114 - DNA, 601 bp, Homo Sapiens
  misc_feature (1)..(1): n is a, c, g, or t
ngactctaaaaaggtattaatgaaacataaaacttaacaatgaaggcagaagaagaacatagtagaaacaattactacaaacattttagcttccaatttcatataatgttatacagtttagaaggagatagtctattcgttaatagaaatagtaagtgtacttttttagcttctgctgtgggagcatggcatacaccagcttgggtggtggggaaagcgggtctgtaatgttccagcctctggttggctccatcggctgcttttgggcaacacccagctttagagatcttttttgttactttctgactttgcttattctttttcttttccaaccaagaacatgctaattctttgaaaattagtttgccaagcagccaatttagtgaatgaccaatttacttaatttttcaagtttcagtttgtgaaaatgtggttgttttatctgtatacaaagtttacagttcctatttaatgggaagttttggttgactagcttttatttctttatggcactgttaataagtatttgctgtgttgctctctgagggttagaaagtggttgttataaacatttaatactgagaaaacactcgtgccgaat

SEQ ID NO: 68115 - DNA, 815 bp, Homo Sapiens
  misc_feature (674)..(729): n is a, c, g, or t
tgcggccgccaaataaggaatagaacatggcctatgccagtagtatgaggagttatcttaaggctttagtgtactatatggaaatgtaaatatttagtggtctcacaaaaaccatctgtatattcctacagacagccgctgtactgtgttaaggaaacaagatagtggtgaagcaccgtttagttcaaccaaggtgaaaaacaaaagcaagaaaaagaagccaaaggattcaaagcctatgttagttgggtctggaacaacttcagtaacttcaaataatgagatcatcacttcaagtgaagaccatagcaatcgaaattcagattctgcaggcccatttgcagtgcctgaccatcttcggcaagatgtagaagaattcgaagctctctatgaccaacacagtaacgaatatgttgtccgcaataagaagctatgggacatgaacccaaaacaaaaatgttcaactctatatgattacttctctcagtttttggaggaacatggtcccttggacatgagtaacaagatgttctctgcagaatatgagtttttcccagaagaaactcgacagatactagaaaaagcaggaggtttaaaaccttttctcttgggatgccctcgttttgttgtgattgacaactgtattgcactgaagaaggttgcatcacggctcnnnnnnnnnnnnnnnnnnnnnnnnnnnnnnnnnnnnnnnnnnnnnnnnnnnnnnnnaggggtgttttcatggcgcgatgcactgtgacttgttattcaagttgtatgtctactgttccatctatcacgttttatacctttcc

SEQ ID NO: 68116 - DNA, 1225 bp, Homo Sapiens
  misc_feature (70)..(106): n is a, c, g, or t
ctcttgggatgccctcgttttgttgtgattgacaactgtattgcactgaagaaggttgcatcacggctcnnnnnnnnnnnnnnnnnnnnnnnnnnnnnnnnnnnnntagaagaaatttcaaaagcaggggagtatgtacgagttaaactacaactgaatccagctgctagggaatttaaaccagatgtaaagtctaaaccagtgtcagattcatcttcagcaccagcttttgaaaatgtgaaacccaaacctgtgtctgcaaattctcccaagccagcttgtgaagatgtgaaggccaaaccagtatccgacaattcttctagacaagtttctgaggatgggcaacccaaaggggtctcttctaattctcctaaaccaggctctgaggatgcaaattacaagcgagtctcctgtaattcccccaaaccggttcttgaggatgtgaaaccaacttattgggctcaatcccatttggtcacaggatactgtacgtatcttcctttccagagatttgatatcacccagacaccgccagcatacataaacgtgttaccaggtttgccccagtacaccagcatatatacacccttggccagcctttctcctgaatatcagctaccaagatcagtaccagtggtgccgtcttttgtagccaatgacagagcagataaaaatgctgctgcctattttgagggtcatcatttgaatgctgagaatgttgctggtcaccagattgcctctgaaacacagatccttgagggctctttgggaatatctgtaaagtcacactgcagcacaggtgatgctcatacagtcctgagtgagtctaacagaaatgatgagcactgtggaaattctaacaacaaatgtgaagtaattccagaaagcaccagtgcagtaacaaacattccacacgtgcagatggttgccatacaggtatcttggaacataatacaccaagaagtcaatactgagccatataatccttttgaggaacgacaaggggaaatttcacggattgaaaaggagcaccaagtattacaagaccaacttcaagaagtgtatgaaaattatgagcagataaaacttaagggcttagaagagaccagggacctggaagagaagttgaaaaggcacttagaagaaaacaagatctcaaagacggaattagattggttccttcaagatttggaaagagaaattaaaaaatggcaacaggaaaaaa

SEQ ID NO: 68117 - DNA, 1323 bp, Homo Sapiens
  misc_feature (99)..(99): n is a, c, g, or t
  misc_feature (518)..(564): n is a, c, g, or t
attctgggtagcgggatactcacgaggaaaggctggcccaggggtgtatatatgctggggtactggggcaaaacctggaaccacgtttatgtatgctgncggtgtctgggggatatcaaatctctgaaaaggaagatacgtacagtatcctgtgaccaaatgggattgagcccaataagttggtttcacatcctcaagacaccggtttggggggaattacaggagactcgcttgtaatttgcatcctcagagcctggtttaggagaattagaagagacccctttgggttgcccatcctcagaaacttgtctagaagaattgtcggatactggtttggccttcacatcttcacaagctggcttgggagaatttgcagacacaggtttgggtttcacattttcaaaagctggtgctgaagatgaatctgacactggtttagactttacatctggtttaaattccctagcagctggattcagttgtagtttaactcgtacatactcccctgcttttgaaannnnnnnnnnnnnnnnnnnnnnnnnnnnnnnnnnnnnnnnnnnnnnnagccgtgatgcaaccttcttcagtgcaatacagttgtcaatcacaacaaaacgagggcatcccaagagaaaaggttttaaacctcctgctttttctagtatctgtcgagtttcttctgggaaaaactcatattctgcagagaacatcttgttactcatgtccaagggaccatgttcctccaaaaactgagagaagtaatcatatagagttgaacatttttgttttgggttcatgtcccatagcttcttattgcggacaacatattcgttactgtgttggtcatagagagcttcgaattcttctacatcttgccgaagatggtcaggcactgcaaatgggcctgcagaatctgaatttcgattgctatggtcttcacttgaagtgatgatctcattatttgaagttactgaagttgttccagacccaactaacataggctttgaatcctttggcttctttttcttgcttttgtttttcaccttggttgaactaaacggtgcttcaccactatcttgtttccttaacacagtacagcggctgtccattatatcaaagaattcatctaaagcactatgcaatgctgggaacttgtctctgtgttcttctagcagccatattaaacaacgggcttccttcaatgatgctggctcagagaaataatcaagttgctttccttctatagagtctagtttgtgaccatatttctcattccagaggaaagtcatgatactaaaatcaagcagtttaagagatgctcca

SEQ ID NO: 68118 - DNA, 985 bp, Homo Sapiens
  misc_feature (19)..(19): n is a, c, g, or t
  misc_feature (43)..(43): n is a, c, g, or t
  misc_feature (63)..(63): n is a, c, g, or t
accctcccttttccgggangggtaaaaaccgggtaacagcttnccccccaggttgtaaatagnccgtaagaccttgaactgcccccaggctggataaagctcctacattaaagtattggtgaactttgaaagctagacagtcatcctcagagtgtgagaccttgtcccaggtagatgatgagggtgttcctatcggagaaggctttgtccagctcatacttggagatgtatctgtcaacaccattggccagctgcttcaggtcatctgtgtctggagcaaagccagtcatcatggatatgtccaatatagacatagtggcatcctggtctccccggtacctggtacagatctcaaggatcatagtgttcttggcatcctgaggcctcttttctgtttccggtgctggttttatggtgaccttgaggtcgaatttattacaggtgagttgatctttggccttagcatggtacattgtcaccaccgacaaggtgccttggccttttccttcagctgtgactgtgaaaccctcattttccttggtctcttctgatcgcaggaggctggcagattcccagtggatacggtgggtgatcttggagctgcggctgggcagttggagggacacatcaaggttcagttcctggtggtcaggggcgtccttttggtattgagccaaggcttggaacaccatgaaggtggcctgggtagagccatagccaccaccgtagtatctctgttcattgagccaacgcacgacgggaggcacaaagtcaaagtcttttagctgcagtagggccaagagggcataggatgtggcctccacgttgtagagctgcttaccagggtcctcccagcggttcttatctttggctgtggtcagaaatttgttaagaagaggccccttcagcctgcccatctgggccagagcatagccagcaatggccacagtgtaggatctctgtaggttcatgtagttggcttcaa

SEQ ID NO: 68119 - DNA, 1320 bp, Homo Sapiens
  misc_feature (1302)..(1302): n is a, c, g, or t
cagtcgacggtaccggacatatgcccgggaattcggccattacggccggggagggtttcacagtcacagctgaaggaaaaggccaaggcaccttgtcggtggtgacaatgtaccatgctaaggccaaagatcaactcacctgtaataaattcgacctcaaggtcaccataaaaccagcaccggaaacagaaaagaggcctcaggatgccaagaacactatgatccttgagatctgtaccaggtaccggggagaccaggatgccactatgtctatattggacatatccatgatgactggctttgctccagacacagatgacctgaagcagctggccaatggtgttgacagatacatctccaagtatgagctggacaaagccttctccgataggaacaccctcatcatctacctggacaaggtctcacactctgaggatgactgtctagctttcaaagttcaccaatactttaatgtagagcttatccagcctggagcagtcaaggtctacgcctattacaacctggaggaaagctgtacccggttctaccatccggaaaaggaggatggaaagctgaacaagctctgccgtgatgaactgtgccgctgtgctgaggagaattgcttcatacaaaagtcggatgacaaggtcaccctggaagaacggctggacaaggcctgtgagccaggagtggactatgtgtacaagacccgactggtcaaggttcagctgtccaatgactttgacgagtacatcatggccattgagcagaccatcaagtcaggctcggatgaggtgcaggttggacagcagcgcacgttcatcagccccatcaagtgcagagaagccctgaagctggaggagaagaaacactacctcatgtggggtctctcctccgatttctggggagagaagcccaacctcagctacatcatcgggaaggacacttgggtggagcactggcccgaggaggacgaatgccaagacgaagagaaccagaaacaatgccaggacctcggcgccttcaccgagagcatggttgtctttgggtgccccaactgaccacacccccattcccccactccagataaagcttcagttatatctcacgtgtctggagttctttgccaagagggagaggctgaaatccccagccgcctcacctgcagctcagctccatcctacttgaaacctcacctgttcccaccgcatggttctcctggcgtgcgcctgcaactgaacacacccccatagccaaggagcatggacctgcctcaccttcatgtggcatgcacctgcgccntcacctcatttcacctgc

SEQ ID NO: 68120 - DNA, 820 bp, Homo Sapiens
cagtcgacggtaccggacatatgcccgggaattcggccattacggccgggtatccactgggaatctgccagcctcctgcgatcagaagagaccaaggaaaatgagggtttcacagtcacagctgaaggaaaaggccaaggcaccttgtcggtggtgacaatgtaccatgctaaggccaaagatcaactcacctgtaataaattcgacctcaaggtcaccataaaaccagcaccggaaacagaaaagaggcctcaggatgccaagaacactatgatccttgagatctgtaccaggtaccggggagaccaggatgccactatgtctatattggacatatccatgatgactggctttgctccagacacagatgacctgaagcagctggccaatggtgttgacagatacatctccaagtatgagctggacaaagccttctccgataggaacaccctcatcatctacctggacaaggtctcacactctgaggatgactgtctagctttcaaagttcaccaatactttaatggtagagcttatccagcctggagcagtcaaggtctacgcctattacaacctggaggaaagctgtacccggttctaccatccggaacacaggaggatggaaagctgaacaagctctgccgtgatgaacttgtgccgctgtgctgaggagaatggcttcatacaaaagtcggatgacaaggtccacccttgggagaacggttgaacaaggcctgtgagccaggagtggactatgtgtaccaagacccgagtgctcaaggttcagctgttccaatgactttgacgaattacatcatgg

SEQ ID NO: 68121 - DNA, 1085 bp, Homo Sapiens
  misc_feature (1011)..(1045): n is a, c, g, or t
gggtttccgcggcgtgcggtggggctgctcggggtggtgtgtgcgcgggggtccggggttgtgtgcgcactgtggtggggcggtgagcgggcggtggtggcggcggggccgtgtggcggggctgacgttgtggctcggccgcgtgggccatgagggatgtcgtcgaaggctcgtggggccagctggacgctgggccggttcggggtcttgaacacataggccactctggcgtcacagccgtggccagccggtcgtcgcagggggacctggtcatccggacttgttggtatgaagccatttctccttcaagcacaggcgggcaccaggtcatcacgggcagagccttgttcagctttccatccgcctgttccggatgttagaaccgggtacaagctgttcctccaggtttgtaaataggcgtagaaccttgacctgctccacaggctggataagctctaacagttaaagtattggtgaacttttgaaaagctagacagtcatcctcagatgtgagaccttgtccaggtagatgatgaggtgttcctatcggagaaggctttgtccagctcatacttggagatgtatctgtcaacaccattggccagctgcttcaggtcatctggtgtctggagcaaagccagtcatcatggatatgtcccaatatagacatagtggcatcctggtctccccggtacctggtacagatctcaaggatcatagtgttcttggcatcctgaggcctcttttctgtttccggtgctggttttatggtgaccttgatggtcgaatttattacagcgtgagttgatctttggccttagcatggtacattgtcaccaccgacaaggtgccttggccttttccttcagctgtgactgtgaaaccctcattttccttggtctcttctgatcgcaggaggtctggcagattcccagtggatacggtgggtgatcttggagccccggccgtaatggccgaattcccgggcatatgtccggtaccgtcgactgnnnnnnnnnnnnnnnnnnnnnnnnnnnnnnnnnnncgtccgcttcctcgctcataccccgggcgctcgtcgtata

SEQ ID NO: 68122 - DNA, 973 bp, Homo Sapiens
aactacgagatagaccatggccctcacggcctttggtctcatctcgctgcaggaggctaaagatatttgcgaggagcaggtcaacagcctgccaggcagcatcactaaagcaggagacttccttgaagccaactacatgaacctacagagatcctacactgtggccattgctggctatgctctggcccagatgggcaggctgaaggggcctcttcttaacaaatttctgaccacagccaaagataagaaccgctgggaggaccctggtaagcagctctacaacgtggaggccacatcctatgccctcttggccctactgcagctaaaagactttgactttgtgcctcccgtcgtgcgttggctcaatgaacagagatactactgtggtggctatggctctacccaggccaccttcatggtgttccaagccttggctcaataccaaaaagacgcccctgaccaccaggaactgaaccttgatgtgtccctccaactgcccagccgcagctccaagatcacccaccgtatccactgggaatctgccagcctcctgcgatcagaagagaccaaggaaaatgagggtttcacagtcacagctgaaggaaaaggccaaggcaccttgtcggtggtgacaatgtaccatgctaaggccaaagatcaactcacctgtaataaattcgaccctcaggtcaccataaaaacagcaccgggaaacagaaaagaggcctcaggatgccaagaacactatgatccttgagatctgtaccaggtaccgggggagaccaggatgccactatgtctatattgggacatatcccatgaagactgggctttgctccagaccccgaatgaccctgaagcagctgggcaaagggggtttgacagataccatcttccaaagtattgaacctgggaacaaaaccctttccctccaataaggaacacaccctcaattatttttaacctggaaaaa

SEQ ID NO: 68123 - DNA, 502 bp, Homo Sapiens
aataaacattgctgaggctcttgtcagcaaaggtctagccacagtgatcagataccggcaggatgatgaccagagatcatcacactacgatgaactgcttgctgcagaggccagagctattaagaatggcaaaggattgcatagcaagaaggaagtgcctatccaccgtgttgcagatatatctggggtgagtcgagtccctgaatcaagctgtgtggctcagaggctcaagagcgtgtctgcatatttgctgaaggacttcagcttatgtattttctctagctcgctccttttcaggcactgactgtgacttttacccaccccggggcatctacttaggtatctatagggagcctgttttattatctggaaaagcagaattaacttcattctttttctttacctgaactgtttctatgttgctttttcatttttaattactgtattttgagtttggaaggtagttcttcttggttgtattaaaataaaattgcctcttttt

SEQ ID NO: 68124 - DNA, 3548 bp, Homo Sapiens
gcatggtgaatatagaacccagtggtaaaaaaagcaggctggtacggtccggaattcccgggatatcgtcgacccacgcgtgccgccgctgctgctcctgtgagcgcccggcgagtccgtcccgtccaccgtccgcagctggtagccagcctgcccctcgcctcgactccctttcaccaacaccgacacccacattgacacctccagtccggccagccgctccactcgttgcctttgcatctccacacatggcgtcctccgcgcagagcggcggctcctccgggggacccgcggtccccaccgtgcagcggggcatcatcaagatggtcctctcagggtgcgccatcattgtccgaggtcagcctcgtggtgggcctcctcctgagcggcagatcaacctcagcaacattcgtgctggaaatcttgctcgccgggcagccgccacacaacctgatgcaaaggatacccctgatgagccctgggcatttccagctcgagagttccttcgaaagaagctgattgggaaggaagtctgtttcacgatagaaaacaagactccccaggggcgagagtatggcatgatctaccttggaaaagataccaatggggaaaacattgcagaatcactggttgcagagggcttagccacccggagagaaggcatgagagctaataatcctgagcagaaccggctttcagaatgtgaagaacaagcaaaggcagccaagaaagggatgtggagtgaggggaacggttcacatactatccgggatctcaagtataccattgaaaacccaaggcactttgtggactcacaccaccagaagcctgttaatgctatcatcgagcatgtgcgggacggcagtgtggtcagggccctgctcctcccagattactacctggttacagtcatgctgtcaggcatcaagtgcccaacttttcgacgggaagcagatggcagtgaaactccagagccttttgctgcagaagccaaatttttcactgagtcgcgactgcttcagagagatgttcagatcattctggagagctgccacaaccagaacattctgggtaccatccttcatccaaatggcaacatcacagagctcctcctgaaggaaggtttcgcacgctgtgtggactggtcgattgcagtttacacccggggcgcagaaaagctgagggcggcagagaggtttgccaaagagcgcaggctgagaatatggagagactatgtggctcccacagctaatttggaccaaaaggacaagcagtttgttgccaaggtgatgcaggttctgaatgctgatgccattgttgtgaagctgaactcaggcgattacaagacgattcacctgtccagcatccgaccaccgaggctggagggggagaacacccaggataagaacaagaaactgcgtcccctgtatgacattccttacatgtttgaggcccgggaatttcttcgaaaaaagcttaatgggaagaaggtcaatgtgacggtggactacattagaccagccagcccagccacagagacagtgcctgccttttcagagcgtacctgtgccactgtcaccattggaggaataaacattgctgaggctcttgtcagcaaaggtctagccacagtgatcagataccggcaggatgatgaccagagatcatcacactacgatgaactgcttgctgcagaggccagagctattaagaatggcaaaggattgcatagcaagaaggaagtgcctatccaccgtgttgcagatatatctggggatacccaaaaagcaaagcagttcctgccttttcttcagcgggcaggtcgttctgaagctgtggtggaatacgtcttcagtggttctcgtctcaaactctatttgccaaaggaaacttgccttatcaccttcttgcttgcaggcattgaatgccccagaggagcccgaaacctcccaggcttggtgcaggaaggagagcccttcagcgaggaagctacacttttcaccaaggaactggtgctgcagcgagaggtggaggtggaggtggagagcatggacaaggccggcaactttatcggctggctgcacatcgacggtgccaacctgtccgtcctgctggtggagcacgcgctctccaaggtccacttcaccgccgaacgcagctcctactacaagtccctgctgtctgccgaggaggccgcaaagcagaagaaagagaaggtctgggcccactatgaggagcagcccgtggaggaggtgatgccagtgctggaggagaaggagcgatctgctagctacaagcccgtgtttgtgaccgagatcactgatgacctgcacttctacgtgcaggatgtggagaccggcacccagttggagaagctgatggagaacatgcgcaatgacattgccagtcacccccctgtagagggctcctatgccccccgcaggggagagttctgcattgccaaatttgtagatggagaatggtaccgtgcccgagtagagaaagtcgagtctcctgccaaaatacatgtcttctacattgactacggcaacagagaggtcctgccatccacccgcctgggtaccctatcacctgccttcagcactcgggtgctgccagctcaagccacggagtatgccttcgccttcatccaggtgccccaagatgatgatgcccgcacggacgccgtggacagcgtagttcgggatatccagaacactcagtgcctgctcaacgtggaacacctgagtgccggctgcccccatgtcaccctgcagtttgcagattccaagggcgatgtggggctgggcttggtgaaggaagggctggtcatggtggaggtgcgcaaggagaaacagttccagaaagtgatcacagaatacctgaatgcccaagagtcagccaagagcgccaggctgaacctgtggcgctatggagactttcgagctgatgatgcagacgaatttggctacagccgctaaggaggggatcgggtttggcccccagccccgctcacgccagtccctcttcctctgccgggagggtgttttcaactccaaaccccagagaggggttgtagattgggtccagctttgcttcagtgtgtggaaatgtctcgtggggtggcatcggggctgcggggtggggaccccaaggctttctggggcagacccttgtcctctgggatgatgggcactgctatccacagtctctgccagttggttttatttggaggtttgtgggctttttttacaaaacaaacgtcctcaaatcaggaagaaacatcaaagactatgtcctagtggagggagtaatcctaacacccaggctggccgccagctggcacctgcctctatcccagactgccctcgtcccagctctctgtccaactgttgattatgtgatttttctgatacgtccattctcaaatgccagtgtgttcacatcttcgctctggccagcccattctgtatttaaagcttttgaggcccaataaaatagtacgtgctgtctgcccaggagatcctggacatgaatagagcttgtgt

SEQ ID NO: 68125 - DNA, 633 bp, Homo Sapiens
tggtaccggtccggaattcccgggatatcgtcgacccacgcgtccggtggaagtggtcttccaaggcttttttgccgctggtgtcaggagtattttcatattccaataccgataaatctttgaggtttctgggtgtctctggggagcccctgggccagattttcctctagactccagcccatctcttcagagcagctctgcttgagttcacagatgactgccaagcttcagacaccctacagaaaaagggttgagacccagtgtggccatgccagctaattggacctcacctcagaaatcctcagccctggctccagaggatcatggcagctcctatgagtgttaaccttgatgcctgaaagaactggaaattatgaagatagattcagaagtcaaatatgttaactaactgcattgaagagtagaagaaaacaatagcctagtaggtttttactgggattagtgaaacaactgctatgttctcagcaacccactccaaagccaaagtcaaaactaaaattgtaaaatatctcaaaaacaataaaaatggtatatatatatcagaagctctggtatatagcaaaactgtactaaaaataatttagaaaaataatttatctcatgcaaatgaat

SEQ ID NO: 68126 - DNA, 1220 bp, Homo Sapiens
cgggcggtgggggcgccagcagcgcggaaggcgggcacgcgggccatggctccctgggcggaggccgagcactcggcgctgaacccgctgcgcgcggtgtggctcacgctgaccgccgccttcctgctgaccctactgctgcagctcctgccgcccggcctgctcccgggctgcgcgatcttccaggacctgatccgctatgggaaaaccaagtgtggggagccgtcgcgccccgccgcctgccgagcctttgatgtccccaagagatatttttcccacttttatatcatctcagtgctgtggaatggcttcctgctttggtgccttactcaatctctgttcctgggagcaccttttccaagctggcttcatggtttgctcagaattctcggggcggcacagttccagggaggggagctggcactgtctgcattcttagtgctagtatttctgtggctgcacagcttacgaagactcttcgagtgcctctacgtcagtgtcttctccaatgtcatgattcacgtcgtgcagtactgttttggacttgtctattatgtccttgttggcctaactgtgctgagccaagtgccaatggatggcaggaatgcctacataacagggaaaaatctattgatgcaagcacggtggttccatattcttgggatgatgatgttcatctggtcatctgcccatcagtataagtgccatgttattctcggcaatctcaggaaaaataaagcaggagtggtcattcactgtaaccacaggatcccatttggagactggtttgaatatgtttcttcccctaactacttagcagagctgatgatctacgtttccatggccgtcacctttgggttccacaacttaacttggtggctagtggtgacaaatgtcttctttaatcaggccctgtctgcctttctcagccaccaattctacaaaagcaaatttgtctcttacccgaagcataggaaagctttcctaccatttttgttttaagttaacctcagtcatgaagaatgcaaaccaggtgatggtttcaatgcctaaggacagtgaagtctggagcccaaagtacagtttcagcaaagctgtttgaaactctccattccatttctataccccacaagttttcactgaatgagcatggcagtgccactcaagaaaatgaatctccaaagtatcttcaaagaataaatactaatggcagatctgcg

SEQ ID NO: 68127 - DNA, 927 bp, Homo Sapiens
  misc_feature (59)..(77): n is a, c, g, or t
  misc_feature (79)..(340): n is a, c, g, or t
  misc_feature (472)..(481): n is a, c, g, or t
tggggagagagtatgaagtcgacggcgcgccgaattcggcacgagggcgataaggccannnnnnnnnnnnnnnnnnngnnnnnnnnnnnnnnnnnnnnnnnnnnnnnnnnnnnnnnnnnnnnnnnnnnnnnnnnnnnnnnnnnnnnnnnnnnnnnnnnnnnnnnnnnnnnnnnnnnnnnnnnnnnnnnnnnnnnnnnnnnnnnnnnnnnnnnnnnnnnnnnnnnnnnnnnnnnnnnnnnnnnnnnnnnnnnnnnnnnnnnnnnnnnnnnnnnnnnnnnnnnnnnnnnnnnnnnnnnnnnnnnnnnnnnnnnnnnnnnnnnnnnnnnnnnnnnnnnnnnnntgaaccaccatgcccagccgaaaagcttttgaggggctgacttcaatccatgtaggaaagtaaaatggaaggaaattgggtgcatttctaggacttttctaacatatgtctataatatagtgtttaggttcnnnnnnnnnncaggaatacatttggaaattcaaaacaattggcaaactttgtattaatgtgttaagtgcaggagacattggtattctgggcaccttcctaatatgctttacaatctgcactttaactgacttaagtggcattaaacatttgagagctaactatatttttataagactactatacaaactacagagtttatgatttaaggtacttaaagcttctatggttgacattgtatatataattttttaaaaaggttttctatatggggattttctatttatgtaggtaatattgttctatttgtatatattgagataatttatttaatatactttaaataaaggtgactgggaattgttactgttgtacttattctatcttccatttattatttatgtacaatttggtgtttgtattagctctactacagtaaatgactgtaaaattgtcaa

SEQ ID NO: 68128 - DNA, 1077 bp, Homo Sapiens
  misc_feature (855)..(897): n is a, c, g, or t
  misc_feature (920)..(943): n is a, c, g, or t
tggtaacatttaccagctttcacaagcagggctgtacggccggaatcccgggatatcgtcgacccacgcgtcgccaagcgtcgattgttgttaaaacttcttttgcccaaaataactcatttgtattatctgaaaatatataatttctggtcatgtgtatgttaaaatagaaaattttgaggaaaaatggaaatagggtggaaaagtactcggtaaacagtagtaaccaaatattttcactccagatttgtgttttctctggcacagagtagatcttttgggaaatatatatgaaagtggattaagtttgactacccttatgttagccacatctggatgagaacagttacaaagagtttggtctctaagttgatttgtacccagtgggtcaacttctgcaaaattccgtaatggtgtattagtattagaatagtgaataaaatgggaaagttatacatgtatacttattatcttgctcagtattttatctcacttgttctagaattttctgtaaaccctgctactgggtttgaagagttttagtcatcctttaacaatttttaaaaatttagcttctagattccatttggtaaggaaatcaatattggaagtattgctaaaatcttataatatgaaaagagatccactaatgtagcttaaggttattagatttgggcttttaatcatggaataatcttatgtattggtgtaagagttgatgaatgactttagctgtgtgaatatataatagtcaaactgcaaacattttgcatcccttttgtgacctaatttacagacatttaaattgtgttgcagttctgctttgccgtttaataaaaagctatttcagaggtnnnnnnnnnnnnnnnnnnnnnnnnnnnnnnnnnnnnnnnnnnncaaccagcgcccccaaccttttnnnnnnnnnnnnnnnnnnnnnnnnccctggtggcccgcctcgcccctcaaaaactttccaaaacctttctttgggccccgggccccatagggaaggggaccagggcctaacttttttccaagaaaatccgggcaaggaaaagggttgggctcccccac

SEQ ID NO: 68129 - DNA, 539 bp, Homo Sapiens
gctcgaggaggtttttaaggaggggcttctgaatacttgggagatacggaacggaccaaggaccacactccagggtgcattcgttgctccctggggcaccacttctggattacagtgtgccaggtcctttggaggccctaccccttccccattcattgccaccagtgagaaatgggggtgcccctgtgtaaagaaacctaccaaaggtttacatttgcaccttagcctcaatagctacgaaccctagagaagcagctagctggagctcatgtgcaactcctgattctcaggagaaagatggattttaacccaaaattatgagtgagctgttaactctaaaatgtacttgggagataggccaagcgagaggtcatgggccaactaagtgttatccagtagaaaagacagtacactgcttttcttttagtgtttgcttttcctttgctatatgttttgctatttccttgtggcttagaatgtaaaattgattgttaaaagttttgttctgaataaatatttatcttttgtattgctaaaaa

SEQ ID NO: 68130 - DNA, 1360 bp, Homo Sapiens
  misc_feature (79)..(79): n is a, c, g, or t
  misc_feature (687)..(718): n is a, c, g, or t
  misc_feature (1300)..(1319): n is a, c, g, or t
caagaattcggcacgaggattaaatcaaatcaaaatgttacaaatagtatcagtatgatataatttcttaaatatatgngacattgtcaacagctgtgattcatatgaaaaatataatcagatatctcaaattcctaattctgttttaaaaacacaaaacactagaacagttgctatgaaattactgataatgatccctttaataaactgcaattaaccactaatatagaaattcaatttaagcaagaagttttatatattatactttacagaaaaaaataattttgaaaaagtaatgacaaacagagatcaaacatttagggcattagttactgcattctctttttagaatatacattaagtaacactagtaaaatttaaagttttatgaccaggccttaaaaaacatgaatgatgatgacagaaccactatcacacataaacaaaaatagagcaaaccaagcgtgtccacatctccatgaattcagtgatttgaaataaatgttgttatgttaaacattatgagcaaatctaaaggttcaaccaaaaaacttacatatttatgagtattttttaaagttttaatagtttgtcctttctccatccttgatcagagataaactattaaaactttaaaaaatactcaaaaatatgtaagttttttggttgaacctttagatttgctcnnnnnnnnnnnnnnnnnnnnnnnnnnnnnnnntcactgaattcatggagatgtggacacgcttggtttgctctatttttgtttatgtgtgatagtggttctgtcatcatcattcatgttttttaaggcctggtcataaaactttaaattttactagtgttacttaatgtatattctaaaaagagaatgcagtaactaatgccctaaatgtttgatctctgtttgtcattactttttcaaaattatttttttctgtaaagtataatatataaaacttcttgcttaaattgaatttctatattagtggttaattgcagtttattaaagggatcattatcagtaatttcatagcaactgttctagtgttttgtgtttttaaaacagaattaggaatttgagatatctgattatatttttcatatgaatcacagctgttgacaatgtcccatatatttaagaaattatatcatactgatactatttgtaacattttgatttgatttaatctccagggacagaaataattcattggtaaagtgtaataatgcgttttttaaaaatgctttgagaggtaattacttgcatatgagagaaataaaacatttggcacattgnnnnnnnnnnnnnnnnnnnncctgagcaggcggccgcaagcttattccctttagttgaggg

SEQ ID NO: 68131 - DNA, 932 bp, Homo Sapiens
tcatgatgaaaatatatcagatattctcaaactgcgtaatttctggttttaaaaccacacaacacttagaacaagttgctaatgaaattactgataagtgatccctttaattagctgcacattagcccttaatatagaaattccaatttaagcacagaagttttatatattatactttacaggaaaaaataattttgaaaaagtaatgacaaacagagatcaaacatttaggccattagttactgcattctctttttagaatatacattaagtaacactagtaaaatttaaagttttatgaccaggccttaaaaaacatgaatgatgatgacagaaccactatcacacataaacaaaaatagagcaaaccaagcgtgtccacatctccatgaattcagtgatttgaaataaatgttgttatgttaaacatcatgagcaaatctaaaggttcaaccaaaaaacttacatatttttgagtattttttaaagttttaatagtttatctctgatcaaggatggagaaaggacaaaaaaaaatactgtcctgaattgattctcacagggcctgctccctcacagaacacagtgtcattatatatgccttatttatatataaaacaaccaaagaattttcattcttcttagtaagtatttaaaatacattctaggcgtgcattaggagtaaatgttaatttgtgatgcccttaaaagactttcaacctgtaagaaacaatttctgggaatataaaaatattgaattttacatatttcagagtcttgagaaacttaaagtgcagtattttcatgtatcagcaaataataattgtgtcatataagctcatcttgaaagaggatgtaaatacttccaaatttttatgaatgcccggccgtaatggccgaattcccgggcatatgtccggtaccgtcgactg

SEQ ID NO: 68132 - DNA, 526 bp, Homo Sapiens
  misc_feature (42)..(50): n is a, c, g, or t
agttttaatagtttatctctgatcaaggatggagaaaggacnnnnnnnnntactgtcctgaattgattctcacagggcctgctccctcacagaacacagtgtcattatatatgccttatttatatataaaacaaccaaagaattttcattcttcttagtaagtatttaaaatacattctaggcgtgcattaggagtaaatgttaatttgtgatgcccttaaaagactttcaacctgtaagaaacaatttctgggaatataaaaatattgaattttacatatttcagagtcttgagaaacttaaagtgcagtattttcatgtatcagcaaataataattgtgtcatataagctcatcttgaaagaggatgtaaatacttccaaatttttatgaatgctacattacagagggcagagtgtagctattttaaggtttgattgtccagatttttttattagactgcaaggaggaaaaataagcaccaaagtaaaatatgctttattagggggaaaaacagagatttcatg

SEQ ID NO: 68133 - DNA, 1902 bp, Homo Sapiens
  misc_feature (1762)..(1790): n is a, c, g, or t
agaattcggcacgaggccgagccaaatgtggatttggaaaatcagtactataattccaaagcattaaaagaagatgacccaaaagcggcattaagcagtttccaaaaggttttggaacttgaaggtgaaaaaggagaatggggatttaaagcactgaaacaaatgattaagattaacttcaagttgacaaactttccagaaatgatgaatagatataagcagctattgacctatattcggagtgcagtcacaagaaattattctgaaaaatccattaattctattcttgattatatctctacttctaaacagaattctgattttttatgtcagatggatttactgcaggaattctatgaaacaacactggaagctttgaaagatgctaagaatgatagactgtggtttaagacaaacacaaagcttggaaaattatatttagaacgagaggaatatggaaagcttcaaaaaattttacgccagttacatcagtcgtgccagactgatgatggagaagatgatctgaaaaaaggtacacagttattagaaatatatgctttggaaattcaaatgtacacagcacagaaaaataacaaaaaacttaaagcactctatgaacagtcacttcacatcaagtctgccatccctcatccactgattatgggagttatcagagaatgtggtggtaaaatgcacttgagggaaggtgaatttgaaaaggcacacactgattattttgaagccttcaagaattatgatgaatctggaagtccaagacgaaccacttgcttaaaatatttggtcttagcaaatatgcttatgaaatcgggaataaatccatttgactcacaggaggccaagccgtacaaaaatgatccagaaattatagcaatgacgaatttagtaagtgcctatcagaataatgacatcactgaatttgaaaagattctaaaaacaaatcacagcaacatcatggatgatcctttcataagagaacacattgaagagcttttgcgaaacatcagaacacaagtgcttataaaattaattaagccttacacaagaatacatattccttttatttctaaggagttaaacatagatgtagctgatgtggagagcttgctggtgcagtgcatattggataacactattcatggccgaattgatcaagtcaaccaactccttgaactggatcatcagaagaggggtggtgcacgatatactgcactagataaatggaccaaccaactaaattctctcaaccaggctgtagtcagtaaactggcttaacagagaacaagcttttacagacgtccttaaggcaacagtgcagagatgtaatccttaaaagaactgggaatggcaaaactactgtcggttgatgtgtcctgaaaattattggagttatggcagaagtgcttttttgatcaactggtttgtgttttgctgctgcatttatcccaagaaaaacagctttaatctccagaagaaaaccaaaataccatgggatttatgctgtattgacatcttgccctaaacgtacaacatcatagtaatttgtcatgggcaacatgaccagagagaagatttttgtcatgattttaaatacactgacacgctactgttggttaaatttaaacatgttttacctgcagaaattctctcacaaataacctgcaataacttgaaatgcatacccttttgaacacttccttttctcatgtataaattaaaatgtttgctgcattttgcaaaatgnnnnnnnnnnnnnnnnnnnnnnnnnnnnntctgtacctgcagtgtagtaaaggtttagacgaaaccccataattatagtggcatactgtcacttaggtttcaagcagcaaaataaacagtgcagctcagaaattgtaaaaa

SEQ ID NO: 68134 - DNA, 1108 bp, Homo Sapiens
  misc_feature (513)..(523): n is a, c, g, or t
  misc_feature (592)..(626): n is a, c, g, or t
  misc_feature (829)..(829): n is a, c, g, or t
  misc_feature (832)..(832): n is a, c, g, or t
ccctcccccatacaaaatccacaacaaagcgcagtggtctcttgtgaatgactgacacagatcagcctcttacacttgacttctgctcatcaagtgccaattcaatggagcaggaggaggggatatcatatatttaggggaaagacttaagcctttgagctctccagcttggaccacacattgcccttttctcagggaaggaaatggaaacaaaaagccaacagggcaggggttttgtaagtggaactctggattgactggtcagttgctacaatcagaatatgctttcttggaccatgtttgagactcagaagaatgggcctttctgccataattcttcactagtcaagaatgccagcagtttctttgtataaagagacctgcctttaaaatcatacattctgaacattttagtcaagctacaacaggtttggaaaacctctgtgggggaggggcgagtataaagttttcctcttttttaactgttccctttgcccttcaaactgcagatannnnnnnnnnnaagtggggacttctccctacttgattaaagattgagtggaattctagatgtggtcatttgtgtcataannnnnnnnnnnnnnnnnnnnnnnnnnnnnnnnnnncctcccctgagtgtatgcttagttgttgagtatatatatttgggaccattaaaactttttttgatgtaatataacctaacgttgtgctggtacctgttttaccaatgtgtaaattttggttctacatcacagttcttaatttgtttagagttttatgaaagatggtatagtttttattgacaaaagcaaagcaaatcttaccntcncaactatggccataccaaaagcaatactatttggtgactaaatattttatattaaaatttaccatcagcaactgtcttgagaattcagggaaatagaatggaatttaaaacttcaacagtttggttaaatctagaaacatgaaattagtattccaaagagattctgaaatttcttttcttggggaaatgacggtacattaaatcaaaattgaggatggatgatttaaaaacatttgacttttgaataataaaaagaaaagtgaagagtaagagaaa

SEQ ID NO: 68135 - DNA, 1413 bp, Homo Sapiens
  misc_feature (583)..(612): n is a, c, g, or t
  misc_feature (1228)..(1238): n is a, c, g, or t
  misc_feature (1308)..(1342): n is a, c, g, or t
aaaatcattaactgctcatgtaattgaaaattactggaaagcactggaagatgtagattatgtacagacatttaaaggattaaaactgagatttgaacaacaaagagaaaggcaagataatcccaaacttgacagtatgcgttccattttgaggaatcacagatatcgaagagatgccagaacactagaagatgaagaagagatgtggtttaacacagatgaagatgacatggaagatggagaagctgtagtgtctccatctgacaaaactaaaaatgatgatgatattatggatccaataagtaaattcatggaaaggaagaaattaaaagaaagtgaggaaaaggaagtgcttctgaaaacaaacctttctggacggcagagcccaagtttcaagctttccctgtccagtggaacgaagactaacctcaccagccagtcatctacaacaaatctgcctggttctccgggatcacctggatccccaggatctccaggctctcctggatccgtacctaaaaatacatctcagacggcagctattactacaaagggaggcctcgtgggtctggtagattatccnnnnnnnnnnnnnnnnnnnnnnnnnnnnnnagataaggaagatacgttaccattgtcaaagaaagcaaaatttgattcataataatggcaacggcctaggatcagtacctgttgaaaaaaactggttctccacccctcccccatacaaaatccacaaaaaagcgcagtggtctcttgtgaatgactgacacagatcagcctcttacacttgacttctgctcatcaagtgccaattcaatggagcaggaggaggggatatcatatatttaggggaaagacttaagcctttgagctctccagcttggaccacacattgcccttttctcagggaaggaaatggaaacaaaaagccaacagggcaggggttttgtaagtggaactctggattgactggtcagttgctacaatcagaatatgctttcttggaccatgtttgagactcagaagaatgggcctttctgccataattcttcactagtcaagaatgccagcagtttctttgtataaagagacctgcctttaaaatcatacattctgaacattttagtcaagctacaacaggtttggaaaacctctgtgggggaggggcgagtataaagttttcctcttttttaactgttccctttgcccttcaaactgcagatannnnnnnnnnnaagtggggacttctccctacttgattaaagattgagtggaattctagatgtgggtcatttgtgtcataannnnnnnnnnnnnnnnnnnnnnnnnnnnnnnnnnncctcccctgagtgtatgcttagttgttgagtatatatatttgggaccattaaaatttttttgatgtaatat

SEQ ID NO: 68136 - DNA, 518 bp, Homo Sapiens
  misc_feature (22)..(23): n is a, c, g, or t
gagtaagagcatgcttaccgtnntgatgcttttagccactgctcattagatgactccagcaccaacttacttcctaaaaaccacctcaagtccaacatggatgttttattattaacagcatctcaaaccaaatactgactactctgagccccaaaccagaacactgcacccagctggccctagagttttgatagagatggagggtttactgggaattagggcgcttccagggaaatgactggagttgaggtaaactggaaccagatcattaagggcgatgaatcctgggccaggctgtgcagacatttctcatatgcagtgggcagctactgcagactttgagctggggagaaggggctgtgtgagtagagcgttaacttgggagaagtcctttgcagctgtctgtgcaggctagattcatacaggcacaggaaatgagagaggtcagttgaacaagagttaatgaaggcctgagttagaattgtggcagtcagataacaaaggaataaatgtgatag

SEQ ID NO: 68137 - DNA, 352 bp, Homo Sapiens
taaacaaagtgtgccaagagctcaaaaggaccatacctgttggacgggattacaggcccttggacccatcctcatgaaaaagatcagtgtacaaacatttgcctcctgggctctgcatgactgtgcatttcagtagaatcacctggaggtctgttaacagtgattttgtaaaaagcccttaaatgatggtcatcttctgttcaggtggctccacacgctgaggtcccacgtgcctgaaggtctggcccctccggttacatggctgtgcacctcctgggggcactcggggctgcgtttgctttcttcctgatattttctgttaaaaacaagaatcttacttcctcgggtgcct

SEQ ID NO: 68138 - DNA, 1137 bp, Homo Sapiens
  misc_feature (76)..(110): n is a, c, g, or t
  misc_feature (678)..(678): n is a, c, g, or t
  misc_feature (682)..(682): n is a, c, g, or t
  misc_feature (684)..(686): n is a, c, g, or t
  misc_feature (688)..(688): n is a, c, g, or t
  misc_feature (691)..(691): n is a, c, g, or t
  misc_feature (698)..(698): n is a, c, g, or t
  misc_feature (700)..(700): n is a, c, g, or t
  misc_feature (716)..(716): n is a, c, g, or t
  misc_feature (734)..(742): n is a, c, g, or t
  misc_feature (780)..(780): n is a, c, g, or t
  misc_feature (817)..(817): n is a, c, g, or t
agatgttgatatatggggctacgtcgccttagcgaacgacgagcgcagcgaagtcagtgagcgaggaagcggccgnnnnnnnnnnnnnnnnnnnnnnnnnnnnnnnnnnncagtcgacggtaccggacatatgcccgggaattcggccattacggccggggacttataaatccacaactacaaggaacagctagtaatcaaacagtgatgaccacaataagtaatggcagggaccctcggagagcctttaaaagatgacctatgctaaatactcatgtgtagtttttatactacatgccctacttgaacacttattgcacttttatttattgttaactgtgaaaagtacgtcctttattgggtttccttttatattcttggtttgttaagaagaatggtttgtttttatagcaaaactgttaagctgctcgagtctcctgttgaagaatgggaacactgaaaagtaggggcatttatttatagagtaaaaagattattggatagcctttaaaaaacctgcacccatttcatgggtgagttacttaagacatcagctttatagcctctatgagtctatcttctgtataagttttgtaatatttaacataacgcttaatgggagatgttcttctggtctgtattcagatattgcccaactaagcaatacccatcaaaagncccngnnnanggntggaaancncaaccataaaaaaacncccggggggaaaccggtnnnnnnnnnaacaaagcccaagggaaaccttgaagacactactgggnttgaatccccgggaaccccaggggagctggatattgnaataagccgctccctgggaaaacctgggcgggagcgttggggtttgcttaaagccttttaacaaaatggcaagggggtcacaacgggtctgtaaaaaccttgaaccggccgaggtattagccccccttgggaccctggcggagggaatatctgggcaagttgaaaaacagaagacaccccccggccgccgacaatttggccaggtaataattacaaagtcgggtgaaacccttctcccgagaatggggggcgaccacaaaaagctatttttgacaaacaacttttttaggggcacctcggcccgttttgtaccccataaa

SEQ ID NO: 68139 - DNA, 595 bp, Homo Sapiens
agctcttcagaggagctggaactgtctaccccagggacacacccatttcgttgctacccaaagtggaatctgagacaggcaccatctccttgttccccctctctcttttgcctcccactgactgcccttttccatgtgtcttcattctgcctgaagaaggctttcccaggatgcacgtcctcagagggagcagcctatctcccccaagctggaggcggcagaggactgggccaagccccaacctgcctcccagccaggctcctccaggcctctggtttagcggagccccctgagcccaggcctgtgtctagccccagtggctcactgaactttcagggcagtcagggggtcctgcttagaagccagtcaccagccctctgcctgcagccatggaagggggtgtgcacgtgcctctgtgtgtgtggctgagtgtattctgcgcgtgtgtgtggagggagggagggaggggagcatggtgtctcccgctccaccgccctttgttgagccccatcagctgcccccttttactttgcattgaacggcctgtccaaagatcctctctctagggcagcagagagctttttgcactttaaaa

SEQ ID NO: 68140 - DNA, 674 bp, Homo Sapiens
tacgtagaatgtgggataaacttgatgaactccaagttcacagtgtcatttcttcagaactccccttcattgaatagtgatcatttattaaatgataaattgcactcgctgaaagagcacgtcatgaagcaccatggaatcaaagagaaagatataaattcgttcccacagccttcaagctgcagtgttttagattgcttcaaaaaatgaaaaagttttgcctttttctgtatatagtgaccttctttgcatattaaaatgtttaccacaatgtcccatttctagttaagtcttcgcacttgaaagctaacattatgaatattatgtgttggaggaggggaaggattttcttcattctgtgtattttccttacatgtacagtagacgttctctattctatcagccttctatggtacctttttgtcaggacaattaggattgtaatgctaatgcaaaggcagcaattcaaagatcttctagtgcctcatgaataaagttgagatttaaaatttgtaacattgatggaacagctgggaggttagaccaatcattaaggaatgtatgccatagctttctttgctaccataaacattttggaggtgcatctgctatgtgacatggtaaatatggttaagtgaatgaataaaatgttttagtaacctgtgtgtgatgaa

SEQ ID NO: 68141 - DNA, 1324 bp, Homo Sapiens
  misc_feature (96)..(96): n is a, c, g, or t
  misc_feature (124)..(509): n is a, c, g, or t
  misc_feature (545)..(563): n is a, c, g, or t
ggggacgctgatctttgtctgcggttcccacttgattagctgatttgtgtctgtcaggggcggactatgaaaacgccgcacgcgcctttacgttcntgcctttgctgcctttgctcacatgtcnnnnnnnnnnnnnnnnnnnnnnnnnnnnnnnnnnnnnnnnnnnnnnnnnnnnnnnnnnnnnnnnnnnnnnnnnnnnnnnnnnnnnnnnnnnnnnnnnnnnnnnnnnnnnnnnnnnnnnnnnnnnnnnnnnnnnnnnnnnnnnnnnnnnnnnnnnnnnnnnnnnnnnnnnnnnnnnnnnnnnnnnnnnnnnnnnnnnnnnnnnnnnnnnnnnnnnnnnnnnnnnnnnnnnnnnnnnnnnnnnnnnnnnnnnnnnnnnnnnnnnnnnnnnnnnnnnnnnnnnnnnnnnnnnnnnnnnnnnnnnnnnnnnnnnnnnnnnnnnnnnnnnnnnnnnnnnnnnnnnnnnnnnnnnnnnnnnnnnnnnnnnnnnnnnnnnnnnnnnnnnnnnnaagaattcggcacgagggcggccgcggctgtaggcnnnnnnnnnnnnnnnnnnnaaagatgttaataaactttatacctttctggagactttgttctaaaatgtacataaatgctcatctagttaacatatttacttagaatgtgggaggaggagtcacattattatccctgaatctcaagtacagcagaagtgaattcctgggatagtaggatagactaacatgtaaaaaggccaggtgatgcataggttctcatttcactgccctcagccttcctctccttctgagctgtgccttctcacatgttcagtcaactccagggaatattgtctccatcttctggatagaactagttgcaggatccgttacaagaattcagagttttggcatctcccctttgtatgttgtaggagaaggtttggcattgaaaatgtgctgttgttccaaagaaaaattagcaaaggacttgagatttagaaaagtctcctttgtaatgtgcatcattaccagttatctaaagaaaaacatgtaaaagccaacaaaacccttgaaaatattttgcatatggatgtctgtttcacgtttcaactgaagatgtatagagcacctctgatgatgaggaagataccatgctaggcagtactttcaagaacgtgagttcttatttctgcaggccttttgtgcccccttttaaatgttagcatttattaggtacaaactagtggggaaggtttttttaaaaagttttgcagtcttgtaatttacctttttaaaaaatttattttatttttctgggtgacagagcaagactttct

SEQ ID NO: 68142 - DNA, 1311 bp, Homo Sapiens
aggctaggtacgaggcctgggctgtagaattcggcacgaggtatagagaggaacaaagagcttataaatacattaggacctggaattcggttgtccagccacaaaggtgacagcatttaacaaagcttagagaaacctccaggagactgctaccatggcagagaagcccaagctccactactccaatatacggggcagaatggagtccacccggtggctcctggctgcagctggagtagagtttgaagagaaatttataaaatctgcagaagatttggacaagttaagaaatgatggatatttgatgttccagcaagtgccaatggttgagattgatgggatgaagctggtgcagaccagagccattctcaactacattgccagcaaatacaacctctatgggaaagacataaaggagagagccctgattgatatgtatatagaaggtatagcagatttgggtgaaatgatcctccttctgcccgtatgtccacctgaggaaaaagatgccaagcttgccttgatcaaagagaaaataaaaaatcgctacttccctgcctttgaaaaagtcttaaagagccatggacaagactaccttgttggcaacaagctgagccgggctgacattcatctggtggaacttctctactacgtcgaggagcttgactccagtcttatctccagcttccctctgctgaaggccctgaaaaccagaatcagcaacctgcccacagtgaagaagtttctacagcctggcagcccaaggaagcctcccatggatgagaaatctttagaagaagcaaggaagattttcaggttttaataacgcagtcatggaggccaagaacttgcaataccaatgttctaaagttttgcaacaataaagtactttacctaagtgttgattgtgcctgttgtgaagctaatgaactctttcaaattatatgctaattaaataatacaactcctattcacccacttagttaaaattgatttcttctcattaggatctgatgtgaattcagttttccaatctcctcctagccaacaattttcttggaattacaaattcagtaaaaatggaaactataaattatgtggtttgtttgacttttccaagaattgccctgtaacatacaatttgtcatacaatctattaaaatgccaatgtaaaaatgcacctctgacattttcaggtatgcacaggagaagagttaccatcctggataatggcataaaggcattttcttcttttcctgaacagtcattttatttctgataaaagcattctttctaatgcatttgcaaaac

SEQ ID NO: 68143 - DNA, 467 bp, Homo Sapiens
gtggtctcccggctgggctgggctgcggagtgtgcacctcacaggaagcgtcgggactgatgtgctggagcgctttagttgttttcaaatctagcatacgggttttcttctttaaacaggcctgaaacaaaataaacttgaatcataacttcattcattcaaccagaaacaaaatcttagaaagccatacaaaccaagctttataagaagatttactgaggctatagcaacaacgggcgttgtaagcaggctctcatacagtgcttaaccttttttgaagtcaaaccactttaaactttaaaactgaaataaaatttactagaaacaagaactctaacagatcctaagagataagcacttacttcctgatgctcggcgaagaaaagaaatttaaggcaagtatttctttccacagtggttggctagttccacagtggatggctactattaaacaaaaaaaccttaaa

SEQ ID NO: 68144 - DNA, 2655 bp, Homo Sapiens
cagtcgacggtaccggacatatgcccgggaattcggccattacggccgggggaccgcttgtgctggagtcggagttgtaacgctccactgactgatagagcgaccggccgaccatggcgcccggagtggcccgcgggccgacgccgtactggaggttgcgcctcggtggcgccgcgctgctcctgctgctcatcccggtggccgccgcgcaggagcctcccggagctgcttgttctcagaacacaaacaaaacctgtgaagagtgcctgaagaacgtctcctgtctttggtgcaacactaacaaggcttgtctggactacccagttacaagcgtcttgccaccggcttccctttgtaaattgagctctgcacgctggggagtttgttgggtgaactttgaggcgctgatcatcaccatgtcggtagtcgggggaaccctcctcctgggcattgccatctgctgctgctgctgctgcaggaggaagaggagccggaagccggacaggagtgaggagaaggccatgcgtgagcgggaggagaggcggatacggcaggaggaacggagagcagagatgaagacaagacatgatgaaatcagaaaaaaatatggcctgtttaaagaagaaaacccgtatgctagatttgaaaacaactaaagcgctccagcacatcagtcccgacgcttcctgtgaggtgcacgctccgcagcccagcccagccgggagaccacgtggccattgcggtctcctgaccttggccagtgaacctgccagccttccaggacaggcggccggagagctgcccctgaaggacagtcctctcgtcttgcagactggtgaccttctattccctgttcatctctgtttctagatttagtcacttgaaataagaaatctttggggtttgggcttttttatactcttctcagtttgtgaaacgctaactgcacacgaagccgcctgacggcacccagcgctgtggctgtcattctcccagggcagaaccctgcgtttctctctgtccactaacaagcttcacacgcaacacagggaagtcggtttgacttttgtcatgaggagaactgaccagccctcatcattccccataaaaccacggacagcgtctgtgtgcgcatcttgagtcttcacacctgttgactcacacggcttttgctgatgacacggggctccagtacacagtctgataaggacttaacgtcctaacctcaattgtattaaatagcattggggaatagctaaacctttttaaaaaaatttattggattttcctccctgcttaaaagatttcaccagaaaaccttcatataaaaattcaggccctttttggacaatttttaaaatttgtatctttactagaacatgagaatctttttcccttggaagcttgaattataaatgtggtgtttggcctgcctcagcagcaccagttgactgctcgtgtgccagcggtgtggggaggacggggcaggacgctgcagctctctccagccctgttggcatcctcagtgcctgcaggcctctcgctgcctgttgggctgtctggggggtggccatttagggatcgtggggacggggtccaccccaagaagaaagaaaggcccgtccacaggcccggctctgggccacgtgccccggaagcaggtgtgtccagagtcagctgagggctctccccacaccacccagcaggcgctggtgctccttctgcctcatgggaccagtccagcttccagccgctctggctcgagggtggtctgagcacttccttctgagtgggcttctctgggagctctccagtggcactgctggacctgcccacgtttctgtaaaatcaggatacgtggctttagtaagcagaccaagcgcttcgtggcagggaaagcagcgtgcggggaagtcactgaaaagtgctgcctaaggaagtttggaaatagtccccgttccagattgccttgaattttaaaacattttgctttgggaaagtaggtcagcagcacctaagatcaaggatgcgttccattttcacacttcacagtcatgaaaactgagaagactgtcttcagcgtgaactaaagttcacaggcagatcactgatccagaacacttcaagaactcgtcaaacagctcgataagcctttttgactgtgtacatctgtaccgggaataacattcctaggctgaaatttccacaaagaatagaacctgtacccagttcttcaggctgatttccctgacctcttgggcatttgtatttgtagtaaagtattgcagagattcctaagtattttatagcagccatcaaaattggactttgtattgtttattcataaaagacacttggtaatagacttcagtgaactctgtatgaatgcagtagtgtgcgtgcaaaatccgcttcctgagcgtagggtgctgagctggcgctagggctcggttgtgaaatacagcgtagtcagcccttgcgctcagtgtagaaacccacgtctgtaaggtcggtcttcgtccatctgcttttttctgaaatacactaagagcagccacaaaactgtaacctcaaggaaaccataaagcttggagtgccttaatttttaaccagtttccaataaaacggtttactacctgcgtgtgtttagtaaaa

SEQ ID NO: 68145 - DNA, 1241 bp, Homo Sapiens
  misc_feature (1125)..(1125): n is a, c, g, or t
gctcggtacccagagataggatcgcggggacggccaccaccccaagaagaaagaaaggcccgtccacaggcccggctctgggccacgtgccccggaagcaggtgtgtccagagtcagctgagggctctccccacaccacccagcaggcgctggtgctccttctgcctcatgggaccagtccagcttccagccgctctggctcgagggtggtctgagcacttccttctgagtgggcttctctgggagctctccagtggcactgctggacctgcccacgtttctgtaaaatcaggatacgtggctttagtaagcagaccaagcgcttcgtggcagggaaagcagcgtgcggagaagtcactgaaaagtgctgcctaaggaagtttggaaatagtccccgttccagattgccttgaattttaaaacattttgctttgggaaagtaggtcagcagcacctaagatcaaggatgcgttccattttcacacttcacagtcatgaaaactgagaagactgtcttcagcgtgaactaaagttcacaggcagatcactgatccagaacacttcaagaactcgtcaaacagctcgataagcctttttgactgtgtacatctgtaccgggaataacattcctaggctgaaatttccacaaagaatagaacctgtacccagttcttcaggctgatttccctgacctcttgggcatttgtatttgtagtaaagtattgcagagattcctaagtattttatagcagccatcaaaattggactttgtattgttattcataaaacacacttggtaaaaacacttcagtgcaactcggtatgaaatgccatagacgcggcgcgggaacaaaccattttccggagctaatcgcctggtcaagcatgggcgatctcgcgatcagaatgcggatccaacccagcagaaactttaaggctcgcctttccgggctgcaaaccaaccaactctccctaaggccgatatatcatcaacggaccatccggttccgatagatcaatcctccacagcgcacggagctcacttgcgtacacggaccgaccgcacaaaactataccttcgtatccccatccgcacgccagccgatcctaccatcctacaacgtncccggctactacccgccgtattcactgcgcgcccattactataccttttctcttgcgacttgccccgcaccgcagactagatagcaccatccgtaggtgccctaagagaacaagct

SEQ ID NO: 68146 - DNA, 1116 bp, Homo Sapiens
  misc_feature (25)..(25): n is a, c, g, or t
  misc_feature (70)..(70): n is a, c, g, or t
  misc_feature (147)..(147): n is a, c, g, or t
  misc_feature (220)..(220): n is a, c, g, or t
  misc_feature (886)..(906): n is a, c, g, or t
  misc_feature (1047)..(1074): n is a, c, g, or t
agtgtgctgagacatcgtggacacngggagagagacccgctgagagagatgagactgagcaagtcgaganaaggacgagtgaagattccgaacaaagtgatctacctcagtcatgtcagaggcgatattcttgagagctagagcgcnagagaggacatcaaaacctgaagacaagtgcgtcctaaagacagacatgagagagcaataccgacagcccacntgaagtggagtgaagacctccgggagtgctggacggggaagattgacgacctgcatgacttccgccgaggctctccaagctgggcaccgataactagggctggccgaggcccaggccccgcccgtgagtcccaagcgtgtgtgcgagaccagatagctctaggacgttcttctgtgtgcattgcttctgtaaatgcaggcgcagtttgtcgtgtttccaaaccagttgtgccgtccactcactccttttcagaatagaaatctcctctcgcttctctggccttgtgaggttgtggacaactggaagattctgactcaggaatccagaactaggtctaccttcaacatttatgcagtcagggcagggatgtttatatctttcataagggctgttgcaaccatatgaactgaaaaaacacgcattttgtaatccaaatattgatattctttacaccaagccatcaggctccttttatcaaatagcattcagagtatttgaatgtccaccagacaccagccccggggggcacagagagaacaacattcctctctgtcaacatcgagaggctttaaaacaactgtttagtggaaactttctgagagatggaaaacaagcttctggtgggtgcattttctggcccggagttgcctgcatccacgctactgnnnnnnnnnnnnnnnnnnnnnagtttgtacggttgcaacagtgttccttttcttggttttaatttctgagcagatgattgtgctgtgggaacagcacacagtgagggtgcctagcacaatgtctggcacaaagtaggtgcttaataaatatttgttcaattnnnnnnnnnnnnnnnnnnnnnnnnnnnngcctacagccgcggccgcaagcttattccctttagttgaggg

SEQ ID NO: 68147 - DNA, 397 bp, Homo Sapiens
  misc_feature (92)..(109): n is a, c, g, or t
ggttcaatggggtaaaaattttaattaaaatatctcaatatatttaaaataacaaaggatacatttaagccaaattttcttaacccagagannnnnnnnnnnnnnnnnngtaacatttgcttacacagtaaggtgctaatagaagttagcccttaagccctggaaatcttaggaatcatagtcacacagcaaatataatttcattgtgaaagtgaactttggtagaagaaaaatctataggacacctgaggtagtagaaactggaataaacagtagtagacgttatttacaacttgagtaccaaataacattaagaacacaaaaataattacacgatacaatttccagtccagctttgatccaaagaaaataagaatattacatcacatttgcattg

SEQ ID NO: 68148 - DNA, 834 bp, Homo Sapiens
cttttgcttctttctgtctttccttctcttttgtctggagaaatcacttagactctgtgtgcctcttctacattgcattctgctctgctatgttacctgctaggctggcttctttggactccctatatgattgatgatgtgaaaacctaaattacttgcagcatagtattacttctttgatgttctcattagcataatgttatttttgaaaaggaaagatactatcacataagttttcctcatctgttgtgatatacaccaatggataaactaacggaaactgctttttgacattaaaagacaggagaaattatatttaactaagtaaaagttaagtcagaattacttgggtgatgtgattcaatttagttaaaggatgatatagagaaaatacattatttagcattatttcttcagctataatgaattgctatagaaatcaggcagatctttctaatgtgtattgattggtcttttcagctactctgaacagattactaaggccatctcctcatctctaagggagaaaaatagtctgtagatgaataatgtaaggtaaagagttgcatgtcagtctttgtaattatttacactttaactttctccagaactcagacatgatttcaacatggtgttagatttgtgcattttattttcctgaccacctcattccagccaatgtatggttatccactctgtgtgccaaaaccaatcatgcctttcacggccctttagttcagagaagttctgcactgatttttagtctcttgatgtctcaatcttacatgtataccaatcacaatggaataaagtgttgagttgtactgtgaaaaa

SEQ ID NO: 68149 - DNA, 763 bp, Homo Sapiens
  misc_feature (59)..(59): n is a, c, g, or t
ggacgtgcgggccagtacggcccccgaaagtaggaagcggaggggagcaggttgcgggnccaagtgttgcggcgacgcacctcacgtcgagaatcgggaggaggagactgcaaggataggcccaggagtaatggagtccaaagaggaacgagcgttaaacaatctcatcgtggaaaatgtcaaccaggaaaatgatgaaaaagatgaaaaggagcaagttgctaataaaggggagcccttggccctacctttgaatgttagtgaatactgtgtgcctagaggaaaccgtaggcggttccgcgttaggcagcccatcctgcagtatagatgggacataatgcataggcttggagagccacaggcaaggatgagagaggagaatatggaaaggattggggaggaggtgagacagctgatggaaaagctgagggaaaagcagttgagtcatagtctgcgggcagtcagcactgatccccctcaccatgaccatcacgatgagttttgccttatgccctgaatcctgatggtttccctgaagttaatagggagacccctgcttcctaaacttacacatttgtggtgtacctttgtcgtaaacgttttgatgttacctatttcttgtgggtctcctattaccagcttctaaatgaatgttgtttttgacccagtttgtaagtttctgtcagcaggagagttttacctattgcatggaaagatgctcattatatattgtgaagttaataaaacagttttaaaaagcaaa

SEQ ID NO: 68150 - DNA, 802 bp, Homo Sapiens
gggactcgtgtctcgctaccagctccccgctgccctgcgctcggcgcgctggcatccggcccgggggaaagcggaccagcccttctgcaggtctgcggggccaagtgtcccggcggcgcacctcgtggcgagaatcgggagaaggaggagactacaaggataggcccaggagtaatggagtccaaagagaaacgagcagtaaacagtctcagcatggaaaatgccaaccaagaaaatgaagaaaaggagcaagttgctaataaaggggagcccttggccctccctttggatgctggtgaatactgtgtgcctagaggaaatcgtaggcggttccgcgttaggcagcccatcctgcagtatagatgggatatgatgcataggcttggagaaccacaggcaaggatgagagaagagaatatggaaaggattggggaggaggtgagacagctgatggaaaagctgagggaaaagcagttgagtcatagtctgcgggcagtcagcactgacccccctcaccatgaccatcatgatgagttttgccttatgccctgaatcctgatggtttccctaaagttattacggaaacagacccctgctttcgaatttacatgttcatgatgtgcccttgttgtaaacctttacctgtcacttgtttacgtgggtctcctattaccagcttctaattgaatattgtgtttttgaaccagtctgtaagatttttgttagcagaagaattttacctattgcatggaaagatgctcattatagtgaagttaataaagcacctttaaaaagcaaaaaa

SEQ ID NO: 68151 - DNA, 765 bp, Homo Sapiens
ggggtcttacctcgttgtggcgtcagaaccgccgtcgctcgctcccttctcggcagtggtacctgttcccggtgtccctgaggacgtgcgggccaggtacggccccgaaagtaggaagcggagggggagcaggtttgcggggccaagtgttgcggcgacgcacctcacgtcgagaatcgggaggaggagactgcaaggataggcccaggagtaatggagtccaaagaggaacgagcgttaaacaatctcatcgtggaaaatgtcaaccaggaaaatgatgaaaaagatgaaaaggagcaagttgctaataaaggggagcccttggccctacctttgaatgttagtgaatactgtgtgcctagaggaaaccgtaggcggttccgcgttaggcagcccatcctgcagtatagatgggacataatgcataggcttggagagccacaggcaaggatgagagaggagaatatggacaaggattggggaggaggtgagacagctgatggaaaagctgaagggaaaagcagttgagtcatagtctgcgggcagtcagcactgatccccctcaccatgaccatcaccatgagtttttgccttatgccctgaatcctgatggtttccctgaagttaatagggagacccctgcttcctaaactttacactttggtggtggaccctttgtccgcaaacgtttttgatggtacctattttcttggggggcctccctattaccacccttctaaatggaatgtttgttttttgaccccc

SEQ ID NO: 68152 - DNA, 871 bp, Homo Sapiens
tcccgggatctgagtcttacctcgttgtggcgtcagaaccgccgtcgctcgctcccttctcggcagtggtacctgttcccggtgtccctgaggacgtgcgggccaggtacggccccgaaagtaggaagcggagggggagcaggtaagggacccggagggggtccctggggttggtgtgggggagcagccccggcctgcggatgccccatccccgggcagcagcgcggagacgcagccggtccacgatgcagccccggggccccgccgcgggaccgcgagccttgtgtgagcggaggggtgcccggccccgcgggagccggcgatcctgaggctacgacctttcggaagcacctgcctccgtcaccagcgcaagcttttccaacacccctgctccgcccttcttgatgcagaaaatggtggtcagcttggggggctgggcggctgaggcgggggtggcgagagcggctaggagggcccgggcccggcgtggggaaggggccgggtggcggcaggacctctctagcgtccgctgcagcagcccactcttcccacccggcgtctgcaggtttgcggggccaagtgttgccggcgacgcacctcacgtcgagaatcgggaggaggagactgcaaggataaggcccaggtcagtgcgagggacggtggtggcgagcggggtcagaacatgaggaaagccccagtctgagaccccaattccgtgccttccaccccggagcgcttagcagtccccgagaccgcaccctttttcgtcttccagttgggtgctgcaaaaggactggaacatgggatcttgcagagaagatggtggggcatttgcgggagaagaagggcacagatggctccctggcccccc

SEQ ID NO: 68153 - DNA, 1390 bp, Homo Sapiens
agccccggactctatacgtaggtaacctttccagagatgtgacagaagtccttatacttcagttgttcagtcagattggaccctgtaaaagctgtaaaatgataacagagcatacaagcaatgacccatattgctttgtggaattttatgaacacagagatgcagctgctgcattagctgctatgaatgggagaaaaattttgggaaaggaggtcaaagtaaactgggcaaccacaccaagtagccagaaaaaagatacttccaatcacttccatgtgtttgttggggatttgagtccagaaattacaacagaagatatcaaatcagcatttgccccctttggtaaaatatcggatgcccgggtagttaaagacatggcaactggaaaatccaaaggctatggttttgtatctttttataacaaactggatgcagaaaatgcgattgtgcatatgggcggtcagtggttgggtggtcgtcaaatccgaaccaattgggccactcgtaaaccacctgcacctaaaagtacacaagaaaacaacactaagcagttgagatttgaagatgtagtaaaccagtcaagtccaaaaaattgtactgtgtactgtggaggaattgcgtctgggttaacagatcagcttatgagacagacattctcaccatttggacaaattatggaaataagagttttcccagaaaagggctattcatttgtcagattttcaacccatgaaagtgcagcccatgccattgtttcggtgaacggtactacgattgaaggacatgtggttaaatgctattggggtaaagaatctcctgatatgactaaaaacttccaacaggttgactatagtcaatggggccaatggagccaagtgtatggaaacccacaacagtatggacagtatatggcaaatgggtggcaagtaccgccttatggagtatacgggcaaccatggaatcaacaaggatttggagtagatcaatcaccttctgctgcttggatgggtggatttggtgctcagcctccccaaggacaagctcctccccctgtaatacctcctcctaaccaagccggatatggtatggcaagttaccaaacacagtgagccgggactctaaaaaaaatttgtaattcatgataggcttcgatttcctgtgacactctgaagacatgaaagtagacatcggaaaatgaaaatatttattttaaaaattgaaatgtttggaacctttagcacagatttgctttggtgaaggacacgtgtcttctagttctgcctttttaagtttttgttcatgatggatatgaacatgatttttctttatgtacaaaaactaaaataaagtcaataaagacaattctgactacaaattttgatataatagg

SEQ ID NO: 68154 - DNA, 922 bp, Homo Sapiens
  misc_feature (71)..(84): n is a, c, g, or t
ggagatggtctcactatagcgggtctcttaagcctaggagtttgagaccagccatagtgagaccatctccnnnnnnnnnnnnnngatgacagaactgtagtgaagcattcaggtcgtgattgctgtggtgctgagaggaatccgtggtgcggtcagtggcgcggccccgcactcacacacacgagtccagctggccacgtctggtgcatctgtaggtggcgcggctgcccgggctcagtgcttctctgaggttatgagagacgccctccctgggggatgctgggcgcaggtgctcagggtatttacagcttcctgctattctgattattccaaaataaaaagttaaaggatcgagccaccgcgcctggccctctgcagttgtttaataaggcacagaatacctgtagcataggtcagccttacgatgtccatgaattacatattcagacgttttagagcctgatacattttggaaaagaaaaacaacttctacacctattctacagtccgcatttaaaacaataaattcctctattaaaaacgtaaagccgggtttgcttgcgtgccacagggaatatatccaggaaggttattatgaagctgtcaaatcaagatgatgggaataaggcagtttgaacgaacagtcttcccacagtcaggccatttttgctgatttggtttagaattttcagaaatacttagtacactccacctgttctttgatgggaatatctaagaaggctaggtaggttcttagggttagcctgagtcatctaggggctcaactccttgtgaggggaaatgacagtgaacaagttagtactttgctccacaaatgcatgaaaggacaaatttgcatcttctatcagtatttaacttccttttgctaatgacaaataaatatatctatatttttaaaaaa

SEQ ID NO: 68155 - DNA, 1732 bp, Homo Sapiens
  misc_feature (1339)..(1371): n is a, c, g, or t
gggcaatgggaaggctccatactgcagggtgcgaaggggccggcgccgctgccgagttacgagtcggcgaaagcggcgggaagttcgtactgggcagaacgcgacgggtctgcggcttaggtgaaaatgcctcgtgtaaaagcagctcaagctggaagacagagctctgcaaagagacatcttgcagaacaatttgcagttggagagataataactgacatggcaaaaaaggaatggaaagtaggattacccattggccaaggaggctttggctgtatatatcttgctgatatgaattcttcagagtcagttggcagtgatgcaccttgtgttgtaaaagtggaacccagtgacaatggacctctttttactgaattaaagttctaccaacgagctgcaaaaccagagcaaattcagaaatggattcgtacccgtaagctgaagtacctgggtgttcctaagtattgggggtctggtctacatgacaaaaatggaaaaagttacaggtttatgataatggatcgctttgggagtgaccttcagaaaatatatgaagcaaatgccaaaaggttttctcggaaaactgtcttgcagctaagcttaagaattctggatattctggaatatattcacgagcatgagtatgtgcatggagatatcaaggcctcaaatcttcttctgaactacaagaatcctgaccaggtgtacttggtagattatggccttgcttatcggtactgcccagaaggagttcataaagaatacaaagaagaccccaaaagatgtcacgatggcactattgaattcacgagcatcgatgcacacaatggtggtggccccatcaagacgtggtgatttggaaatacttggttattgcatgatccaatggcttactggccatcttccttgggaggataatttgaaagatcctaaatatgttagagattccaaaattagatacagagaaaatattgcaagtttgatggacaaatgttttcctgagaaaaacaaaccaggtgaaattgccaaatacatggaaacagtgaaattactagactacactgaaaaacctctttatgaaaatttacgtgacattcttttgcaaggactaaaagctataggaagtaaggatgatggcaaattggacctcagtgttgtggagaatggaggtttgaaagcaaaaacaataacaaagaagcgaaagaaagaaattgaagaaagcaaggaacctggtgttgaagatacggaatggtcaaacacacagacagaggaggccatacagacccgttcaagaaccagaaagagagtccagaagtaattcagatgctgtgaaccagannnnnnnnnnnnnnnnnnnnnnnnnnnnnnnnntcctcttatatttgaactgttttattttcctgtgagtcttgcgaggtggaagtaatgattaaatactcatgtgttcagaaaacataaactttttttataaaaatattttgtacaattcattaaaggctaatttatgaaatttgaaaatcttcaggttatactccttaagttatcccaaagccgtgtgtttgtgatgttttggagtacatatatatgaaaattattatgacacgcacttttctaatcattgtacatttctcagagtggataaaaatgtttgacaaagtcctcacttttaaggaaatgcaaagcttaaaataaaactctcttttgtttgatgcaaacacaaaaaacctcgtgc

SEQ ID NO: 68156 - DNA, 550 bp, Homo Sapiens
  misc_feature (321)..(382): n is a, c, g, or t
  misc_feature (491)..(491): n is a, c, g, or t
  misc_feature (502)..(502): n is a, c, g, or t
  misc_feature (528)..(528): n is a, c, g, or t
ttgtgtttgcatcaaacaaaagagagttttattttaagctttgcatttccttaaaagtgaggactttgtcaaacatttttatccactctgagaaatgtacaatgattagaaaagtgcgtgtcataataattttcatatatatgtactccaaaacatcacaaacacacggctttgggataacttaaggagtataacctgaagattttcaaatttcataaattagcctttaatgaattgtacaaaatatttttataaaaaaagtttatgttttctgaacacatgagtatttaatcattacttccacctcgcaagactcacagnnnnnnnnnnnnnnnnnnnnnnnnnnnnnnnnnnnnnnnnnnnnnnnnnnnnnnnnnnnnnntctggttcacagcatctgaattacttctggactctctttctggttcttgaacgggtctgtatggcctcctctgtctgtgtgtttgaccattccgtatcttcaacaccangttccttgctntcttcaacttctttctttcgctttgntattcgtcttgctttcaaacct

SEQ ID NO: 68157 - DNA, 1182 bp, Homo Sapiens
  misc_feature (28)..(29): n is a, c, g, or t
  misc_feature (35)..(35): n is a, c, g, or t
  misc_feature (64)..(106): n is a, c, g, or t
  misc_feature (110)..(144): n is a, c, g, or t
aagacttgaaattcacgacctccacttnnattagnggggcgacttaggcgtcctgttttctgtnnnnnnnnnnnnnnnnnnnnnnnnnnnnnnnnnnnnnnnnnnnccgnnnnnnnnnnnnnnnnnnnnnnnnnnnnnnnnnnncagtcgacggtaccggacatatgcccgggaattcggccattacggccgggggtcttaaacttcaagtgcaatgtatatgaaaaccaatctgagccttgtatctcttaaatatttattttttttaacgtgtgagatgttcgagagaaggttctccattcatttcagtgctgcctggaggaaactcggcaatgatttctttcagttgtgaagttcctttcgtgttacaccctccactgaaccctcaaccttcgaaatactccagttttgtgggtttggtcatttttacttataaatttacctttttgtattttgcaatttacatgtgtttggtttgttttaaattctgtgaaagtggcttgattaaaagactccttttaaatggaagccaccagtcagcagaatggaagcttagaggaacttgcctgtgagcgctggtctttgtgtttggttttgtgatgtaacgatctttgctggggttttttgctttgttttgagggaaatgtcttggagtaaattttaagttcctggagttaatttgttttacaggaattttgttttttaaaaaaataggatcattctgaactttggaatgacccccttatatattttctgaaaatgaaaacagttacatgaaaaaaatttccaatgaagatgtcagcattttatgaaaaaccagaagttattagatgaaagcagcgagtgaatctttaaaacagacttgatcacgcacacacaataagtctttctctccgaaaccggaagtaaatctatatctgttagaaataatgtagccaaaagaatgtaaatttgaggatttttttgccaatagtttatagaaaatatatgaaccaaagtgatttgagtttgtaaaaatgtaaaatagtatgaacaaaatttgcactctaccagatttgaacatctagtgaggttcacattcatactaagttttcaacattgtgttctttttgcattcattttttacttttattaaaggttccacacccaaaaacacaacaaccaaacggaaacgaaacttgt

SEQ ID NO: 68158 - DNA, 744 bp, Homo Sapiens
  misc_feature (14)..(14): n is a, c, g, or t
  misc_feature (28)..(28): n is a, c, g, or t
  misc_feature (511)..(525): n is a, c, g, or t
ggaaatagtccctntcgagtgcagctancaacaagaaaaagaagcgtatggactactatgactctgaacaccatgaagactttgaatttatttcaggaacacgaatgcgcaaacttgctcgagaaggccagaaaccacctgaaggtttcatggctcccaaggcttggaccgtgctgacagaatactacaaatccttggagaaagcttaggctgttaacccagtcactccacctttgtcacattactagtaacaagaggggaccacatagtctctgttgacatttctttgtggtgtctgtctggacatgccttatgagttctgttttgaacaagtgtaacacactgatggttttaatgtatcttttccacttattatagttatattcctacaatacaattttaaaattgtctttttatattatatttatgcttctgtgtcatgattttttcaagctgttatattagttgtaaccagtagtattcacattaaatcttgctttttttccccttnnnnnnnnnnnnnnnttaccaaacaataaacttggctagaccttgttttgaggattttacaagacctttgtagcgattagattttttttctacattgaaaatagaaactgcttcctttcttctttccagtcagctattggtctttccagctgttataatctaaagtattcttatgatctgtgtaagctctgaattgaacttctttactcaataaaattaattttttggcttctt

SEQ ID NO: 68159 - DNA, 923 bp, Homo Sapiens
  misc_feature (219)..(233): n is a, c, g, or t
aagaagccaaaaaattaattttattgagtaaagaagttcattcagagcttacacagatcataagaatactttagattataacagctggaaagaccaatagctgactggaaagaagaaaggaagcagtttctattttcaatgtagaaaaaaaatctaatcgctacaaaggtcttgtaaaatcctcaaaacaaggtctagccaagtttattgtttggtaannnnnnnnnnnnnnnaaggggaaaaaaagcaagatttaatgtgaatactactggttacaactaatataacagcttgaaaaaatcatgacacagaagcataaatataatataaaaagacaattttaaaattgtattgtaggaatataactataataagtggaaaagatacattaaaaccatcagtgtgttacacttgttcaaaacagaactcataaggcagaccaaaactgatgcaagttaaggaaaatggtctgtttttaggaagcatgtccagacagacaccacaaagaaatgccaacagagactatgtggtcccctcttgttactagtaatgtgtcaaaggtggagtgactgggttaacagcctaagctttctccaaggatttgtagtattctgtcagcacggtccaagccttgggagccatgaaaccttcaggtggtttctggccttctcgagcaagtttgcgcattcgtgttcctgaaataaattcaaagtcttcatggtgttcagagtcatagtagtccatacgcttctttttcttgttgtaagctgcaactcgaaagggaactatttccaaagtgattaaaccaggggccatcgtcagcactttggcaccatgacttggctcataaagatccttccctgtttctggatgaggcatgccagcagggtctcgtccaacaatgtaaaagttggctcggccgc

SEQ ID NO: 68160 - DNA, 725 bp, Homo Sapiens
  misc_feature (578)..(595): n is a, c, g, or t
gagagactggacctaggtgagggtgacctgaataaagtggctgatgcctgcttgattaacctcagtgtcaaacagcccgtgaaataacaagaggctgccaggagcgtcttcctccacttgatgaaggtggacccagactccacctggttcctcctgaacgagctttactgccccgtgcagttcacacctccccaccccagcctccaccctgtgcagctgcacggggccagcgggcagcagaacccctacacgaccaacgtgctccagctgctcaaggagctgcagtgaccctgctcccccaccacagaggccaccgatccctcccctactgccagccagaagctgggctgaccccaccccggccataggcggtggcagcggcagcagagaaggtgaattagttagccaatcgatttataaattgatcgatcacacaactgcttagaaatggattgaaggaaagtagctgactattatttatgtttcataccttgtgttttcaagtgacattgtctggtggctctaagggtttaaccccttagcctaccatctctatagccccagctccctcacaggcnnnnnnnnnnnnnnnnnnagaggtcagttcccctccatctgcatacacctccctgtcttcaaataatgagatggaactaatttgttttacctaacctgatctttgggaaacaaacggaaataaagacacttcttggatgaaaagtttg

SEQ ID NO: 68161 - DNA, 1558 bp, Homo Sapiens
  misc_feature (876)..(897): n is a, c, g, or t
  misc_feature (930)..(1454): n is a, c, g, or t
  misc_feature (1468)..(1469): n is a, c, g, or t
gaggggaagcctcaaacggtatagaactgatgttgagggaggtgtagtttttgtactctagaaatgggtgcataatataactaggcagtggcggtgccttggtacaacctgaaaaatgttaaggcttattgaaacctttcaagtaggggatggtacatttatttcatctgcaaatgataataaatcctttgttattataactgtccagaagtgtgggctatgtattatctgatcagtctatggtcccagtaaaagtaaagatgcaggaaacacagtctgtaaatgagcgacttttctttgttcagctttagttttagcaaacaccacaaatatgttttaagtaacatcgctcaagtttaagtaacatcgctcaagttgataatctcttgataagctctgttgttgacattttgcagtgatacaacagctccactcatagatttaaacttttatttttacttatcttggtcataagttggcattctctcacattccacatgatatagagggctacgttttggaattttccttttcttaattgcccagagttatcagacagattataaaaatggcttttaatggcttaaaccatttctaaacctctatcttagcagatcaatgcaggatctaattcttttgataagttctagctctaaaagtgatagtgggactgtatgttttctgatactggtggcttatgttattaaaccttttttaaaaaaggttcactctaaaagctgaactacatccttagttttcagtctacttgactctatcaggagctttttaaggaaagtaagtataacatgcaaaggaagctttttttgtattcattttggactcctgtcaataaaaatagaagtttgttgactcgtnnnnnnnnnnnnnnnnnnnnnngcctacagccgcggccctcgtgccgaattcttnnnnnnnnnnnnnnnnnnnnnnnnnnnnnnnnnnnnnnnnnnnnnnnnnnnnnnnnnnnnnnnnnnnnnnnnnnnnnnnnnnnnnnnnnnnnnnnnnnnnnnnnnnnnnnnnnnnnnnnnnnnnnnnnnnnnnnnnnnnnnnnnnnnnnnnnnnnnnnnnnnnnnnnnnnnnnnnnnnnnnnnnnnnnnnnnnnnnnnnnnnnnnnnnnnnnnnnnnnnnnnnnnnnnnnnnnnnnnnnnnnnnnnnnnnnnnnnnnnnnnnnnnnnnnnnnnnnnnnnnnnnnnnnnnnnnnnnnnnnnnnnnnnnnnnnnnnnnnnnnnnnnnnnnnnnnnnnnnnnnnnnnnnnnnnnnnnnnnnnnnnnnnnnnnnnnnnnnnnnnnnnnnnnnnnnnnnnnnnnnnnnnnnnnnnnnnnnnnnnnnnnnnnnnnnnnnnnnnnnnnnnnnnnnnnnnnnnnnnnnnnnnnnnnnnnnnnnnnnnnnnnnnnnnnnnnnnnnnnnnnnnnnnnnnnnnnnnnnnnnnnnnnaagcgttcccctgnnagctcctctgcgctctctgttcgacctgcgcttacgatactggtcgcttctcctcgggaggtgggcttccaagtcagcgtagtaccatt

SEQ ID NO: 68162 - DNA, 554 bp, Homo Sapiens
ggttttgctaattttcacattttatttccaactattgcagtaacaagatgccggtagtattctccactgaaaggggcaaccttttaaagtaaacaaggttgcaaattttagtattccaacaatattttgacctatggaaattttgataggaaaaaattattacaatcagttttataatactacagacttatgtttcctccatatctaggaataaaaatatccaccctcccctcaatgattaatcatgtacacatctttactctttacaagcactatccttccagttgtactatgaggggaaatccctctcactcctgggtttttctacagtatacagaaatagcaggcactttagcagtaatgtacaatactattcaatctttagttgaaaaataaagaaggggattgccctatttatgtcctgatagtaaaaagacacacaccattgaaacataaaacgagtcaacaaacttctatttttattgacaggagtccaaaatgaatacaaaaaaagcttcctttgcatgttatacttactttccttaaaaagctcc

SEQ ID NO: 68163 - DNA, 454 bp, Homo Sapiens
ggtggagaagcatacagggcagtagtcacttaaagagcgtagaacgttatcaaagagaattagatcctgcatgagtctgctaagatagaggtttagaaatggttgaagccattaaaagccattttgataatctgtctgataactctgggcaattaagaaaaggaaaattccaaaacgtagccctctatatcatgtggaatgtgagagaatgccaacttatgaccaagataagtaaaaataaaagtttaaatctatgagtggagctgtggtatcactgcaaaatgtcaacaacagagcttatcaagagattatcaacttgagcgatgttacttaaacttgagcgatgttacttaaaacatatttgtggtgtttgctaaaactaaagctgaacaaagaaaagtcgctcatttacagacggtgtttcctgcatctttacttttactgggaccataga

SEQ ID NO: 68164 - DNA, 1791 bp, Homo Sapiens
  misc_feature (1335)..(1335): n is a, c, g, or t
aatgtgaatataaacagctgcgtacaaaaagcaggctggtacccctccggattcccgggatatcgtcgacccacgcgtcgcgccgcgtgcgggctggtggctctgtggcagcggcggcggcaggactccggcactatgagcggcttcagcaccgaggagcgcgccgcgcccttctccctggagtaccgagtcttcctcaaaaatgagaaaggacaatatatatctccatttcatgatattccaatttatgcagataaggatgtgtttcacatggtagttgaagtaccacgctggtctaatgcaaaaatggagattgctacaaaggaccctttaaaccctattaaacaagatgtgaaaaaaggaaaacttcgctatgttgcgaatttgttcccgtataaaggatatatctggaactatggtgccatccctcagacttgggaagacccagggcacaatgataaacatactggctgttgtggtgacaatgacccaattgatgtgtgtgaaattggaagcaaggtatgtgcaagaggtgaaataattggcgtgaaagttctaggcatattggctatgattgacgaaggggaaaccgactggaaagtcattgccattaatgtggatgatcctgatgcagccaattataatgatatcaatgatgtcaaacggctgaaacctggctacttagaagctactgtggactggtttagaaggtataaggttcctgatggaaaaccagaaaatgagtttgcgtttaatgcagaatttaaagataaggactttgccattgatattattaaaagcactcatgaccattggaaagcattagtgactaagaaaacgaatggaaaaggaatcagttgcatgaatacaactttgtctgagagccccttcaagtgtgatcctgatgctgccagagccattgtggatgctttaccaccaccctgtgaatctgcctgcacagtaccaacagacgtggataagtggttccatcaccagaaaaactaatgagatttctctggaatacaagctgatattgctacatcgtgttcatctggatgtattagaagtaaaagtagtagcttttcaaagctttaaatttgtagaactcatctaactaaagtaaattctgctgtgactaatccaatatactcagaatgttatccatctaaagcatttttcatatctcaactaagataacttttagcacatgcttaaatatcaaagcagttgtcatttggaagtcacttgtgaatagatgtgcaaggggagcacatattggatgtatatgttaccatatgttaggaaataaaattattttgctcaaaaaggaatcancaactttaaccctatccctgtcggccggcccgggcctcaaaaagctttccaaaacatttcccttggcgcgccgggccccgatatcgaaagtgaacatggtcacaacctggtttcccaaggaaaaacctgggccctggactacgggcctggccatccccgccaaataaaaaacagcccggggggcaaaacggagccgttcctgtaccaaatcccaaaatggagttccccgagggccatttaactggaatctctttcaaccagggagcccccaagcggaggctccgaaaattcaatttatcgcccccggccccctggccactttaattcgaaaggaacggggttgcaaaatatccactataagcatttcttcggcccgacaattgggaaatctctttccacaaaaaaggggttttttggttgaaacaaccctgtaaattctcccacaagcgggggctt

SEQ ID NO: 68165 - DNA, 1001 bp, Homo Sapiens
gggctttactcattatatttgaggcaagcatcttgctgaatggtttaacagtgtggatcttcttccacattaggaataaaaccagcttcatattctatctcaaaaacatagtggttgcagacctcataatgacgctgacatttccatttcgaatagtccatgatgcaggatttggaccttggtacttcaagtttattctctgcagatacacttcagttttgttttatgcaaacatgtatacttccatcgtgttccttgggctgataagcattgatcgctatctgaaggtggtcaagccatttggggactctcggatgtacagcataaccttcacgaaggttttatctgtttgtgtttgggtgatcatggctgttttgtctttgccaaacatcatcctgacaaatggtcagccaacagaggacaatatccatgactgctcaaaacttaaaagtcctttgggggtcaaatggcatacggcagtcacctatgtgaacagctgcttgtttgtggccgtgctggtgattctgatcggatgttacatagccatatccaggtacatccacaaatccagcaggcaattcataagtcagtcaagccgaaagcgaaaacataaccagagcatcagggttgttgtggctgtgttttttacctgctttctaccatatcacttgtgcagaattccttttacttttagtcacttagacaggcttttagatgaatctgcacaaaaaatcctatattactgcaaagaaattacacttttcttgtctgcgtgtaatgtttgcctggatccaataatttactttttcatgtgtaggtcattttcaagaaggctgttcaaaaaatcaaatatcagaaccaggagtgaaagcatcagatcactgcaaagtgtgagaagatcggaagttcgcatatattatgattacactgatgtgtaggccttttattgtttgttggaatcgatatgtacaaagtgtaaataaatgtttcttttcattatc

SEQ ID NO: 68166 - DNA, 2061 bp, Homo Sapiens
  misc_feature (50)..(92): n is a, c, g, or t
  misc_feature (96)..(130): n is a, c, g, or t
  misc_feature (244)..(277): n is a, c, g, or t
  misc_feature (1489)..(1489): n is a, c, g, or t
  misc_feature (1491)..(1529): n is a, c, g, or t
  misc_feature (1558)..(1626): n is a, c, g, or t
  misc_feature (1683)..(1746): n is a, c, g, or t
  misc_feature (1907)..(1952): n is a, c, g, or t
gcgcgccgccacagatcgaacgactcactatagggcgccagggcgttaannnnnnnnnnnnnnnnnnnnnnnnnnnnnnnnnnnnnnnnnnnccgnnnnnnnnnnnnnnnnnnnnnnnnnnnnnnnnnnncagtcgacggtaccggacatatgcccgggaattcggccattacggccgggggagcactatttctttctgtcttttgttagcaaaaaattgcaaaaagaattgtacattcttgcnnnnnnnnnnnnnnnnnnnnnnnnnnnnnnnnnncaagggacctaacaaaactcagcagtgttactgtattttttaaaaatattcttatagactcattttcaggttattaaatgtaagagaaacagatacccctcttttttaaagtaggtaaatcattgatgatttatattaccaatttttagaagtaattttctagtaagcttgtggcatcagaaaatactagaagatttttttagttaaattagttagaacatttatgaatgaatataataaatattttttcagaataaaatatggaccctttgtgtttactaatagataaagccagatataattttttgtttttaaggccacaaaatatggcctttgttaaagaacactaaagttagaaatctaaagttagagcaactttttaatggctatttcctattattgtaagtgttaaaacccctgcagaattcttgataaggtgctatttatactatatttcttattataagataactgtctttagtcttcttagtactagtctttttagtactaaatcaatcagcaaacatcatcatttcaccccaaaattttgtcacagaaaaggcgtatcaaatgaaaaataatttcagagatctttctttcaagatattttttcctgataaaatacattgtcttgaagtaaatacattgtcaaaacctaattgcaattctgttaaatctaagtaatttttagacagtgtttcaccgtattatttaggatgtgaaatgccatttctttcactgattacaccatatacaggaaacaggtaaaacagtgaaaactttattgtgctggttgatgccaacttggttgaaaagctctctgcagaagaagtgatctagactgacagaagtgttgctaattacaagttgtgttctcatgacgtaattagaaagtaacttctcaaagtacaacttttatgaaaaaaataagctgttaaaaaaaggaaatcgtaggttaatttaattgggaaaatgggcaattgacagagaccattttcctaacacatatatgtgctagtactttaactttttaaaattttacttctacgttttgtaatataaaaatttctattttaagtttagaatgttatacgtaccgaaagtatgcagccaaatcgatcagatcaaaccattttacctggagtttggtactggtttttacttctctgaatctgtataagaaaaataaagacaattgaacttccaaaaaancnnnnnnnnnnnnnnnnnnnnnnnnnnnnnnnnnnnnnnntattcaccatcctcaaaccaccaacccannnnnnnnnnnnnnnnnnnnnnnnnnnnnnnnnnnnnnnnnnnnnnnnnnnnnnnnnnnnnnnnnnnnnccacttcacccaattttacacacccctctactttcttaccccgtccgtcccttcccnnnnnnnnnnnnnnnnnnnnnnnnnnnnnnnnnnnnnnnnnnnnnnnnnnnnnnnnnnnnnnnnctccgtcgactcgtactcccccattccaccccctaaaatcgccttcccggccttatcgctccacccacccccatatacgcctttcttccccgatcctcccctccctaagttctttcataaaaggcccaccaccctaccgctttgttccgcccctatccatnnnnnnnnnnnnnnnnnnnnnnnnnnnnnnnnnnnnnnnnnnnnnnaacatcctacgatctccatttcgtactacaataccacactcccccactacccgtcatatccccactctcactcccttatgtatcacccctcctatatctcccttcaccc

SEQ ID NO: 68167 - DNA, 631 bp, Homo Sapiens
  misc_feature (56)..(64): n is a, c, g, or t
  misc_feature (228)..(249): n is a, c, g, or t
  misc_feature (336)..(336): n is a, c, g, or t
atattttttttaatacctcagtgctgcaagtatcaccagagaggctatggaagaannnnnnnnnaatttattgtagatgtaaacagaattttaaaaataaaaagtataaacatcactgcactgtgactggtgggaaaaactgacagtttcctctttgcacatgtttaacatttggctgttataatatatggtcctcggttggggaaagatacttatgatgaaggatannnnnnnnnnnnnnnnnnnnnnaaatattggtaataggtcggcaacagcaactatagaagtacaactcaatagatggcattaaaacatattgtagtgtggatatatatnttttcttttttaaaatgtgatattgacgttttattaatattttttaaattgttacgtttataaatttggtacttaaggcacagccagtatgagacactgaatgcgacatttattataaagagctgctgcactcctatttttataaattttactaacaaagtagactaatgtagacattcacagacatggtagggcaaaagcatcttcaaactaaagactccaaaatgctaactcagaaagaaagaaaaaacccgttttcaattctaatgaaacagcaacaacattttttttaatt

SEQ ID NO: 68168 - DNA, 393 bp, Homo Sapiens
  misc_feature (236)..(297): n is a, c, g, or t
aattaaaaaaaatgttgttgctgtttcattagaattgaaaacgggttttttctttctttctgagttagcattttggagtctttagtttgaagatgcttttgccctaccatgtctgtgaatgtctacattagtctactttgttagtaaaatttataaaaataggagtgcagcagctctttataataaatgtcgcattcagtgtctcatactggctgtgccttaagtaccaaatttannnnnnnnnnnnnnnnnnnnnnnnnnnnnnnnnnnnnnnnnnnnnnnnnnnnnnnnnnnnnntatatatccacactacaatatgttttaatgccatctattgagttgtacttctatagttgctgttgccgacctattaccaatatttaaaaaaaagtt

SEQ ID NO: 68169 - DNA, 1320 bp, Homo Sapiens
  misc_feature (43)..(77): n is a, c, g, or t
tcgaacgacgagcgcagcgaagtagtgagcgaggaagcggcgnnnnnnnnnnnnnnnnnnnnnnnnnnnnnnnnnnncagtcgacggtaccggacatatgcccgggaattcggccattacggccgggggatggacctctttataaagttggttgctgcaaaatccagttcttccaaaagccactttatttagggtttattcacaagtcatatccattttggtacagtgtttgtttcctaatatttattaaccaccttataccaaatgtcttgcaaagaaatgttattaaaaccttgaatttttacaaatgtaaaaaacaaaaagtgtattaatgtatttgttcaggaaaagctacataccgaagggcttttgtatatgaattctgtggtggggagacccatttgtaatctatatggcagttccatctgggttttaagtttagatttcaccgtgtcttagtgcttcattctattggtttattggaacatgtaataaataggagtagtgatgtattaaaacacaagtattcattaatgttttatatcttcactaaaattctatagttatgaaactattttatcaatcaaggtgttatatttcagtcagaagtgaaaatttatgaagagtatttggaagtgtgtacagaaataaactagacttacaggtaggctagatcagaacgttaacatatgaacctgcagaaatctggtaagacttaaattcagtgtgaggaataactctagttctctcctatgagcatttcctaaaagccatctgatttggcattcttactggagctgcagacagaaatctacaaagacaaaagtaaacaaaattaagttattattccactgttaggaatggaaataaacttgtgaagtctgtttattttgaagtattggtgaactaggcttgctaattgataactgcagcagtttgtgtttactccagttcatcagcttaggtcatttgaaagatataagagcttaaggcaagaaagaaataacatggaattctatttgaaggacaacagaacattcttggaaaagcagctccagttggtttttcaactgtcaaacttgaatgtgtaagtccccacagagcatggacagtcggtgcagagttccaaggaaacaattattgcctgatgaccacttccattttgtatacactctttggttcgtataggccatattccaactggctttttagtaatagaaatccagtatataatgtatcaaatacaattgaggttctaacctagtgtgttaatttatctgaatttggatttttaaaaagtaataaaaagttaaatgtaaa

SEQ ID NO: 68170 - DNA, 1386 bp, Homo Sapiens
cgtagcccgatcaccggggaccaagaagagaggcccgcacagagagactgctcctttccggggcttccaaggcaccaggaccagccacatcaccagccacctaatagagctggtgctcctggggagtccttggagtgccctgcagagctgagaccacaggttccccagcctccgtccccagctgctgtgcctagaccccctagcaaccctccagccagaggaactctaaaaacaagcaatttgccagaagaattgcggaaagtctttatcacttattcgatggacacagctatggaggtggtgaaattcgtgaactttttgttggtaaatggcttccaaactgcaattgacatatttgaggatagaatccgaggcattgatatcattaaatggatggagcgctaccttagggataagaccgtgatgataatcgtagcaatcagccccaaatacaaacaggacgtggaaggcgctgagtcgcagctggacgaggatgagcatggcttacatactaagtacattcatcgaatgatgcagattgagttcataaaacaaggaagcatgaatttcagattcatccctgtgctcttcccaaatgctaagaaggagcatgtgcccacctggcttcagaacactcatgtctacagctggcccaagaataaaaaaaacatcctgctgcggctgctgagagaggaagagtatgtggctcctccacgggggcctctgcccacccttcaggtggttcccttgtgacaccgttcatccccagatcactgaggccaggccatgtttggggccttgttctgacagcattctggctgaggctggtcggtagcactcctggctggtttttttctgttcctccccgagaggccctctggcccccaggaaacctgttgtgcagagctcttccccggagacctccacacaccctggctttgaagtggagtctgtgactgctctgcattctctgcttttaaaaaaaccattgcaggtgccagtgtcccatatgttcctcctgacagtttgatgtgtccattctgggcctctcagtgcttagcaagtagataatgtaagggatgtggcagcaaatggaaatgactacaaacactctcctatcaatcacttcaggctacttttatgagttagccagatgcttgtgtatcctcagaccaaactgattcatgtacaaataataaaatgtttactcttttgtaagattatgttttacttatctcaaaggagatacatataatttataatgatatgggcagttgcttccagggacatcaacaaagctgcttagatataatattagataaatataacagaccactctgtattaatggattaaagccagctagttaaacaaccctttttaaccat

SEQ ID NO: 68171 - DNA, 1554 bp, Homo Sapiens
ttacgctaggtacgaggctgggtttaaatcggcacgaggcctcagcccaacatggcgatgcacaacaaggcggcgccgccgcagatcccggacacccggcgggagctggcggagctcgtgaagcggaagcaggagctggcggaaacattggcaaatttggagcgacagatctatgcttttgagggaagctacctggaagacactcagatgtatggcaatattattcgtggctgggatcggtatctgaccaaccaaaaaaactccaatagcaaaaatgatcgaaggaaccggaagtttaaggaagctgagcggctcttcagtaaatcctcggttacctcagcagctgcagtaagtgcattggcaggagttcaggaccagctcattgaaaagagggagccaggaagtgggacggaaagtgacacttctccagacttccacaatcaggaaaatgagcccagccaggaggaccctgaggatctggatggatctgtgcagggagtgaaacctcagaaggctgcttcttctacttcctcagggagtcaccacagcagccataaaaagcgaaagaataaaaaccggcacaggattgatgatctgaagttaaacaaaaaaccacgagctgactattagaagacacattagtgcagaagcttccaggctgtagagccctgcttcccttctctgacctcacaaagataaacatccttcacctgagttcgtggccatccacctctgctctcccagacccagtgcctgtgactttgagtagtttgttctaaatgtggtgacaaacaagtcatttctgtaagacattgggtcttactttatgtcatttttagtaacagaactgcaggaagatcaagacaatgttgtaatcccggcaagttgctaactgtgcgtttctcccttcttagaatgaatgtctcccccaaaactggctggcaccagcttcatctgtgatacccttcaagaaatgttctctggttttgttttatgctgaaagtagaacacaagtcacatttcagatggaggctgtaaatatctggcattttcctatattggtttatggtgtccttgtttttctcttgttgtttttatcttatttcctttggggtttttttgtaatgcctttgtacagctcatactttcctgctgacatatctgatcatctctttcatgcagttgccaatattcataactgaaaataatctggtttatcataagtaaaatgggaaacttgcctctgttttttgcaaggggaggtaaagagtgtttagtaattacctatcttaaatctttctgagttggtagtagattcatgttcaaggaacaggaaaaatggaaaaacataagtttaaatcagttctttttaaataactttttattcttttgtataaataaaatttcacaggcttcaaattctcatgctttacttttaaacccgagattgttttttcacttatttattcatatcatgccttatggaaatttctttttctgtattttctctctttgctggtattcacctgattaaatattgctctaaaaatcaaa

SEQ ID NO: 68172 - DNA, 1704 bp, Homo Sapiens
ctgaactaagtagaaatccagtcttccactgccccctccctgccatcttttcttctgctactttggggagttgatggccaggaaagaagccagcacagggttaaagtaactcctggcattgcccacccagggggctggtgcacctgctgacctcagggtcacagttgagtcatttgccagttgacggagcaagtttgaccttggttctgttgctgaagcaaatttggaacttttctgtctcagtgtgatccactaacccacaggatcatttggaaccttgaatagctctgcttggacaatggggttggggaatagggttgtctttcctatgaaaatgccatctgtagaccttgtgagtcagccgtccagatgtttgcaggtgaattcctctgcttgacatcctccctgtcactttggaccctatgggagtgggcatctccacgcacctgtgtatgtgaaagtcattttacatttcaaagcagtgtgtgtttcttatttttatatttttaactctttattcttggatgtataaagtgaactttttggcttctgtaagtatgctctatgcacctctaatgttttatcatgtatttatatgttgtacacagtactggctgattctgtaaatggatgtattgtacagagaacatgaacgtctcttcctaattttacatcttcagcatcattgcattaaagtggtgtaatctccttctctacatctgttgtcagagccactgagtgctgtgtggctcgacgtgagggtgaaatgattgacttgtgacctgccaggttgcccgatgccctgttgggtcaccggctggacctgctgcagcctgcagagccacagtcagcctgcccacatgccaccgagcaaacgcatcttgcttttcacatctctcctcctacagccttaatggctgcttgctgccatatgtgacaaatcaccaccaccagtgttaagtgcttctggattcatgggtgagttccctgggcagcccccaggaaggccttccagatctggctccagggtcaccacctgtcacagcaatacctgggaccatgctctcctgggactgtgaggctccttttgacgtacttttgacatcaggcaggtttgggaagaaacaaagccatgcctgctcctgcctctctcccaacatgtttccagcaagtagatgcccctgtgtgtgttttcccttgccttgtttcctgccttatatcttgtatttcgacttattacagagttgagggttcttgcttaatttagatcaagtataaaatttgtatgacttcaagtctcattttatctgaaaggtttttttctcatttaatctgatgtggcattttcgtcatctgaagcatgagtgacaagttgggaatgatgtggtgatttagaatgcagtattggccaagtccaagttgtcaacttaagcgtctgtttaccaaagaccgggaacaggggcccaaacatgtccagtcctcttcttccctctgctggaacctttggggacactcaagggtacagtttgacactgatctggtccatgaggctgcccagagaaagcactgcttctgtatgtctcttgtggtattggaacaataaacccgtacaacctgccctaaaagaaattctacaagggcaagaaaaacaaaacccctgaacctgcgagactaaaaaaacgcgtgccaatgcgccgacggctc

SEQ ID NO: 68173 - DNA, 686 bp, Homo Sapiens
  misc_feature (39)..(39): n is a, c, g, or t
actcaaagtagatggacagaaaaactgctgtgaggaggngaaagaggagcagcagggatgtgcaggggacggtggggaagacagggtagaagagatggttatagaggttggagagatggtgcaggactgggccatgcagagccctgggcagccaggagacctgcccctgaccactggaaagcatggagcccctggagaagaggggcagcccagccacgcagccctggcagagcgggggcccaagggacatgaggcagcccaagaatggtctcagggtgaggcagggaagggggcatccctgccctcctcagcgagctggcgctgtgccttgtggcaccgagtgtggcaagggcggcggcgagcccgtagacgcttgcagcagcaaaccaaggagggagctggaggtggcgctggcacaagagcagggtggctggcgactgaggctcaggtcacccaggagctgaaaggactgagtggtggcgaagagaggccagaaactgagcccctgctgagctttgtggcgtctgtctccccggctgaccgaatgctcactgtgaccccgctccaggatccccaaggcctgttccctgatctccatcatttcttacaggttttcctccctcaagcaattcgacatctcaagtgaagacatggcccctgaagggcaataaagctgctagtttatt

SEQ ID NO: 68174 - DNA, 585 bp, Homo Sapiens
cttaaatggaatagcagagaccccaaaggaggagaaagcagagggggcagcaatgctggagctggtgggatccattctccggggctgtgtccctggggtgtatcgagtccaaaccgtgccctctgcccggcgccctgtggtcaagttctgtcatcggccttcaggtctccacggtgatgtctccctcagtaaccggctggccctgcataactcccgttatcctgagtctctgctctgagctggatggtcgagtccggcccctcgtgtacaccctccgatgctgggctcagggtcgggggctgtcagggaggggcccccttctcagtaaaaacgccctgacctggctggtgatctattttcttcagaccagggaccctcctgtgttgcccactgtgtcccagctcacccagaaagcaggagagggggaacaggtggaagtcgatggctgggactgcagtttccccagggatgcctcaagactggagcccagcataaatgtggagcccctcagttttcctccctcaagcaattcgacatctcaagtgaagacatggcccctgaagggcaataaagctgctagtttat

SEQ ID NO: 68175 - DNA, 1351 bp, Homo Sapiens
  misc_feature (1219)..(1231): n is a, c, g, or t
cagtcgacggtaccggacatatgcccgggaattcggccattacggccgggccacaaatgagaaactgttacaggaattagatacacttcaacaacaattggattcacagaacatgaaaaaagagagcctggaagcagaaatagctcactcccaggtgaaacaggaggcggtattgctgcatgaaaaactttatgagttggagtcccatcgagatcaaatgattgcagaagacaaaagcataggatctccaatggaagagagagagaaattacttaagcagattaaagatgataatcaggaaatagccagcatggaaagacagttaacagatacaaaagaaaagataaatcagtttattgaagaaattagacaacttgacatggatttagaggaacaccaaggtgaaatgaaccagaaatacaaggagctaaagaaaagggaggaacatatggacacttttattgagacttttgaggaaacaaagaatcaggaactgaaacgaaaggcacagatagaagccaacattgttgcactcttggagcactgcagtcgaaatataaatcgtatagaacagatatcctctatcaccaatcaagagctaaagatgatgcaggatgacctcaattttaaatctactgaagtgcagaaatcacaaagtacagctcagaatttgacttcagacattcaacgtctgcagttggatctgcagaaaatggagcttctagaaagtaagatgactgaagaacagcattctctaaaaagcaaaattaagcaaatgacaactgatctggagatatataatgatttgccagctttaaaatcatcaggtgaagaaaagataaagaaattacatcaggagagaatgatattatcaacccacagaaatgcctttaagaaaataatggagaagcaaaacatagagtatgaggcactaaaaacacaattgcaagaaaatgagacacattctcagcttacaaatttggagagaaagtggcaacaccttgagcaaaataattttgcgatgaaagaattcatagcaaccaagagtcaagagagtgattaccagccaattaagaaaaatgtgaccaagcagattgcagagtacaataaaaccatcgtggatgctttacatagcaccagcggaaactgagtttaagtccactgaaagtctctaaggaagtatcctcttgctgctaaacttggtacaagttgactaccnnnnnnnnnnnnngcttacttttggagtttacctaaaatttctgaatgttataatttttgtggcctcttttaagaatgatattttaaaatagtaaatagttcaataaatggtttgcatattaaaaagtaaaaa

SEQ ID NO: 68176 - DNA, 555 bp, Homo Sapiens
aggctttaccttccccaaaaatgaattattatcaactacattgggaggcaacaattttgaaatctgtgtgacccttttcctttgaaattgagcatcccttccagtacctgccaaagacagactagaccgtccctggacgataagctcctcaaaggcaggtgctgcttttgatctttttgtacctacttcagtgtgtaacaaacagtggccacagaacaaacacttgcatgctaagggaatggattctctaaaattgatactacttttgctttggtggttttctttagggcccactgatgatggtgaagaagagatggaagaagacacagtcacaaacgggtcctgagcagtgaggcagatgtataataataggccctcttggaacaagtcttgcttttcgaacatggtataatagccttgtttgtgttagcaaagtggaatctatcagcattgttgaaatgcttaagactgctgctgataattttgtaatataagttttgaaatctaaatgtcaattttctacaaattataaaaataaactccactcactatgct

SEQ ID NO: 68177 - DNA, 1685 bp, Homo Sapiens
ggcatctctcaaatcgctgacttacctaagtatcctaagaaatccggtaaccaataagaagcattacagattgtatgtgatttataaagttccgcaagtcagagtactggatttccagaaagtgaaactaaaagtaagtagtaatctgttgcttgtgagccattatagagttgtgtgtttttctttatatttttgttactgattattaaaattgtctaaatgagtaaattttaccattagtttgtaataaaagtgggagggaaaatgttacatcacatttttttctaatagcagagtttatgatagaacttttaagttggagctctcttatgtaatgctggctattccgaagttcgcaaagtgctgaggccacggtgagcagtcttaacagtggattgtctgcctagatacgttcccagcggagaacttaatgtaacctactttcgtgcagctccgtgtgttaggatgatttttccctttattaggaattcattattttattattcatttaattgccttcttagttccctgggatcccctccttggagctaggagaatgaactttcttcagggagctctaccaaagaaagaagaccactgtgtcttctcttaatttgaaattgctttttggtattttcaccagcccggagtactgtaggagagttcgcttccatgtcttctgaggaatgcatctaaatgcatgtggtattcctatttccattaactctgtgtgtggtgtcgctgtaggagcgtcaggaagcagagaaaatgttcaagggcgaacggggtgcacagctagcaaaggatattgccaggagaagcaaaacgtaagacacggatatccaacttaactctacttcaccttcagaaacatgatctgatctgtctggcagttcgtctcctacaaaattaaccaaaaactctgacatattaatgtggtattaaattttagtgcttatagtccatgtacatcaatggtccacacatcacaagaaatttctaccagcttagcagagcaaatatttcagtagtcagtcttcatgtgataccatgtacatcctattttctatataggaagatgaactggatggtgtttctgaaggagagagttcttgtatcagtttgttaacaaagataagatactacactggttgaattactttcaaaagcttttgaaagtaaaagagaagcaacttctgttggtctaggtctaacagttatgttcttccccctcttaagttttaatccaggtgctggtttgccaactgacaaaaagaaaggtgggccatctccaggggatgtagaagcaatcaagaatgccatagcaaatgcttcaactctggctgaagtggagaggctgaaggggttgctgcagtctggtcagatccctggcagagaacgcagatcagggcccactgatgatggtgaagaagagatggaagaagacacagtcacaaacgggtcctgagcagtgaggcagatgtataataataggccctcttggaacaagtcttgcttttcgaacatggtataatagccttgtttgtgttagcaaagtggaatctatcagcattgttgaaatgcttaagactgctgctgataattttgtaatataagttttgaaatctaaatgtcaattttctacaaattataaaaataaactccactcactatgctaccaaaaa

SEQ ID NO: 68178 - DNA, 1178 bp, Homo Sapiens
  misc_feature (82)..(112): n is a, c, g, or t
aatgtatagatcactatatggcggctacccgtcatttccgaacgacgagcgcagcgagtattgagcgaggaagcggcgcatnnnnnnnnnnnnnnnnnnnnnnnnnnnnnnncagtcgacggtaccggacatatgcccgggaattcggccattacggccgggggctttccacagcgcgggggaacgggaggctgcaggatggtcaagctgacggcggagctgatcgagcaggcggcgcagtacaccaacgcggtgcgcgaccgggagctggacctccgggggtataaaattcccgtcattgaaaatctaggtgctacgttagaccagtttgatgctattgatttttctgacaatgagatcaggaaactggatggttttcctttgttgagaagactgaaaacattgttagtgaacaacaacagaatatgccgtataggtgagggacttgatcaggctctgccctgtctgacagaactcattctcaccaataatagtctcgtggaactgggtgatctggaccctctggcatctctcaaatcgctgacttacctaagtatcctaagaaatccggtaaccaataagaagcattacagattgtatgtgatttataaagttccgcaagtcagagtactggatttccagaaagtgaaactaaaagagcgtcaggaagcagagaaaatgttcaagggcaaacggggtgcacagcttgcaaaggatattgccaggagaagcaaaacttttaatccaggtgctggtttgccaactgacaaaaagaaaggtgggccatctccaggggatgtagaagcaatcaagaatgccatagcaaatgcttcaactctggctgaagtggagaggctgaaggggttgctgcagtctggtcagatccctggcagagaacgcagatcagggcccactgatgatggtgaagaagagatggaagaagacacagtcacaaacgggtcctgagcagtgaggcagatgtataataataggccctcttggaacaagtcttgcttttcgaacatggtataatagccttgtttgtgttagcaaagtggaatctatcagcattgttgaaatgcttaagactgctgctgataattttgtaatataagttttgaaatctaaatgtcaattttctacaaattataaaaataaactccactcactatgctacc

SEQ ID NO: 68179 - DNA, 509 bp, Homo Sapiens
gcacttaagtctttgaaattcaattgtgaatttaatagttctagcacatctcaattataagtagccacctgtagttactggtactatattgaacactgcaattgtagaaaacaacataggagtttataaccctggaataggggaaatttaaacatcaaaagggctacaataaagaagaagattgattcattggactgcacctaaattaggaacttctctaacaagacatcctaagtcaaaagtcaagtaaaagtaggaaaatatttgcaacatacggctgcagaacccaaaaggcccagatcctgaattaagaaaaagacaagaaagaggatactgagatcattttctagattttgtaaattttctgtaggaagcacatagtacctttaaccccacccaccaaataccattttccttctgtgcaacttaccagttccacgagactattattggtgagaatgagttctgtcagacaaggcagagcctgatcagtccctcacctatacggc

SEQ ID NO: 68180 - DNA, 781 bp, Homo Sapiens
gtcaggagagagaactgtgtgtatctccacggagattcttgtgacatgtgtgggctgcagctcctgcatccaatggatgctgcccagagatcgcagcatatcaaatcgtgcattgaggcccatgagaaggacatggagctctcatttgccgtgcagcgcagcaaggacatggtgtgtgggatctgcatggaggtggtctatgagaaagccaaccccagtgagcgccgcttcgggatcctctccaactgcaaccacacctactgtctcaagtgcattcgcaagtggaggagtgctaagcaatttgagagcaagatcataaagtgagactcctccccagtcttcatttgtgctttctcttttggggaagaatttagtaacttgtgccaactttcaaccagatggaccgcatttaaatgcatgcattttatcttgaaactgggatattctaatggggatttcttctttgtatttcagctagcttctaggttagttggtctatctacttttatttgaatgaggaaaccctgtgtatcagttagaatcttcgtgctttttctgaggagattgtgtttaatggattattagccagtttaggctcagtgaacaaactgatctagctctgaatgtatgtttcctgacgttttacatttccactttcctattccattcattaagctagccaacaatccaccatcctttaaagattgttctcataactgaacaaaaaccacataatctaaacagagcaaagctacaagaaataaatttatttaaacgaaag

SEQ ID NO: 68181 - DNA, 725 bp, Homo Sapiens
  misc_feature (16)..(16): n is a, c, g, or t
acagtaatggcggagntcgcaactcccggaacaacagccacaacatcaggagcaggagcggcagcgcagacggcggcagcagcctcccccaccccgatccccacagtcaccgccccgtccctgggggcggccggagggggcggcggcagcgacggcagcggcggcggctggactaaacaggtcacctgcaggtattttatgcatggggtttgtaaggaaggagacaactgtcgctactcgcatgacctctctgacagtccgtatagtgtagtgtgcaagtattttcagcgagggtactgtatttatggagaccgctgcagatatgaacatagcaaaccattgaaacaggaagaagcaactgctacagagctaactacaaagtcatcccttgctgcttcctcaagtctctcatcgatagttggaccacttgttgaaatgaatacaggcgaagctgagtcaagaaattcaaactttgcaactgtaggagcaggttcagaggactgggtgaatgctattgagtttgttcctgggcaacccaactgtggccgtactgcgccttcctgcactgaagcacccctgcaaggctcagtgaccaaggaagaatcaaaaaagagcaaaccgccttgaagacaagaagcactgtgcccctagctgcgtggaagatgcgatacgggagaatgtgtgttctcccggagatctgtgaatgtgtggctgaggtcggctca

SEQ ID NO: 68182 - DNA, 2968 bp, Homo Sapiens
  misc_feature (171)..(217): n is a, c, g, or t
aaaggctaggtacgaggcctgggttgtgaattcggcacgagggggataaacagtaatggcggaggctgcaactcccggaacaacagccacaacatcaggagcaggagcggcagcggcgacggcggcagcagcctcccccaccccgatccccacagtcaccgccccgtcccnnnnnnnnnnnnnnnnnnnnnnnnnnnnnnnnnnnnnnnnnnnnnnntggactaaacaggtcacctgcaggtattttatgcagtggggtttgtaaggaaggagacaactgtcgctactcgcatgacctctctgacagtccgtatagtgtagtgtgcaagtattttcagcgagggtactgtatttatggagaccgctgcagatatgaacatagcaaaccattgaaacaggaagaagcaactgctacagagctaactacaaagtcatcccttgctgcttcctcaagtctctcatcgatagttggaccacttgttgaaatgaatacaggcgaagctgagtcaagaaattcaaactttgcaactgtaggagcaggttcagaggactgggtgaatgctattgagtttgttcctgggcaaccctactgtggccgtactgcgccttcctgcactgaagcacccctgcagggctcagtgaccaaggaagaatcagagaaagagcaaaccgccgtggagacaaagaagcagctgtgcccctatgctgcagtgggagagtgccgatacggggagaactgtgtgtatctccacggagattcttgtgacatgtgtgggctgcaggtcctgcatccaatggatgctgcccagagatcgcagcatatcaaatcgtgcattgaggcccatgagaaggacatggagctctcatttgccgtgcagcgcagcaaggacatggtgtgtgggatctgcatggaggtggtctatgagaaagccaaccccagtgagcgccgcttcgggatcctctccaactgcaaccacacctactgtctcaagtgcattcgcaagtggaggagtgctaagcaatttgagagcaagatcataaagtcctgcccagaatgccggatcacatctaactttgtcattccaagtgagtactgggtggaggagaaagaagagaagcagaaactcattctgaaatacaaggaggcaatgagcaacaaggcgtgcaggtattttgatgaaggacgtgggagctgcccatttggagggaactgtttttacaagcatgcgtaccctgatggccgtagagaggagccacagagacagaaagtgggaacatcaagcagataccgggcccaacgaaggaaccacttctgggaactcattgaggaaagagagaacagcaacccctttgacaacgatgaagaagaggttgtcacctttgagctgggcgagatgttgcttatgcttttggctgcaggtggggacgacgaactaacagactctgaagatgagtgggacttgtttcatgatgagctggaagatttttatgacttggatctatagcaaccttgcgtggcgtgtgaactggtctgctgacctcagacagcagctgtcccctgtggtggtgtggcagtgcctgtgttctctcctaggcaggcctctcaactccaggtgctgtcctaagaatttttacccagggcctgtcttctcaacccctcacctttccctgaggagtgtgttgttttccctgttgaaaaaagttacaaaaataaatcttaaagttagttttttgtaacacgaatttaactgtcagacagttagtgtaggtgtgttgcgtcatctgttttcaaccagattgcatttatggacttttcacacactcattttgaggaccccaggttcaaaagtaaaagcagtggccctgctttggggtccaagaataagagtgatgggtgaagggacctaagctggccaatagccctctgccccagacatgggatgtggatccttgaggtttctggtgaaatctgcacatctgtgtttttatatctgttccctaccctgtaatccctaccacgtgcacttgttctgtggttttggtctcttgtttaattgcacacaagtaatactactgggtaaccagaatcaggtgtgaatgtgttgagattttttactgttttgcatgataggaaaattgagaaagaatacgtataaaagatagagaggcataacatcaatgcagagttggaagttggctcccaagggctgacatggtgtgagtgtgtgggtgtgtgataagcttctcatccctgcatagatgcagtattcttagccttagtagaaaaacctggtttagtggtttaagccttgtgtggcagatagatcttaaagggcaaagcagtatattggtagttgtcaatatagcagtgctagctctgtctatataaatagagaaatggggttagccatagaggttaaaactacctggttatcccatataataacacaaactgggtcttggatacacagttgtatttaatgttttacgatctagcctttccagtacaggcactttctgagaaacctttgtcctcacttgaggcattttgttgtcgggtttttgtgtttgtttttgtgggtatttgcctcattccacccctgagctttcaggtagacagacgtgattcaaaactctgttctaaggtgtttattgtagtggagtaatgggtttgcagtgataagtcatacttttccaccgaaagggagggcttgggaatccctgagattagctaaagttaagttgttggaagaattccttgattggaaattgtacctttgtgttttgttgctctgtttcctgaaaataactcggggatgctcctggtttgtccatctactgctttgattccttggatcccacccattctttcactttaagaaaaaacaaataattgttgcagaggtctctgtattttgcagctgcccttttgtaagaagcacttttcccaaataaaacaattaaaaaa

SEQ ID NO: 68183 - DNA, 686 bp, Homo Sapiens
catttgctgaaaatgccacttacagctttaatatcaaatatagttatcatagttcacagaaaaagtataaagtgcaaaagctccacttcaaaaggccttaagtcactcccaaagcaatgaggattaaattttaccacagccagtgggcatgccacccttatgtaggacacctacataaggtataaaacaaggtatatatctgaaaacactatattgctctgattacatattgtggttataaaatagttttaaatctggtttaacatacagagaaagatacaattcaaacaattagtcctataaagtaggggttatttatttttttaagtttgcaggggaattatgtctataaaatccattgagaatcccaatctggcccaagacttctctttggccagctggaataatagcacctaggcaaagccttggctatgaaagctttcagattaatttcagtgtaaaaggagctaggagaggggccctgactgggtgagcttcagcatccacctggtccctcagagatggttccatgtctgccccaagggataaagagccaggaaggctcaaatcccagtcctgagggctcatggaagcatgatgaactggcgagagaattttacacacctgacagatccagtaagtggaataggtggtcgtatttttacaaagccttgtgtttgatgaca

SEQ ID NO: 68184 - DNA, 936 bp, Homo Sapiens
  misc_feature (463)..(547): n is a, c, g, or t
  misc_feature (562)..(571): n is a, c, g, or t
aaattagtccctataaagtaggggttatgtttgaatgtatctttctctgtatgttaaaccagatttaaaactattttataaccacaatatgtaatcagagcaatatagtgttttcagatatataccttgtgttataccttatgtaggtgtcctacataagggtggcatgcccactggctgtggtaaaatttaatcctcattgctttgggagtgacttaaggccttttgaagtggagcttttgcactttatactttttctgtgaactatgataactatatttgatattaaagctgtaagtggcattttcagcaaatgaatatgtacatgtttgtgtctatttccaaaatgatttctgaactatctgcagtgaaaatgtatctgatggattgtagagcaaagcacattgcctaaattcatttgttaatgaattgggtaccattgttattaaaaatgcgtaaagtnnnnnnnnnnnnnnnnnnnnnnnnnnnnnnnnnnnnnnnnnnnnnnnnnnnnnnnnnnnnnnnnnnnnnnnnnnnnnnnnnnnnncaaaaatattccccnnnnnnnnnncacaatttggcgcccccggttttttgtaagaaaagggggccccccaatagggggggacgcataacacaaacacgagggagcgggtcgcgcgataataaaacgccgacgtggcaagagggggaaaacaaggaccaaggagcaagagacattggagggaagcaggacccacaacacttaagtgaggggggcacaaaatagggagagagaacaccccaccaaaggagatagtacacagcccacgggggacaaataaacaaaacgagacgaaggaatacaattgtaggaatacaacaaccgagaccaatgtctcagggcgagaaagaatagtggaacaagaggaatatagtgagaagagaaattatcgg

SEQ ID NO: 68185 - DNA, 785 bp, Homo Sapiens
  misc_feature (75)..(116): n is a, c, g, or t
aaaaacagatatacgacggatttcaggtttagtaactgatgtaatatcattgacagattctgtgcaagaactagnnnnnnnnnnnnnnnnnnnnnnnnnnnnnnnnnnnnnnnnnntaggtgatcttctttcaagcagtattgatcgaacagcaacgctccgaaagacagcatctgaaaattcacaaagaattaactctgttaagaagacgctaaccgaactaaagagtgacttcgacaaacatacagatagatttctaagcttagaaagtgacagagccaaagttctgaagacagtgacttttgcaaatgatctaaaaccaaaggtgtataatctaaagaaggacttttcccgtttagaaccattagtaaatgatttaacactacgcattgggagattggttaccgacttactacaaagagagaaagaaattgctttcttaagtgaaaaaatatctaatttaacaatagtccaagctgagattaaggatattaaagatgaaatagcacacatttcagatatgaattagtttgacattattgagattagactaaggtaatttttttaatgggacctctcatgagaagactggtaaatcaaaaataatgatattttggagcaaaagtcattttatatttaatcctattttgtacagtaaaaataaaactttaaaacaggttgattttccaaaataaatatgctaaaacctattgtttgcaacttgtacatagcaagaacgtttatccatccttctgacatacatgttgtaccgcacggcataagtg

SEQ ID NO: 68186 - DNA, 677 bp, Homo Sapiens
  misc_feature (101)..(113): n is a, c, g, or t
cattagtagctgtttattgatcaatggtttgatataaagttatttcagatcttcagacttttgcccagatggaatcacaagcattacaaagttttttcttnnnnnnnnnnnnnggataggggcaagttgggaggggaccaacctagcagtagtggcatttgagaataaattaacaaaaaaatttagtattaccatttattgatgacaaacacttaagttttacttacattccatggggagaaaaattccagcgtaaacaatgaatggaagcagtacttaactcgcagggctaccaggctttccatacggaccacacgcagagcctcagtgcacacacttctgtgtacagtaacacaacatcaaaagcaacacagctgtatacagaaacgtaggtcattcttttcagccctaatggagatgtaattaacagtatcgagcactctggaaaatcactctgcaggtttatatggactacatggagatcatatcctgtagtgtagtgaaagctaagtcctcaagagccatatgtatagatacacaatgttttttaataatctttaaaacagagatcaaagttcatttaagtcctgtttgcattaacaaaaataaaaatgaaataaaaatggaaccaaatgatcatctaaagtttaaaattcctaaattgtccaatttataca

SEQ ID NO: 68187 - DNA, 973 bp, Homo Sapiens
  misc_feature (371)..(412): n is a, c, g, or t
cgggggctgggcagacccccgaacgtgcctgagcctgctgtcgctggggacgtgcctgggcctggcctgtggcagaaatctgaagctatcatggaacaattgaagtcttttcaaataattgctcatctaaagcgtctacaggaagaaattaatgaggtaaaaacttggtccaataggataactgaaaaacaggatatactgaacaacagtctgacgacgctttctcaagacataacaaaagtagaccaaagtacaacttccatggcaaaagatgttggtctcaagattacaagtgtaaaaacagatatacgacggatttcaggtttagtaactgatgtaatatcattgacagattctgtgcaagaactagnnnnnnnnnnnnnnnnnnnnnnnnnnnnnnnnnnnnnnnnnntaggtgatcttctttcaagcagtattgatcgaacagcaacgctccgaaagacagcatctgaaaattcacaaagaattaactctgttaagaagacgctaaccgaactaaagagtgacttcgacaaacatacagatagatttctaagcttagaaagtgacagagccaaagttctgaagacagtgacttttgcaaatgatctaaaaccaaaggtgtataatctcaagaaggacttttcccgtttagaaccattagtaaatgatttaacactacgcattgggagattggttaccgacttactacaaagagagaaagaaattgctttcttaagtgaaaaaatatctaatttaacaatagtccaagctgagattaaggatattaaagatgaaatagcacacatttcagatatgaattagtttgacgttattgagattagactaaggtaatttttttaatgggacctctcatgagaagactggtaaatcaaaaataatgatattttggagcaaaagtcattttatatttaatcctattttgtacagtaaaaataaaactttaaaacag

SEQ ID NO: 68188 - DNA, 1278 bp, Homo Sapiens
tttatttgattccatctgaaaattttcaatgaatttgaataagtcaatccatccatagacattatgaacttagaatccgatcctgttgaagagcaaccatcgtgatggttggtactgcagaggtggtggggccgtggcacactagaaaagttgggtcacgctgagtaggaaacatttgattgtccctggtgcttttagctctgggcacggtcaaaggcctctcttctggcatggctgtccagggtttgtcccaatgtgtctgagtgagccagcttgagaaggggtcgtgccgtttcttctttcacacaggggaaaaaaaagaccaaacacggaggtgcccagggtgtggatctgctggtgtcccgggagaaccagctggctgggcagcccttcttccccacaggcagctgctattgcgtagggaccgccaggtcaccgagtggccatcacaacaaaccccagcacagtccagcccggccacagccgcctccttgtgtttctgttgtcttccctgctgctgcccacatcctttacccaccgtgtctctcggcccactggaggtatcagaaattccaaattttcaaagcagtttcagtattttcagtatatatgttgggattttataatggttcatggccagaaaaggttcagcacctcccacacacagacattggtccgtttcctgttcttggcatctctgtactttgttggtcaaactcagacagcaactctaagatgttcagcgcagccatatcatggcaggactccacatccttgccgataccatggctgatcagaggtggctgagaggagcaattgataagagatacaaattcgttcttgttgtttttggggaagtctttgtattcaacctggaatccctggactctggaaagatagtccagttgctcagagggtctcgtgagaggtccatggggtacgtggcctgaagagatgttattctttaaaatggtctcggctgtgggcgaggtgcccccatacaacaactctcgggctatcatggcagttaccgtggccttggcaggattcggagctgccctggtaaaatctttggtgtgatgtccttgactaactcctacagcctgggcgacctcgggcaccatgggaagaattccagcaggcagctgctgatgacttagataaggcatcctgaactcatcctctttattactagtcccattttcatccccagagccaggttcaaaaaaggttacttttcttccatcccctggtttctttatgggtgtcttaaaaaag

SEQ ID NO: 68189 - DNA, 941 bp, Homo Sapiens
  misc_feature (314)..(336): n is a, c, g, or t
  misc_feature (825)..(837): n is a, c, g, or t
tttgattgatatgacactatataaaattttcatttgagaatttctcaattgtatctagttaaatagcacagtttggaaacttgtctgagactgactttatcaataatctaaccgacaaagatcatatccatgtgtatgtggttagacatttttatttcattgactaacccaggacagtttcagtgatgcaaattgtgtgccctctggttcagctgaaacagtcctggactttcaaaaaccttgaataagtctcccacagttgtataaattggacaatttaggaattttaaactttagatgatcatttggttccnnnnnnnnnnnnnnnnnnnnnnngttaatgcaaacaggacttaaatgaactttgatctctgttttaaagattattaaaaaacattgtgtatctatacatatggctcttgaggacttagctttcactacactacaggatatgatctccatgtagtccatataaacctgcagagtgattttccagagtgctcgatactgttaattacatctccattagggctgaaaagaatgacctacgtttctgtatacagctgtgttgcttttgatgttgtgttactgtacacagaagtgtgtgcactgaggctctgcgtgtggtccgtatggaaagcctggtagccctgcgagttaagtactgcttccattcattgtttacgctggaatttttctccccatggaatgtaagtaaaacttaagtgtttgtcatcaataaatggtaatactaaatttttttgttaatttattctcaaatgccactactgctaggttggtcccctcccaacttgcccctatccnnnnnnnnnnnnnaagaaaaaactttgtaatgcttgtgattccatctgggcaaaagtctgaagatctgaaataactttatatcaaaccattgatcaataaacagctactaatgaaaa

SEQ ID NO: 68190 - DNA, 487 bp, Homo Sapiens
tttacttgaagtagattgtctgaataggcatcctcatctatatttacccaaaacctcgcttactgtcatgtgcactacaaattgcaatttggaaacctactgtattgaaattctgtcagtttatggttcttgaagactgatgtcctttcccaaacactggttactgcagcagcatttttaatgtgtaagtgaagaaaaaaggccactaaggccaaagattttttaagaatcattgtacaaatcattatgttaaactatctaagctttgctgtaatactgttttctcttcaatatgtgatggtacaggaaggatgttaaatgaaggggtggtattgcaggagagcattttaaatggcagaagtaaaaagttataatatttataattttgatgggtttaagtttatttttgtagggaagatttttctcccctaaaatagtttctagaatggcaaaattgtttccattattaaaaattgaagttattaaa

SEQ ID NO: 68191 - DNA, 597 bp, Homo Sapiens
gaaatgatatctggcccccccttaacactggagccccactcccttctcccatccggcccgagattagggaggattgactgtgtcagggatggcgggtgcctctctcgctgccagggcccttgtcagagcagccaggctggacagacggcctccctcctctccatctgaccggcacctgctgcttcggggcttaggccaccgctccctgtccccagaggagatagccccagatggactggaatgttgtggcatgagagcgcatgtgtgcgatggccccgctgtggtcccctctctgtccctccatctgtatgtgttctgtgtcccttgcatgtgtgcgtgttagagtgagcgcgtatgcatcaactcattgggctcttggctgctcacaaggcaaatttgacttggaaagactttcatctccttggaaccaagacttcctgagtccccctcaccctggccctgttccaccatggttatctgggtattggggaatggaaactttgggggagtgactttttaaagagacacttataatttctactactgcactactgtccattgtgggatgattaaacatggtatttaactgtgaaaaaa

SEQ ID NO: 68192 - DNA, 3221 bp, Homo Sapiens
  misc_feature (518)..(527): n is a, c, g, or t
  misc_feature (1375)..(1375): n is a, c, g, or t
  misc_feature (2044)..(2085): n is a, c, g, or t
  misc_feature (2676)..(2676): n is a, c, g, or t
  misc_feature (3128)..(3128): n is a, c, g, or t
  misc_feature (3133)..(3133): n is a, c, g, or t
  misc_feature (3204)..(3204): n is a, c, g, or t
cagtcgacggtaccggacatatgcccgggaattcggccattacggccgggaatctcactttatttttgctaataagtagactaagtgctctgtgttctcagtcttccctttttttctgcccccattcttacttgtcccaggcatgcagagaaagatggtgatattttaggccaggagtataccttgctataacctaagcatgccttctttattccagctcctatgttctgtgtatatcattaacattttcccaaataaacacttaattctcttttccctaggtgccatctcctcaagctacaaaatgtccacatcttatatcccctttgcttctactgctctgatttgtggtaccagtactctctgccactgaacattttgaaatattttgttttagatttgcaaaaaatgacatataggtcagtactcacatggatttttaagataaatcacctgtgtgataatattttgaatctgagacgaatacaacttttaaaaattgtttttaaaaatagacnnnnnnnnnnagagcagttgtaggttaacagaaaaattgagaggaagatagagatttcctttctcccctgacaaagccctcaacagcctcccaggctatcagtatcctgcaccacaatggtacatttgttacaatcaatgaacctactctgaaacatcattatcatccaaagttcatggtttacattagagtcccctcttggtgttatacatgctagaggacaaatatatgatgatatgtatgcatcattataatatagtatagtttcgctgccctaaacatcctctgcaaatgcaactattttaatgggtaccaaagaagtaaatgtatttactggcttttagataataaataacgggctttattgtttattttaaaagctacaatttgttttagctggtttctctgttctattaatgctttgaatttccaaatttaatatatgtagtcatgcatttaacttaatatttaattatttgatttatttaattttctatattcttacaatgtatgtatgatgtataatttaagggaaagctatgacttctcagtttcttagaatcctaggtaaataaaacaataaaaagaaaacccttacatttaaaagagctttcaggtaccagaagtattgatacaactaagatcctaaatgttttaattagtgtttacttaagcctttttcaggtgaggaggtactaatgctggttatttccttgaagctttatgtggacctataaataaaaatccaatctcctgctaataggtatgcataatgtgagaaaaacgttaggagctggtagtaaaaaatgagattctatgccaaaataacttctcttcatatttgcctaggcattcctntgacctttacccactaacgcaaggagaaggaaatcataatgatgtcatgtgatcaaaggaaaccatggaagggttcacgctgatagctgatagcttttacagtgctcattcctaacagtggatttacttgtaagctttcagatcaacacaaatagctgcagcctgggttaaaatataacatcactatttggcttttgttttgcatgatttttaaaagcagtactcctagggaaatggcctctgaagtatatcagtttcatctcttaccaagactgttaagaagaaactagtgggattttgaacaagttatataattgtggtctgaaaagaccctaaactgaagttctgtttaaatatagttacatgaatttctctgatactaatgtactcaacagccaggtataaactatatctcctagtaacattttccatttttgtttaatcaaatacttgcttatgaaggatttcagaaatttgtaataaatgtcagcttttgatagcatagcagtaattgacatttcaaaaatatatatttctttctgtgtttggttgggtgtaatgaggaaaatacctgataaaatgtctgaagacactttctaatgttatcttggtgcataagctgtaatttttattcaaaattaaatttcaaatgtttgcagttttggctannnnnnnnnnnnnnnnnnnnnnnnnnnnnnnnnnnnnnnnnngcagcccctcgcgccagatgtgggtccaccgcacccctccctgggagggagtcttcccttcacccttgcatctgggattgccggcgcaacttcggttaagaacccggtggcccaaagaaggatttccccaagcacctacgggcctcttggaccccagcccgtcaacacaacactccctcgtagaaaaacggggctcgcggggagaaggaagagacccccctgcagatgcacgccggacagagctctgcccggaacgcccgctccgccgagggatgtctctctagcggcgcccctcccgccacacgcgcactatccccgtcctgggcacggcgagagcgcgggtgacgccgcccccagagcactcgttgtttaccagaccttcaccgtctcgcgtgcagattctcttgcatttcggacgcgggcgtgataggttgccgctagaaccgcgcgctatgtgccccgtctattcatctacagtcacccgcttaccatttgcggcgcccggcggcccgccctatacttctcagccgcccgacccatgtgcttgattacataccgcgcctcatggccggtgtctcgtgtaccgcctgnccgtgttgcgccctgagctctatgcaaagagagacaatatctctcccctcccgccgtcgtgtggaggactcacaaaaccagcaccatctgggtcgccggcgccaaagaaaatccgccggcgctcgcagcataacagcgcataacgtgaaggtgtcaccaccacgacgcatggaggatggtagttgatccctcctctgacgcggtcgttgggtgcggtgcatatatcggggccatcgctttcgtgcgcgacataataacagtgacgggcgtctatatacttccccccccgaacagcacactcaccgcccgttctcccttaaccggcggcgccaccaaaccacgcccgatccaaggcggctggtctaacctgcgcggcaccgcgcgacgcgcatgcggtcggcacccccgcccctttctgagcacgaggacgctcgacgattgtgatctacggngcgtntactaaatcgcggtcgcgggctacataaagacactcttctctccagacgcacgtcgagtcagtcggacgtnaaactagatgaaaacta

SEQ ID NO: 68193 - DNA, 490 bp, Homo Sapiens
taagcccccgagacgggagtcttcgctctgtcacccaggctggagtgaaaagtacagtgcaatttgctaatgcacatcctgcacatttctggagaattataataaacttatctgcaagtgaagcaggcctcctcttctgtaatctctcaaaacatctggaatatattgcatatattatgaaagggacatctttttcacagatgccccaccgttacaacgtgtacctttgcttagtttaaaaattgactttaatactttatgcaaatagtgcctgtcccaaattctagcatgcacatggatctaccaacaaaaaaactaagttttcagtgtgtgaacataaacttcaaattaaacctctggatgctttagcccatgtatcaatttaccaacagattttcttcatcaatgtctgcagaccacattcatgatttttcaggctttgcaccattacttgatacacctattccacggcttgtttctttggctgaag

SEQ ID NO: 68194 - DNA, 1372 bp, Homo Sapiens
  misc_feature (340)..(376): n is a, c, g, or t
  misc_feature (385)..(397): n is a, c, g, or t
cagtcgacggtaccggacatatgcccgggaattcggccattacggccggggttcacacactgaaaacttagtttttttgttggtagatccatgtgcatgctagaatttgggacaggcactatttgcataaagtattaaagtcaatttttaaactaagcaaaggtacacgttgtaacggtggggcatctgtgaaaaagatgtccctttcataatatatgcaatatattccagatgttttgagagattacagaagaggaggcctgcttcacttgcagataagtttattataattctccagaaatgtgcaggatgtgcattagcaaattgcactgtacttttnnnnnnnnnnnnnnnnnnnnnnnnnnnnnnnnnnnnngggggcttnnnnnnnnnnnnntgctgtttctaaatgaatctgtgtaatggggcccagatgtgggttggctcagtattagtagacaaggtcttgtgttcagacgattaggtgcctaactggcaaatgccttagtttcttaaaacgtatttactgatgtggcttaacatttcaaaagtgaacttgattcaaccctgagaaaactgattaaaaaactcagtttaaatttgccagcagggaagtaaaataattatgggaagagtgtcttaagcctaatattaaatcagttgtgttaaggggaaaactcaatagttctgttacttaggctgttagatccaagttgatttttgtgtctacagctaaattttgtttacaattaggctattttttaatataggatttagaaaccaagggtatgtgttttaaaattacactttttcttaacctgtctagctgtcggaaaaggtaacagaagatggaactcgaaatcccaatggaaaacctacccagcaaagaagcatagcttttagctctaataattctgtagcaaagccaatacaaaaatcagctaaagctgccacagaagaggcatcttcaagatcaccaaaaatagatcagaaaaaaagtccatatggactgtggatacctatctaaaagaagaaaactgatggctaagtttgcatgaaaactgcactttattgcaagttagtgtttctagcattatcccatccctttgagccattcaggggtacttgtgcatttaaaaaccaacacaaaaagatgtaaatacttaacactcaaatattaacattttaggtttctcttgcagatatgagagatagcacagatggaccaaaggttatgcacaggtgggagtcttttgtatatagttgtaaatattgtcttggttatgtaaaaatgaaattttttagacacagtaattgaactgtattcctgttttgtatatttaataaatttcttgttttcattcttaaaaaa

SEQ ID NO: 68195 - DNA, 1485 bp, Homo Sapiens
cagtcgacggtaccggacatatgcccgggaattcggccattacggccggggagtgcgcatccggacgtaggaggtggaggttgtggaattcgccgttcgaaagcagggactaaaagccccacttcgtcttacgttccgaaaggaaggcgtctgttgagcctttctctcagtcgtgagggaggcgtcgacggcgtgcggaagtcctgagttgaggcttgcgggatcctttccggagaaagcgcaggctaaagccgcaggtgaagatgtccaactacgtgaacgacatgtggccgggctcgccgcaggagaaggattcgccctcgacctcgcggtcgggcgggtccagccggctgtcgtcgcggtctaggagccgctctttttccagaagctctcggtcccattcccgcgtctcgagccggttttcgtccaggagtcggaggagcaagtccaggtcccgttcccgaaggcgccaccagcggaagtacaggcgctactcgcggtcatactcgcggagccggtcgcgatcccgcagccgccgttaccgagagaggcgctacgggttcaccaggagatactaccggtctccttcgcggtaccggtcccggtcccgtagcaggtcgcgctctcggggaaggtcgtactgcggaagggcgtacgcgatcgcgcggggacagcgctactacggctttggtcgcacagtgtacccggaggagcacagcagatggagggacagatccaggacgaggtcgcggagcagaaccccctttcgcttaagtgaaaaagatcgaatggagctgttagaaatagcaaaaaccaatgcagcgaaagctctaggaacaaccaacattgacttgccagctagtctcagaactgttccttcagccaaagaaacaagccgtggaataggtgtatcaagtaatggtgcaaagcctgaactgtcggaaaaggtaacagaagatggaactcgaaatcccaatgaaaaacctacccagcaaagaagcatagcttttagctctaataattctgtagcaaagccaatacaaaaatcagctaaagctgccacagaagaggcatcttcaagatcaccaaaaatagatcagaaaaaaagtccatatggactgtggatacctatctaaaagaagaaaactgatggctaagtttgcatgaaaactgcactttattgcaagttagtgtttctagcattatcccatccctttgagccattcaggggtacttgtgcatttaaaaaccaacacaaaaagatgtaaatacttaacactcaaatattaacattttaggtttctcttgcagatatgagagatagcacagatggaccaaaggttatgcacaggtgggagtcttttgtatatagttgtaaatattgtcttggttatgtaaaaatgaaattttttagacacagtaattgaactgtattcctgttttgtatatttaataaatttcttgttttcaaaaaaaggaatttaa

SEQ ID NO: 68196 - DNA, 994 bp, Homo Sapiens
  misc_feature (102)..(365): n is a, c, g, or t
cagtcgacggtaccggacatatgcccgggaattcggccattacggccgggaagataggcaatgtcaaacccatgaaaatgggagattaatgagctttatttnnnnnnnnnnnnnnnnnnnnnnnnnnnnnnnnnnnnnnnnnnnnnnnnnnnnnnnnnnnnnnnnnnnnnnnnnnnnnnnnnnnnnnnnnnnnnnnnnnnnnnnnnnnnnnnnnnnnnnnnnnnnnnnnnnnnnnnnnnnnnnnnnnnnnnnnnnnnnnnnnnnnnnnnnnnnnnnnnnnnnnnnnnnnnnnnnnnnnnnnnnnnnnnnnnnnnnnnnnnnnnnnnnnnnnnnnnnnnnnnnnnnnnnnnnnnnnnnnnnnnnnntacatttatttttttcattttcagttaacagtgtactcttataacaccgttattagctggtactttggtgatttctattactagtttttctaagctatttacagagtgtttgtagctttcatttgcagcattatgttcccacaaattctgtactcagcatatacagtatagtttatctgctctatttctgtcttatagaaatcatgaatgtggtctgcagacattgatgaagaaaatctgttggtaattgatacatgggctaaagcatcagaggtttaatttgaagtttatgttcacacactgaaaacttagtttttttgttggtagatccatgtgcatgctagaatttgggacaggcactatttgcataaagtattaaaagtcaatttttaaactaagcaaaggtacacgttgtaacggtggggcatctgtgaaaaagatgtccctttcataatatatgcaatatattccagatgttttgagagattacagaagaggaggcctgcttcacttgcagataagtttattataattctccagaaatgtgcaggatgtgcattagcaaattgcactgtacttttcactccagcctgggtgacagagcaagactcccgtctcgggggcttaaa

SEQ ID NO: 68197 - DNA, 438 bp, Homo Sapiens
agatcgaatggagctgttagaaatagcaaaaaccaatgcagcgaaagctctaggaacaaccaacattgacttgccagctagtctcagaactgttccttcagccaaagaaacaagccgtggaataggtgtatcaagtaatggtgcaaagcctgaagtaagtattctaggtttgtcggaacaaaactttcagaaagccaactgtcaaatctgattagccacttatatcttagactatactttttgggaagtctagagatgtatataatgtgctaaattcaaagtagcaaatctgaagataggcaatgtcaaacccatgaaaatgggagattaatgagctttatttggccgtgcatggtgcctcatgcctgtaatgaggcagatggcttgagtccaggagttcaagactagcctgggcaatgtggcaaaaccgcgtgttta

SEQ ID NO: 68198 - DNA, 1069 bp, Homo Sapiens
  misc_feature (83)..(83): n is a, c, g, or t
  misc_feature (137)..(137): n is a, c, g, or t
  misc_feature (221)..(222): n is a, c, g, or t
  misc_feature (228)..(228): n is a, c, g, or t
  misc_feature (231)..(231): n is a, c, g, or t
  misc_feature (273)..(274): n is a, c, g, or t
  misc_feature (277)..(277): n is a, c, g, or t
  misc_feature (296)..(296): n is a, c, g, or t
  misc_feature (301)..(301): n is a, c, g, or t
  misc_feature (309)..(309): n is a, c, g, or t
  misc_feature (331)..(331): n is a, c, g, or t
caattgctcatggcttatttttggagtacaaaagattcagtggctgcttatctttttcctactcaccacaaacctgtgcatcntgagcatgagacggacaccacagagtgtgcttcccagcacaagatgtgtgtatntggtcattggatgttgttgttctgtgttcagatgtaaggctgacttctgtgctttagtgagctgacaaattcagatcacccgcnntgatgntanggaaacctgacgtattactagatgcagggcatgggggtcagnntgnaagttgagcaacacctctntgccntccttccnttgtcccatctcccagcgactnccaatattcatgtttctgagaatgtgtccctcttcaggttccctcttggtgcctaacctggattagtaatgtgcattcaggtgaattttcagctgaggctctgagaactggtactctcagtgtgttctggtcatcttgtggcttagttgtagaagcaggtgtgtctcttgcctctgcttgcctcctactgcacactcagcacccaggactggaatcaccgactactgaatctcctacatgtattgctgctacttcaagctcctccacttgaaaccttatgattttcccaaggggagatgggacagtgtcatctaaatattccgaatgtttggccttctgagaaaagagcttctagtaattgaaccatgggaaacccagcttctggagggttggccgtggggctgtgtacatgtgtgtgcccaggggtgagtgtttctcaggattcctaacgattcaaattaccgttgagtatatataaagaatgagtctctgtatggaagaacaaatgtgtgcattcacccccagtcacaatggtctccattgcatttcaaaggagaggatcagactatctgaatataaacacaatctgatgttaatttattctaagaacaccatcattttgattgtcctaaagaattctgcctttgtgaataccgtgttaaatttttttaaatttgtgacaggattgtagcaaattattatttaaggaaaataaattgtgtaaacatttaatgtggt

SEQ ID NO: 68199 - DNA, 604 bp, Homo Sapiens
tttaactttgaaagttaactcttcaaatgggagactctttgaaatgacatgttcctttaaggtactgaagctttatttgcatatttatttcagatgtttcgagtaaacttgaaaagggtaggcacgaagcaatttgttgctgcttgtcacccccaagtccccgtggaggttctgtattttaagaaacagtgcgttgagtgtacagattttatttatgcgtaatttaatggggtctgtaaatactggtgcacttcttacgacttttttgagacatgggatccaattttaatattaacttttaatggtgatggggtaatctataacacatcataaggttttattcatatatatacagggtattaagaattaagaggatgctgggctctgttcttggcttggaagattctatttaattgaaactctctgttcagaaagcaataactttgtctcgttcctgttgggctgaaccctaaggtgagtgtgcagtacagtgtgtgtgggtgaaatggagatttggaattgaactctctgcctgtaaatgttccccaaaataattgttgtgtgtatgatacgtgtataataaaagtattcttgttagaatctg

SEQ ID NO: 68200 - DNA, 2802 bp, Homo Sapiens
  misc_feature (41)..(58): n is a, c, g, or t
  misc_feature (997)..(1032): n is a, c, g, or t
tacgtctaagtacgagcctgggtggcgaaattgcagacgannnnnnnnnnnnnnnnnnctacaaaaggaagatcaaattgccatctgtctggcttattttgtgtgtgcatgtatatataggaacagcttgaggggaagggttatgtcatgcaatgaagcaaaaacaagacgacctcctctgacagaggagccttagtgttgtagaagagaagcaaggctgaggtcactggaaaggcttagaatgaagctgctcttgcctgttcctcctgagaacccagagcagcagtggtccagggcacaaagcataatgatctctcatgaggattcctatctgaacacatcagaagtcctatgaacatagataggtctgttttagaatataaatggtagtgacttcctgcgctcctgaggcggggcaaaataatccataaacacataatccttctgggcaataatgtttctggactcgccagcagagggctctaggaacagaggtgggggtagagtcggggagaaaaaaggttctagagatggcatgtcttcaggggaactttgagaaatgtcctttgttccagcattcctaagtgacggcaccggtgagcctggtctgaattgtcatcagtgtcactgccgaggccaagggccaagggtcaagatgccactttaggttgagaagaaagtgcatctcaaggccagtgagggctgcaaaatggtttgcggctggcccagaaggagcaaatgtagaaaggctcccctttttagatgccgatggtctgtagaactcgcctctcattgtcattaaggtggcctgaaaacattatgtagcagggctgctgagcaaactggcagaggaaatctgtgagatatgcctgcagatcaatctgatagagaggatccttcagggcatcagggtcatcttcctcatcatcctcgtagtaatcctcctcatatttacttgtagcaagaatgtcagataaaagttggccagctaaaccannnnnnnnnnnnnnnnnnnnnnnnnnnnnnnnnnnncacatatcattggagtcatcttgactccactctgcaggagtggcctggcgagcggcattagcctccatgacgttggagagctcgttgatgatcagctttaggatcttgaccagcaaaggaatgtttgtccagcgttctgggtttttggctgacttagagcgggtgcggatgccctcatccatgctgtagatctcctctcccttcacacggatatcctgtagccgtttgtcatctgcattgatgccatgctggagcagcttacagagtgccacagagctgactttgccttcatactgtccatagaacaggtgctgtcggcttgtccactcagccatcacaaactctagagcaggtttgccagtaggtcctgggaggctacacaggaactccaagagaggttctagctgagtgtgcaccagatgagcgaacaccatgatcagggactgcatgacactgagcgtctctgcctgctgcatcttactgaggatggcacgaagaatctggtctagattctccccgagttcccgccctgccttggagatgagggtggaaacaaggcggcccacaaaggccgcagtgaactctgaggtgcgggggtccaggagctggctcaccacttgcatcacataccacagtccattgtggccctgctcatcatgccactgggctacttgttccagggtcactgacacataggcccgcaagcactctccgccattctgcatggtggcattgtcatctgtgtgaagggtacactgtgccacagcagggaaagcttggcagatgagaagctgggaaaggggaggctttgtatttcgtactactgttgtcaggatatcaactggtgtcgcacaaagccctgcaggaatcttgtctgctggggcctgcattatgctgaccagagtgggaatcagcctcatttgcattgggccctgacaggcttcaatctgggacagctccttgaagatgtcctgagccagtgaggcgacgacgggatcattactgtactttaggaaaatggcgatggtgaaggggcagattttgctttccatgcttgctgtgaattcggggtctactgtacaaacgatgcacagggtctccatcaccaggttgaggacctctgagctgaactgggctgctaggtgaattaagccatcaaggatgctggggaggaagggctggagcacgtgggtactctctgagactttcagttggtcacaataaccccagatggctctcactgcagaaattcgaactgatgggggctgtgtctcgtgaagaccactaactgttgcctgtaggaactgctggatcagttcaggggacatagcaacagtgaaccgactggcagcccaaagtgcccggcccaagaggaaaggagacactgagaggttgaggtctgcaaggatgacattggtcaggaacccatgcatgtcaaaatgaatcctgccatttttcacactgtcagtgatgatggccttcactgagcctagggcaagcatgcatgcctcatggatcttccaccagtgctcagtgccactgtttttggtttgctcagcttcttgtaaatgtcgagtggctgcagcagccagggctgctgcactttcattctggaaatctgtggccacagccagcaacaagtcttgagctgctattctaacagtataggagaatgtatcatcatcttcatcttctacaaattgttgggggttggctgtccatactttaatccctcgtgccgaattcggcgcgccgtcgacttcatactct

SEQ ID NO: 68201 - DNA, 428 bp, Homo Sapiens
  misc_feature (25)..(25): n is a, c, g, or t
agatttgtgataggtgagtggacangcccgacagcacctgttctattgacagtattaaaggcaagtcagctctgtgggactcttgtagctgctcccgcatgggatctaatgtccataacacacgggtacaggatataccgtgtgaagggagaggagatctacaggatgggatagagggcatccggacccggtctaagtcaggccaaaacccagaacgctggacaaacattcctttgctgggtcacagatacctaaagctgatacatcaacgagctctccaacgtcatggaggctaatgccgctcgccaggccactcctgcagagtggagtcaaggtgcaccaagcccttactcccaggagacttttagcctggcagatcaagttaccaattgtccaattatcaacttgggttgttgagtcactaattg

SEQ ID NO: 68202 - DNA, 2353 bp, Homo Sapiens
  misc_feature (2154)..(2200): n is a, c, g, or t
aaggtagcgaggcctgggtggcgattccggcacgaggccacccccttctccaacacctaacaaagagatgaagaacaaagcagttctttgcaaacctttaacaatgacaaaagctacttactgtaaacctcacatgcagaccaaatcttgtcagacagatgatacttggaggacagaatatgttccagtgcctatccctgtgcctgtgtatatcccagttcctatgcacatgtacagtcagaatattcctgttcctactacagttcctgttcctgtgccagttcctgtttttctgcctgctccattggacagcagtgagaagattcctgcagcaattgaggagctaaaaagcaaggtttcttcagatgctcttgatacagagttgcttacaatgacggatatgatgagtgaagacgaggggaaaacagagacaaccaacatcaacagtgtaattattgaaacagatataattggttcagaccttttgaagaactctgacccagagacacagtccagcatgcctgatgtaccatatgaaccagatttggatatcgaaatagattttcccagagctgctgaggagcttgatatggaaaatgaatttttattaccacctgtttttggcgaagaatatgaggaacagcccagacctcgatctaaaaaaaagggagccaagagaaaggctgtatcaggataccagtctcatgatgatagttctgacaattcagaatgcagctttcctttcagaatactacgtatggcgtataatgcatggaaacactgggtcaaaactaggcaacttgatgaagatcttctggtattagatgagttaaaatcttctaaatcagtaaagttaaaagaggatctactctctcacaccacagctgagcttaactatgggttagctcattctgtcaatgagatccgacggccaaatggagagaattatgcacctgacagacatctattacctttgccttggaatacaggagtatttgtgtggaagtaaatcgaaaagacaacatatttattgatcctggataccaaacatatgagcaagaattgaataaaatactgcgaagctggcaaccaagcatacttccagatgggtcaatattctctcgagttgaagaagactatctctggaggataaaacaactaggatcacactctccagtagctcttctgaatacactgttctactttaacactaagtattttggcctgaaaacagtggaacaacacttaagactttcctttggcactgtgtttaggcattggaaaaaaaatccttgaacgatggaaaacaaagcgtgtcttcgataccaagtgtcttccttgtgtggaacagataatgaagataaaattactactggaaacaagaaaacatgaagatgatgagccagtatttgaacaaattgaaaacacagccaatccttccagatgtcctgtgaaaatgtttgaatgctacttgtctaaaagtccacagaatcttaatcagaggatggatgttttttatttgcaaccagaatgctctagttctacagatagccctgtctggtatacgtctacttcactggaccgaaacaccttggaaaatatgcttgtacgggttcttctagtaaaagatatttatgataaagacaattatgaactggatgaagacacagactaaaaaggaacgttgcagaagcaatcgggataaaacagcattagatagtcatgctgctagatctttattatggaaaacatttcaagtttactccttctgttttgagttttgtagcagtgtacccacgctgggtattaccatgtaaataatctgtgagtgaaagttgccattattctatgtagtggttttaggatacttaacaaatacattcaaattctttttttattattatttatttgattaggtatgtttgtaactttttacattacagaatatgaatgagaatgtgccatgtataatttttttcttgtagtaagaaacatccatattgcacaactctactgttgcaaagcttccttggaagggggctcttttactgggttcttaaccagatggttgtgtatgggtagcactactaaaagtttagaacttgcagtgtctttcggaatttttaaaataaactgtaaactaataggctgggnnnnnnnnnnnnnnnnnnnnnnnnnnnnnnnnnnnnnnnnnnnnnnngttactgaagccttacaaggttatgtagagagataccatcttctgtaccaaaaatagacaagagaatgctgtcaatattggtgtactgtaatgtgaatctatgctggtgaaaacaattttttgttccccttattaaaaccttagtgtcctttt

SEQ ID NO: 68203 - DNA, 1024 bp, Homo Sapiens
  misc_feature (86)..(86): n is a, c, g, or t
  misc_feature (95)..(466): n is a, c, g, or t
  misc_feature (484)..(507): n is a, c, g, or t
  misc_feature (722)..(767): n is a, c, g, or t
tgtcgtcaggggccggactatggaaaaccccgcaacgcggccttttacgttcgtgccttttgtggcctttgctcacatgtccttcntgggtatcnnnnnnnnnnnnnnnnnnnnnnnnnnnnnnnnnnnnnnnnnnnnnnnnnnnnnnnnnnnnnnnnnnnnnnnnnnnnnnnnnnnnnnnnnnnnnnnnnnnnnnnnnnnnnnnnnnnnnnnnnnnnnnnnnnnnnnnnnnnnnnnnnnnnnnnnnnnnnnnnnnnnnnnnnnnnnnnnnnnnnnnnnnnnnnnnnnnnnnnnnnnnnnnnnnnnnnnnnnnnnnnnnnnnnnnnnnnnnnnnnnnnnnnnnnnnnnnnnnnnnnnnnnnnnnnnnnnnnnnnnnnnnnnnnnnnnnnnnnnnnnnnnnnnnnnnnnnnnnnnnnnnnnnnnnnnnnnnnnnnnnnnnnnnnnnnnnnnnnnnnnnnnnnnnnnnaagaattcggcacgaggnnnnnnnnnnnnnnnnnnnnnnnnttatatacatatatatatttgttttttattgattgggtgatgcagaaagccacaaatgagaaaaggacactaaggttttaataaggggaacaaaaaattgttttcaccagcatagattcacattacagtacaccaatattgacagcattctcttgtctatttttggtacagaagatggtatctctctacataaccttgtaaggcttcagtaactnnnnnnnnnnnnnnnnnnnnnnnnnnnnnnnnnnnnnnnnnnnnnncccagcctattagtttacagtttattttaaaaattccgaaagacactgcaagttctaaacttttagtagtgctacccatacacaaccatctggttaagaacccagtaaaagagcccccttccaaggaagctttgcaacagtagagttgtgcaatatggatgtttcttactacaagaaaaaaattatacatggcacattctcattcatattctgtaatgtaaaaagttacaaacatacctaatcaaataaataataat

SEQ ID NO: 68204 - DNA, 1839 bp, Homo Sapiens
  misc_feature (68)..(106): n is a, c, g, or t
  misc_feature (110)..(144): n is a, c, g, or t
cactcgaaattaaaacctcaacctaaattaagagggggcggccttcaggccgtccgttttcgtctagnnnnnnnnnnnnnnnnnnnnnnnnnnnnnnnnnnnnnnnccgnnnnnnnnnnnnnnnnnnnnnnnnnnnnnnnnnnncagtcgacggtaccggacatatgcccgggaattcggccattacggccgggggcacagccagagcctaaaggctagagccggagctgccgcgccagtcgcctagcaggtcctctaccggcttattcctgtgccggatcttcatcggcacaggggccactgagacgtttctgcctccctctttcttcctccgctctttctcttccctctcgtttagtttgcctgggagcttgaaaggagaaagcacggggtcgccccaaaccccttctgcttctgcccatcacaagtgccactaccgccatgggcctcactatctcctccctcttctcccgactatttggcaagaagcagatgcgcattttgatggttggattggatgctgctggcaagacaaccattctgtataaactgaagttaggggagatagtcaccaccattcctaccattggttttaatgtggaaacagtagaatataagaacatttgtttcacagtatgggatgttggtggtcaagatagaattaggcctctctggaagcattacttccagaatacccagggtcttatttttgtggtagatagcaacgatcgtgaaagaattcaggaagtagcagatgagctgcagaaaatgcttctggtagatgaattgagagatgcagtgctgctactttttgcaaacaaacaggatttgccaaatgctatggccatcagtgaaatgacagataaactagggcttcagtctcttcgtaacagaacatggtatgttcaagccacttgtgcaacacaaggaactggtctgtatgaaggacttgactggctgtcaaatgagctttcaaaacgttaaatgaaattggatatctaaccaaggacatgtttgataaaattggtctaggcttgttacaacaaaattagtttgtatcttggttattaaacagtatctgggactggtttgggcagaatattaaacttattttgttgccaattattgtttaccgagtataatgttgctatttagcaatgtgcttggttttaaagaaattctccttgggaaaaaagtatcctcttttaattttacttcccataagcgtaaatgcctggacatagctcttgtgcaacctttaaataaattgttttgagtgttttttgagccccagacaaataatgttttaaagttatccccttgctactttactgatacctttatcattcctgagacagtttgctaatttaaaaatgtagcattccatttgtatttatttctctcccttgccaaaaagattttctaatactgcttgtaccagccagagaaagatccaaaacactactcagctctcttgcactgaggaaatttttccccctacattgactcctggcctacatcagccaaacttaaccttggtggggtttggatttgatagccaattagttctgtgctggttgcaaagaattgatatttagatggtttttaatactcagcagattgtcttcctttatattgtgtcttttttatgttgcatgttgcttttgttatcagcctgattttttgctcagtatatgatagttctgctgatgttttgtttattgggcagacatatcttcattaagagtttttggaaaactcatcaaattcgatgaatacattttcttcataacccatttggaattattcctaataaaatgataaaatacgtaaaaaaaa

SEQ ID NO: 68205 - DNA, 1002 bp, Homo Sapiens
  misc_feature (84)..(118): n is a, c, g, or t
ccgcgaaaagtaatgaataccctatgggcgctgccgtgagccgaacgacgagcgcagcgaggtagtgagcgaggaagcggccgnnnnnnnnnnnnnnnnnnnnnnnnnnnnnnnnnnncagtcgacggtaccggacatatgcccgggaattcggccattacggccgggggagccggagctgccgcgccagtcgcctagcaggtcctctaccggcttattcctgtgccggatcttcatcggcacaggggccactgagacgtttctgcctccctctttcttcctccgctctttctcttccctctcgtttagtttgcctgggagcttgaaaggagaaagcacggggtcgccccaaaccccttctgcttctgcccatcacaagtgccactaccgccatgggcctcactatctcctccctcttctcccgactatttggcaagaagcagatgcgcattttgatggttggattggatgctgctggcaagacaaccattctgtataaactgaagttaggggagatagtcaccaccattcctaccattggttttaatgtggaaacagtagaatataagaacatttgtttcacagtatgggatgttggtggtcaagatagaattaggcctctctggaagcattacttccagaatacccagggtcttatttttgtggtagatagcaacgatcgtgaaagaattcaggaagtagcagatgagctgcagaaaatgcttctggtagatgaattgagagatgcagggctgctactttttgcaaacaaaaaggatttgccaaatgctatggccatcagtgaaatgacagataaactaggggcttcagtctcttccgtaacaagaacatggtatggttcaagccaactggtgcaacacaaggaaactggtcctgtatgaaaggacttggactgggctggtcaaatgaccctttcaaaacgctttaaatggaaattgggatatcctaacccagggacaaggttttgataaaaattgggca

SEQ ID NO: 68206 - DNA, 1079 bp, Homo Sapiens
ccatatgggcaccatggcggaaaatgaagtcagaaagatttgtagtgacattaggcagaaatggccagtcaaacacatagcagtgttccatagacttggcttggttccagtgtcagaagcaagcataatcattgctgtgtcctcagcccacagagctgcatctcttgaagctgtgagctatgccattgatactttaaaagccaaggtgcccatatggaaaaaggaaatatacgaagagtcatcaacttggaaaggaaacaaagagtgcttttgggcatccaacagttaatcacttatgtttttagagcatgcaatcttaactttgttaaactattattattgatcacattttgatttttttctctccacatcaggatagtttactgaagcacaatctcttatactagtgggacaaaagggagaaaaaggaagcaagataaatgggtatgtaggatgaagggttatttaaaatggaactaaagatagaaggaggactgtaggaagaaatggaataatttaaatgtgaggaaagatatctgtggtagacatgtccttccatgactaatttctaattgtaactcaacacacattgaggtatgggccctcctcagtgactttaactagctcagaaacgtactcccccaccaaccccacctcaccgccccccatcccggttctgggagagcattgttattaaggatgcatgacaggaatgttggcagaactggaaagtattaaaaaagcattatcagacagtcttgatattatacattttcagaaatatattaaaaataataaactaaaacccatgatttcaaaagctcactcccacccattttcccctaccttataccctgttgggccgcctccggcctctgaaaaacttttctaaaaccattctgtttgggccccgcggggcccaattagggaaagccgaacatgggtccataacccggttttcctaaggagaaaacccctggtcttggaattaaccgccttgggatttcctcccccatataaaaaatacgccccggtgcggggaaacccgaatgcggttcccgcaacaaattctccccaat

SEQ ID NO: 68207 - DNA, 604 bp, Homo Sapiens
  misc_feature (475)..(510): n is a, c, g, or t
gagccatctaggaaagatatggatgaagttgaagagaaatctaaagatgttataaactttactgccgagaaactttcagtagatgaagtctcacagttggtgatttctccgctctgtggtgcaatatccctatttgtagggactacaagaaataactttgaagggaaaaaagtcattagcttagaatatgaagcatatctacccatggcggaaaatgaagtcagaaagatttgtagtgacattaggcagaaatggccagtcaaacacatagcagtgttccatagacttggcttggttccagtgtcagaagcaagcataatcattgctgtgtcctcagcccacagagctgcatctcttgaagctgtgagctatgccattgatactttaaaagccaaggtgcccatatggaaaaaggaaatatacgaagagtcatcaacttggaaaggaaacaaagagtgcttttgggcatccaacnnnnnnnnnnnnnnnnnnnnnnnnnnnnnnnnnnnnactttgttaaactattattattgatcacattttgatttttttctctccacatcaggatagtttactgaagcacaatctcttatactagtgggac

SEQ ID NO: 68208 - DNA, 936 bp, Homo Sapiens
  misc_feature (817)..(817): n is a, c, g, or t
gcatggacactataaacagcttgggacaaaaaagcaggctggtacggtccggaattcccgggatatcgtcgacccacgcgtccgcggtcccgctgtcctaggcgggatggtgccgctgtgccaggttgaagtattgtattttgcaaaaagtgctgaaataacaggagttcgttcagagaccatttctgtgcctcaagaaataaaagcgttgcagctgtggaaggagatagaaactcgacatcctggattggctgatgttagaaatcagataatatttgctgttcgtcaagaatatgtcgagcttggagatcagctcctcgtgcttcagcctggagacgaaattgccgttatcccccccattagtggaggatagtgcttttgagccatctaggaaagatatggatgaagttgaagagaaatctaaagatgttataaactttactgccgagaaactttcagtagatgaagtctcacagttggtgatttctccgctctgtggtgcaatatccctatttgtagggactacaagaaataactttgaagggaaaaaagtcattagcttagaatatgaagcatatctacccatggcggaaaatgaagtcagaaagatttgtagtgacattaggcagaaatggccagtcaaacacatagcagtgttccatagacttggcttggttccagtgtcagaagcaagcataatcattgctgtgtcctcagccccaacagagctgcatctcttgaagctgtgagctatgccattgatactttaaaagccaaggtgcccatatggaacacaggaaatatacgaagagtcatncacttggaaacggaaacaaagagtgcttttgggcatccaacagttaatcacttatgttttagagcatgcaatcttaactttgttaactattattatgatcacatttgatttttctctca

SEQ ID NO: 68209 - DNA, 672 bp, Homo Sapiens
atccactatagcaggcaccagtgtcttgtcacctggactccacataggactaattattatactggcaataatgatctataaaaagtcagcaactgatgtgtttgaaaagcatccttgtctttatatcctaatgtttggatgtgtctttgctaaagtctcacaaaaattagtggtagctcacatgaccaaaagtgaactaaatcttcaagacactgtctttttggggccaggtcttttgtttttagaccagtactttaataattttatagacgaatatgttgttctatggatggcaatggtgatttcttcatttgatatggtgatatactttagtgctttgtgcctgcaaatttcaagacaccttcatctaaatatattcaagactgcatgtcatcaagcacctgaacaggttcacaagcatattgactgactaatagcccaaggaaaagaggagatgaagttaggggaatctatgagtgaaggaaatccccctgtgcaggaggttcaagttctttcttcaaagagtcatcagaataacatggattgaagagacttccgaacacttgctatctcttgctgctgctgtttcatggaaggagatattaaacatttgtttaatttttatttaagtgttatacctatttcagcaaataaaatatttcattgcttaaa

SEQ ID NO: 68210 - DNA, 473 bp, Homo Sapiens
  misc_feature (113)..(121): n is a, c, g, or t
attaaacagttatatgagcagttcataaagagtatggaagagttggagaagaatcatgataatctacttactggtgcacaaaatgaatttaaaaaagaaatggctatgttgcnnnnnnnnnttatgatggaaactcagcagcaagagatagcaagtgttcggaagtctcttcaatccatgttattctgatgactctttgaagaaagaacttgaacctaagtaatatgatacaattataacgttagctaagaagcatattgtaagtctttagaatagtttaattgtaacatctttaatcataaacctgtttcattgtaagacctccctttctgttaagtcaaatctaaatagttatgagttagttagcaactattcctaaagaatatgtattaagctttcagctctttagtaatgatagtgaatttttctctctaacactgtcaattaaataaagacgatttaattttaaaaaa

SEQ ID NO: 68211 - DNA, 1810 bp, Homo Sapiens
  misc_feature (67)..(75): n is a, c, g, or t
  misc_feature (116)..(155): n is a, c, g, or t
  misc_feature (197)..(256): n is a, c, g, or t
  misc_feature (331)..(449): n is a, c, g, or t
  misc_feature (453)..(453): n is a, c, g, or t
  misc_feature (455)..(557): n is a, c, g, or t
  misc_feature (563)..(566): n is a, c, g, or t
  misc_feature (571)..(788): n is a, c, g, or t
  misc_feature (1687)..(1721): n is a, c, g, or t
  misc_feature (1727)..(1769): n is a, c, g, or t
acccgggttagcgagtataacaacactgttttgttcctcccaccactctccccccggggggtgtggnnnnnnnnngcgtcaaataaaagaggggccgccgcaccattggagggggnnnnnnnnnnnnnnnnnnnnnnnnnnnnnnnnnnnnnnnncttcctcttgtggggggtgtccccgcccgttggtgtgttttnnnnnnnnnnnnnnnnnnnnnnnnnnnnnnnnnnnnnnnnnnnnnnnnnnnnnnnnnnnntgtttgtttcccccggggcccctctttttttgggtctctgggcggcggccgggggcccctttttccctctttttnnnnnnnnnnnnnnnnnnnnnnnnnnnnnnnnnnnnnnnnnnnnnnnnnnnnnnnnnnnnnnnnnnnnnnnnnnnnnnnnnnnnnnnnnnnnnnnnnnnnnnnnnnnnnnnnnnnnnnncttncnnnnnnnnnnnnnnnnnnnnnnnnnnnnnnnnnnnnnnnnnnnnnnnnnnnnnnnnnnnnnnnnnnnnnnnnnnnnnnnnnnnnnnnnnnnnnnnnnnnnnnncctttnnnnccccnnnnnnnnnnnnnnnnnnnnnnnnnnnnnnnnnnnnnnnnnnnnnnnnnnnnnnnnnnnnnnnnnnnnnnnnnnnnnnnnnnnnnnnnnnnnnnnnnnnnnnnnnnnnnnnnnnnnnnnnnnnnnnnnnnnnnnnnnnnnnnnnnnnnnnnnnnnnnnnnnnnnnnnnnnnnnnnnnnnnnnnnnnnnnnnnnnnnnnnnnnnnnnnnnnnnnnnnnnaatataagcaatgaaatattttatttgctgaaataggtataacacttaaataaaaattaaacaaatgtttaatatctccttccatgaaacagcagcagcaagagatagcaagtgttcggaagtctcttcaatccatgttattctgatgactctttgaagaaagaacttgaacctgttcaggtgcttgatgacatgcagtcttgaatatatttagatgaaggtgtcttgaaatttgcaggcacaaagcactaaagtatatcaccatatcaaatgaagaaatcaccattgccatccatagaacaacatattcgtctataaagttattaaagtactggtctaaaaacaaaagacctggccccaaaaagacagtgtcttgaagatatagttcacttttggtcatgtgagctaccactaatttttgtgagactttagcaaagacacatccaaacattaggatataaagacaaggatgcttttcaaacacatcagttgctgactttttatagatcattattgccagtataataattagtcctatgtggagtccaggtgacaagacactggtgcctgctatagtggatccattcttgccaacaccaccatggaggataacatggaaataatttgaacaggaaaatattactccacctagaaatccaagaactggaaggatcttcaattttatttctagaataggaatcgtatagtcccacattgttgctcctccaaatgcagacaacacaaagacaatcactaaagctatctgaatttcagttacatccacttttccaaatctcaacatgcctgaaacataagtctgccaatgagcgcaataaaacacaaacatccccggccgtaatggccgaattcccgggcatatgtccggtaccgtcgactgnnnnnnnnnnnnnnnnnnnnnnnnnnnnnnnnnnncggccnnnnnnnnnnnnnnnnnnnnnnnnnnnnnnnnnnnnnnnnnnnagaagctagccgcccctatagtggatcgatcaggcttcctt

SEQ ID NO: 68212 - DNA, 1211 bp, Homo Sapiens
cggcccacagcttctggggctggggccccggcagccgggcaggccggcctgacctcgacctccgccgtgcgggcccgaccggtgagtccagcccggcagtcgcaggacccggccgccagcctctccctccacctctccctgcccccagcgccaggcgcgggctgcgctcggtggcggcggcggggccctcaggcggccatggcggcaggcgccggggccgggtccgcgccgcgctggctgagggcgctgagcgagccgctgagcgcggcgcagctgcggcgactggaggagcaccgctacagcgcggcgggcgtctcgctgctcgagccgccgctgcagctctactggacctggctgctccagtggatcccgctctggatggcccccaactccatcaccctgctggggctcgccgtcaacgtggtcaccacgctcgtgctcatctcctactgtcccacggccaccgaagaggcaccatactggacataccttttatgtgcactgggactttttatttaccagtcactggatgctattgatgggaaacaagccagaagaacaaactcttgttcccctttaggggagctctttgaccatggctgtgactctctttccacagcatttatggcagtgggaaccctcaattgccgctcgcttaggaacttatcccgactgggtttttttctgctcttttattgggatgtttgtgttttattgcgctcattggcagacttatgtttcaggcatgttgagatttggaaaagtggatgtaactgaaattcagatagctttagcgattgtctttgtggtgtctgcatttggaggagcaacaaggggggactatacgattccctattctagaaataaaattgaagatccttccagtttcttgggatttcctaggggggagaaatatttttcctgttcaaattatttccctggtatcctcccatgggggggttgggcaaaatgggatccactataccagggccccggggtcttgtcccctggaccccccctgggactaattattatactggccaaaaagattctttaaaaagtccccaactgatgggtttggaaaaccaccctggctcttataccccaaaaggttgggaagggcctttccccaaagcccccacaaaattaaggggcgcctccctggcaacgaaagggaaccatattcttccaaaacatgcgcttttttgggg

SEQ ID NO: 68213 - DNA, 687 bp, Homo Sapiens
  misc_feature (42)..(72): n is a, c, g, or t
gacagagcgcagcgagtctttgagcgaggaagcggccgcatnnnnnnnnnnnnnnnnnnnnnnnnnnnnnnncagtcgacggtaccggacatatgcccgggaattcggccattacggccggggggcgaacaccaaagtccgggaacttaagcattttcggtttctagggttgttacgaagctgcaggagcgagatggaggtggacgcaccgggtgttgatggtcgagatggtctccgggagcggcgaggctttagcgagggagggaggcagaacttcgatgtgaggcctcagtctggggcaaatgggcttcccaaacactcctactggttggacctctggcttttcatccttttcgatgtggtggtgtttctctttgtgtatttttgccatgacttgttcgctgatatctaaattaagaagttggttcttgagtgaattctgaaacatggctacaaacttcttgaataaagaagacaggactctcaatagaagaatttcacatctccaagggacccttcctttcatctttacactttgttactaatttgcagaactctattaattgggtaggatttcacccattcctagctaagttcttaaaattaaaccctttggttcgtgtttaaaaactttcaaacatctgatggctttacaggggctgaatataaaaggcattttgtacctcc

SEQ ID NO: 68214 - DNA, 962 bp, Homo Sapiens
gtggtaccggtccggaattcccgggatatcgtcgacccacgcgtccggcgcaggcggccggactccgctcagtttccggtgcggcgaacaccaaagtccgggaacttaagcattttcggtttctagggttgttacgaagctgcaggagcgagatggaggtggacgcaccgggtgttgatggtcgagatggtctccgggagcggcgaggctttagcgagggagggaggcagaacttcgatgtgaggcctcagtctggggcaaatgggcttcccaaacactcctactggttggacctctggcttttcatccttttcgatgtggtggtgtttctctttgtgtattttttgccatgacttgttcgctgatatctaaattaagaagttggttcttgagtgaattctgaaaatggctacaaacttcttgaataaagaagacaggactctcaatagaagaatttcacatctccaagggacccttcctttcattttacactttgttactaatttgcagaactctattaattgggtaggatttcacccattcctagctaagttcttaaaattaaaccctttggttcgtgtttaaaaactttcaaacatctgatggctttacaggggctgaatataaaagcatttgtacttaaaggtcttgtgtattcattaagaaatatagtaatgtcttttaatgttttaagagttgatcagggtttactatgatgcaagtaataggatgattaataagggaaggtttttatgatttccaaagtcaatttatttcaaagcagggaaagattttgagagagggaacaaagtatttcttaaatggcgtaaaaagctgcttaggttccagtttttaattttttagggttaagtttggactcctggtttgaaaaagataaggttattggggtgggccgacaggggttaaaacagtccttaaaaaaaggccgggtaattttccca

SEQ ID NO: 68215 - DNA, 785 bp, Homo Sapiens
ggtgatctaacaggaaactgagctcaggcagtaatgttggcacgccccacgcccccacttctatgcagccggtcgtggctggggactggggacccctgctctagtcagtaataaggtacttgtgccagaatataaatcaacacattgcttcctttatcaaagaagtcttgttatttaaaaaaagtcaactgagccagtatgattagtgatgtaattgattttcattctggcacaagcctctttcattctggacagctcacaaatagttaatggaccatgctttgaatagccttcctctaagcaacatttataaatactgatattttagaactgtttacatttcttctgtttatttttgaattttcagtttgatatcttgtccttattcattgttgtataaacaactgtactttaatttcaagtagtattaaaagtatttcacttcagtttggggggattattatcaatttataattttataaaagtattttaaagaataattgtaaattttccataaattacaacttcctgccatcttttattaaataataatcttgcttaaggcatatagacagacattattatgagtattccagtaaaaaaaatctacatcaacttgaccatcctggctaaaaattaaaaagcacttttttatatctgtggttgtcatttgtttcaaagcatttctaaatttattgttcttaaaagtatgtctgcatgttctagcctttgacctaggtcatttatgaaccctctttgtgtctaataaacccatctgtaaaggc

SEQ ID NO: 68216 - DNA, 1279 bp, Homo Sapiens
  misc_feature (73)..(73): n is a, c, g, or t
  misc_feature (102)..(102): n is a, c, g, or t
  misc_feature (224)..(225): n is a, c, g, or t
  misc_feature (233)..(275): n is a, c, g, or t
cacagcagggaccacgaaccagagcagctaatgctataacaaaaaacaatgacttagtgcgtaagagacgagntgaaggagatcacccagtaagtctgcaanaggtgtaatctttggaagacttcagaagatcaccaagggctcatgttggtgacatcatgtaaaattttcctgggtagaagggaaaagactggaaaaatttttttagtgacatgcattttttnnttttagtnnnnnnnnnnnnnnnnnnnnnnnnnnnnnnnnnnnnnnnnnnngaaacatttctactttctgctaaaatcaattttaatttagtttaattgaatgatttatgatgaatcttgggcaaaaaaatacaactgtaaaaaatttcacaggtcatttgtgtagaataatttgaacattgtgaggaccaatcttttttaaatcaaaagggatgttgctggtatcagaattgttattgcttcatttagacataaaacacttaagtgttttcttcactccgtgacctggagagttttccattttttaaaatacatgaacttggcaagggtgtgatttttctttatcaagagaacaaaatgccagaatgttaaaacagttaactcaaaatctagtcatctgtgtaggagctaaagcaggtctccagggagagagggtggtcgtctgtgcattccaggttactgcacttgtctgatgtgacgtagcaacacccaggtcttcttaaaacaaagtcatcagctttgccaggttacatactttatttaaaagtatagtgaggtcgaagttcattccagtgtttcattttaataatgtgggcattattaaatttttgtggaagctaatagtaaaaaataaaagctgttttcaccacctccctccccaccccccaaaaaaggcgtacagccaactcttagttatttagggtaagagaaaaaagaaaactgttaaacaatgaaatcaaagataataaatatgatagatttccagtatgaggcacttgcaaaacagtcatttaaactgatggttactgtaagtcagttggaagctggcatgtatgtaaattacttggtgttacaccatatccgaagaagttcctatgtgcagtgcagaattgcataaacagtatttaatcactgctacaaatcttccaaccaagaaggaaaactgctattcttcataaatctaatttttagtatatgcttcctttcatcttatacttttatcaatatttataaaagtcatttctataataaaagcagtctttcttgctcaaagt

SEQ ID NO: 68217 - DNA, 983 bp, Homo Sapiens
  misc_feature (830)..(839): n is a, c, g, or t
  misc_feature (843)..(885): n is a, c, g, or t
gaagaagctttgacaagtgcttctgatacagaattgtgtgacctcgcagcaattcttgggatgcacaatttgataacgaatacaaagttctgtaatataatgggaagtagtaatggtgttgaccaagaacatttttcaaatgtggtcaaaggtgaaaagattcttccggtatttcgatgagccaccaaatccaaccaatgtagaagagagtttgaagagaactaaagaaaacgatgctcatcttgttgaagttaatttgaataatataaagaatatcccaattccaaccctaaaagattttgcaaaggctttggaaaccaacacacatgtgaaatgtttcagtcttgcaggccacccggagcaattgaccctgttgctacttgcttttgcagaaatgctgaaagtgaacaaaactttgaagagcttaaatgtggagtccaactttatcacgggagttgggattctggcactgattgatgcgttaagagataatgaaaccctggcagagctcaagattgacaatcagaggcagcagttggggacagctgtagaattggaaatggccaagatgcttgaggaaaatacaaatatccttaaatttggatatcagtttacacagcagggaccacgaaccagagcagctaatgctataacaaaaaacaatgacttagtgcgtaagagacgagttgaaggagatcaccagtaagtctgcaaaggtgtaatctttggaagacttcagaagatcaccaagggctcatgttggtgacatcatgtaaaattttcctgggtagaagggaaaagactggaaaaatttttttagtgacatgcannnnnnnnnnagtnnnnnnnnnnnnnnnnnnnnnnnnnnnnnnnnnnnnnnnnnnngaaacatttctactttctgctaaaatcaattttaatttagtttaattgaatgatttatgatgaatcttgggcaaaaaaatacaactgtaaaaaatttc

SEQ ID NO: 68218 - DNA, 1073 bp, Homo Sapiens
  misc_feature (706)..(727): n is a, c, g, or t
  misc_feature (941)..(964): n is a, c, g, or t
cctccgaggttccagtaagctttcagtgactttgatacctccccaagtttcttgagttactgcttgttaacacccagcttttaactgagtgtttgctcctgatggtttaggagattttcatgttgtatcacactgtcaagttttattttgtctttttatccctccgtggatgtgagtttgaaacaagcacggtacagtaatcctgcctgatagagtagtctggaatgagaattactttttgggtgagagagttctccattttaatgtttctaaagtttttcatatgaacttggcattggaaaagggaggtaaagaaaaaggacgtttactaaaagcagtgtctactcttcccctttgtgagtgtttattcatggctaatgaaaaaaagagaaggactcttgggttttgtgttgccatgttaagcatggagagggatgcttgacagcatgctaattgaagccagagcaagtatgtccttcatcaggtaatcaggaactcttcagttgaagctgaggaactaactgattagttgttgatcataatataattggttacaaagtggaagtgccagctggcttaagtacccaaagaaaagaatgcagcagcctaacttagtgttaccatatgttactgaatttgaaactgaccttttttcccaccctacttcacacacctaaaactcttttcttgtcagaccaaagagcgnnnnnnnnnnnnnnnnnnnnnncactttaccaatctgtcactcaggtacaattttgtggtgagatttttgtctgttctctttgtattgctcttaagagtcctttctcagcatattattctgccattgcctctgtcttccttggggcacctcagctctggatgctacccctgggatatctactgctgttatgtgaatgataggaggtaagtgaccattatagtaagggctctttgtnnnnnnnnnnnnnnnnnnnnnnnnggatgtatacattttatagtctggctatcagtttgatatcttgctgtcaagtatgtttctcaatctgtatttatccatcccatcaataaatgttaatggtaaaacactc

SEQ ID NO: 68219 - DNA, 523 bp, Homo Sapiens
gcacaagaagaatatgaacagatacaagccaaacgtgctgctaagaaacaagaattcgagaggagaaaacaggagagagaagaagcccaaaggcagtacaaaaagaagaaaatggaagtgtttaaaatactgaacaaaaagactaaaaagggccaaccaaacttgaatgtacaaatggagtaccttcttcaaaaaatacaagaaaaatgttaaacattttgttcctacaggttaaaatatctgctgcctattaggttcttctgtgacatgtgcctcccagcagtgaactaaatttgtcgacataaactggattgctaaactatgctaaatataagatgttcacatatttttattatggtaaaaaattttctaaatatgttctacatgtttcttatttatttgcctctgaaggaaggttggcctgaagaactgaaagaacctcttattttgcaagacaggcccaagcatgtaatacttttgtaccatatgagatttatatgaaataaattttttaaaaataagg

SEQ ID NO: 68220 - DNA, 887 bp, Homo Sapiens
  misc_feature (580)..(580): n is a, c, g, or t
  misc_feature (585)..(585): n is a, c, g, or t
  misc_feature (587)..(587): n is a, c, g, or t
  misc_feature (589)..(589): n is a, c, g, or t
  misc_feature (591)..(591): n is a, c, g, or t
  misc_feature (594)..(594): n is a, c, g, or t
  misc_feature (596)..(599): n is a, c, g, or t
  misc_feature (601)..(602): n is a, c, g, or t
  misc_feature (605)..(608): n is a, c, g, or t
  misc_feature (762)..(770): n is a, c, g, or t
cagtcgacggtagcggacatatgcccgggaattcggccattacggccgggggctggggcgtccgtcgtggtcttctgatgacgcagttagtcggctgcaatggcgccggtgaggcggtccgcgaagtggcggcctggtggtattgaggcgcgtggtgaaggggtttccactgtcgggtacaggaataagaatgtgagacagaagacatggcggcctaaccacccgcaagccttcgtggggagcgttcgcgagggacaaggctttgcttttcgaagaaaactgaaaatacagcaaagttacaagaaattgctacggaaggaaaagaaggctcaaacgtcactggaatctcaattcacagatcgatacccagataatctgaaacatctctatttagctgaagaggaaagacataggaagcaagcaagaaaagtcgaccatcctttgtcagaacaagttcaccagccgttgcttgaagaacagtgtagcattgacgagcctttatttgaagatcagtgtagctttgaccagcctcagccagaagaacaatgtattaaaacagtaaactcctttacaattccanggaanananancancnnnnanncannnnaaacttttttggccggccttgggcccttccaaaagctttttttaaaccattccttttgggcccccgggccccataaggttaaatggaacctgtggcctaaacctgggttccctagggaaaacccttgggccatggacttaaggctttgggattnnnnnnnnnataaaaaaacccgcccggggggacaaacgaaagcgtcctttgaaccaattccccaatagggagtttcctgggggcccctttactggggaatcttattccccccggggagtccccacc

SEQ ID NO: 68221 - DNA, 1120 bp, Homo Sapiens
  misc_feature (582)..(582): n is a, c, g, or t
  misc_feature (619)..(682): n is a, c, g, or t
  misc_feature (733)..(734): n is a, c, g, or t
  misc_feature (765)..(765): n is a, c, g, or t
  misc_feature (773)..(773): n is a, c, g, or t
  misc_feature (801)..(803): n is a, c, g, or t
  misc_feature (907)..(910): n is a, c, g, or t
  misc_feature (954)..(954): n is a, c, g, or t
  misc_feature (983)..(983): n is a, c, g, or t
  misc_feature (991)..(991): n is a, c, g, or t
  misc_feature (1034)..(1034): n is a, c, g, or t
  misc_feature (1066)..(1066): n is a, c, g, or t
  misc_feature (1068)..(1068): n is a, c, g, or t
  misc_feature (1070)..(1070): n is a, c, g, or t
  misc_feature (1073)..(1075): n is a, c, g, or t
  misc_feature (1091)..(1091): n is a, c, g, or t
gggctccgtctccgacgctgacttcctcagcgcagccagcactgtctccggtggcaagtcgaccagctcctcccacacggattctgtgtagaaatccacggacaaggctttgcttttcgaagaaaactgaaaatacagcaaagttacaagaaattgctacggaaggaaaagaaggctcaaacgtcactggaatctcaattcacagatcgatacccagataatctgaaacatctctatttagctgaacaggaaagacataggaagcaagcaagaaaagtcgaccatcctttggcagaacaagttcaccagccggtgcttgaagaacagtgtaccattgacgagcctttatttgaagatcagtgtagctttgaccagcctcagccagaagaacaaggtattaaaacagtaaactcctggaccctcccgaagaagaataagaagaagacatccaaatcacagaggcccgagagggaattatgaaccggatacaagccgcgatgttgctggctaaggaacacaggactcccgagggggacaatattagggactacgagatagaagagcccacgaggtcagggaccnagcaattacgcaccgtgggaaacgggcgggaacgcannnnnnnnnnnnnnnnnnnnnnnnnnnnnnnnnnnnnnnnnnnnnnnnnnnnnnnnnnnnnnnngccagaccgcgaggacccgtgtctgtgcgaacgggtgagcgcgcgagaagnntgaggaggagggggagcgagagaggggaccncggttggncggggacccgccgccgcccggcccgcgnnncagaatcttcgtggtgcgcaatgagggcgcccccccgtagacgaagggaacacttacggatcgggtcgcaatcttgaaacctgggggctgagaacggccccccnnnnccccgacaccagttagcgtggtgtcccccgcccgggggagtgantgcactgggcggagagacgcaatttagcncgcgaganttggaggcgcgtaagctgtggtcggcccgggtgccgtagtgcnagcggagcggagaggaaggagagccgccgganangnagnnnagcgagaagtacgtanacgcggagcgcgcgctcgagaggaggggc

SEQ ID NO: 68222 - DNA, 805 bp, Homo Sapiens
  misc_feature (61)..(73): n is a, c, g, or t
gcaatgccacagttataggagtgtatgaagaggtaacatgtctccttttccttaaccatgnnnnnnnnnnnnnaaccttctgcacaaaggtaaaagtttttgttaatctcatagttaatggtataaaacagagattggcaaacctttcctccaacaggccaggtagtaaatattttagatttcacagaccacatatttttttcttttataactctttaaaaatgtaaaaatcatttttagtttgcaccatacaaaaacagactgggccaaattcggcccgtgggcagtagtttgccaacccctggtataaaatatctactttgtcttgtcagagaaattgctgtccttaggcttctagacaatctgctgcctgaagtcaagtggagaagggccttatttacaatttaatgtggtttgtgacagaagtagaaatggagagcttctgctcacttttgactctcccagtttttccattcactcattcattcaataaatttgttgagcacctactatgtacactcttaaatatcttggtgttagcagaaatttccagtgtttcttccttaaaagggtgatttctccagtttctccaaaccaggaattatttcttaatactcatgttttatggaaaaatcaggattaaaatctctaccagcacacaagaggatacatgattatacaaaatgaatctagccaacaatgatatccttgcacccaatagtgacacagcctagatgaggaaaatatgtaactatctctattttaaaagatacctcttttcctcccacaggctgaaactttcaaa

SEQ ID NO: 68223 - DNA, 1000 bp, Homo Sapiens
  misc_feature (25)..(25): n is a, c, g, or t
  misc_feature (89)..(89): n is a, c, g, or t
  misc_feature (100)..(100): n is a, c, g, or t
  misc_feature (105)..(105): n is a, c, g, or t
  misc_feature (219)..(219): n is a, c, g, or t
  misc_feature (400)..(400): n is a, c, g, or t
tatgtaccacaatgtatggcactcntagactctccttccagcgtgtctcgtgtatcctagcgctcttgagcagcagagaggccaccatnttctccacttngagcntggaaggtgaactgctgtgactacactccatcaaagggcatgtgaataaggcttggctcctgactcttggctaggctctccaaaaggcagagtctggagaggcctggctgtggnccagaccatggggcaagtggctagaggggcgagtagacagcagaggcagctgtgccccccgggattagcactgggggaccggatgggggagggagccctcactttgttctatctgagcagcttcctcggcagtcatgggactgattgagaccacgcgagggctcctcccgggggcaggagngactcagaggctgccccgttgtctgggggtggccctgccgaaggagctcatcttcacgggccgacgactgagtggaactgaggcccacgtactggggctggtgaatcacgctgtggcccagaacgaggagggggacgccgcctaccagcgggcacgagcactggcccaggagatcctgccccaggcccccattgccgtgcggctgggcaaagtagccattgaccgaggaacggagaatattccaacccgggaccggctagagggcatggcagccttcagggagaagcggactcccaaatttgttggcaaatgacccccattttaaccttcagcatgggagatgcatgccctgaagagcaggatccagaaggaagatttgtggccagattgccttcatcatttcacctctccagacttccatttcttcacaaggatgatgatggaaataaaatgactggcgtgatgcctggaaccaaggtgctgatcctaccacctactgctaccttccttagcttcaccctggctagaaataatcacgagggttgggtttgctttggaaaatgcctgtctctctacttgaatgataaagaattaaattag

SEQ ID NO: 68224 - DNA, 1322 bp, Homo Sapiens
  misc_feature (40)..(40): n is a, c, g, or t
  misc_feature (93)..(93): n is a, c, g, or t
  misc_feature (135)..(135): n is a, c, g, or t
  misc_feature (152)..(152): n is a, c, g, or t
  misc_feature (276)..(276): n is a, c, g, or t
  misc_feature (304)..(304): n is a, c, g, or t
  misc_feature (312)..(312): n is a, c, g, or t
tgattgcatcattgtatagggaggtccaatccagctctcncgtcccacgcagccagatagcagacagtgttccgtgtccctaccctacagatnatgagtttgtgacagcctttgccgcatccttgggatgttttngtatgagtgctgaactntgcccagtgcggagacggcagtgcgttcctctcttcagagtgagtgagggcgttctgtgcagtgcagacctgaagagcggaacagatgatgaagcagagtgggggtgttgtccagcgactccgnggcttgatgaagacatcgcttcctcgcnagtcatgngatgattgagaccacgcgagggctcctccccggggcaggagggactcagaggctgccccgttgtctgggggtggccctggcgaaggagctcatcttcacgggccgacgactgagtggaactgaggcccacgtactggggctggtgaatcacgctgtggcccagaacgaggagggggacgccgcctaccagcgggcacgagcactggcccaggagatcctgccccaggcccccattgccgtgcggctgggcaaagtagccattgaccgaggaacggaggtggacattgcatctgggatggccattgaagggatgtgctatgcccagaatattccaacccgggaccggctagagggcatggcagccttcagggagaagcggactcccaaatttgttggcaaatgacccccattttaaccttcagcatgggagatgcatgccctgaagagcaggatccagaaggaagatttgtggccagattgccttcatcatttcacctctccagacttccatttcttcacaaggatgatgatggaaataaaatgactggcgtgatgcctggaaccaaggtgctgatcctaccacctactgctaccttccttagcttcaccctggctagaaataatcacgagggttgggtttgctttggaaaatgcctgtctctctacttgaatgataaagaattaaattagatctctctgagtcttggtatcattggctctcagcccctgacctctctcagttatcaggcactcattagagatgtcagaagattttaagatacccctagtttcttcctgtgaacaacagaggtaataaataaactctgacatcggttgaacatgtgtcaggggtcagactgcagatcccagtctctgccagttacttgctgtataaccgtggacaaattgtttaaatgctctgggcctcagcttcctcacctacaaaacaaaacttgtgaagatttagcaaaataaaaacacttcatattcataaaagtctattaaatcct

SEQ ID NO: 68225 - DNA, 1504 bp, Homo Sapiens
ttctctgtgtggactttgtcgtctgtgtcttgtcggctttgttctcgtgtttggggcactctctctctgtgcgccgtgtgtcgatcttggttcctcctgttgttcttttggtgtcattctctgcatcgggcactggttgactccttttactgattttccgtctcaggtttcatgggtactgacatgctgctattgttccgcagggttcctgtcattctggcctttgtttaatttgattgcacaaagagccaatctctaaacttagtccttgtctattcgcaattctctcagggtgcccagtattttgactaagttatccggccttgaaagctacttgagatgtgtactgctattctaaacacgtgatctagtgtctttcatctctggcataagattatataacttaatgttaagtgtcatgaggcactaaaagacataaatgtggcttatctataggatctgttttctcatcgaggtctcgggtatcctttcaaagatagtgagaagcagacacttgctccttgtgcagctctggtacctcctgcccactgctgtcacttcaagccactggcaatgcttctgtcctcgtgtcttggaggaaaatcacctggggggaggggacttcttgtggtaagagcaagtgcaggtatgaaatgcgaagattgccccagctaaaagtggacaagtccgctttgtgagatgaatacttcctgagaaacttgacaagtatctctccattttaccattatgaaaactatcattaaaaaaaacagtttagatgccttctccttttgagggaaaaagggtgctttttattgtataaagcagcgtcttatgtattttgatataccattgtttgaacttccgtctttagctgatagattctcaaatatccttgattttggatgttcagtatgtttgtgagagaggtttctgggaagactctctttttgccctcgggaaaaagcaaaatatcaatgtttgggtgactgtgtaaagctcagtgtgtaagaacatctttttgtctaggttttctttctgctctttattgaagacaaacactcaccaaaaagaaaaataaaagttttcagagaaactaattttctttggcaagagtattacttaatattttggcctcctaaagtttccctagttagtactcggactcctgtgctaattgtcagcttacatatcattgtatagagactgtttattctgtaccaaactgatttcaaaagtactacattgaaaataaaccggtgactgtttttcttcataaagttctgcgtttggcatcttcactctttccaaaatgtatctgtacatcagaaatgtcactattccaagtgtctttttagtgtggctttagtatggcttccttttaatattgtacatacattgtatctttgttttatggtaataagtaataaaaatgtagacttcatattttgtacaaaatgtcctatgtacagaataaaaaagttcataaaaacagcgattataa

SEQ ID NO: 68226 - DNA, 726 bp, Homo Sapiens
  misc_feature (92)..(92): n is a, c, g, or t
  misc_feature (416)..(425): n is a, c, g, or t
agcaatatataacacagtatatgcttttttatatattcaatgttagcccaagtctgaatttacatttgactaaagcagcacataagataatntgctaaaatgctaatctttactaaatagtgagctaaattagaatttctaactcttatattgtgctcttttaaatgccaattacagtcccttactggaattctaactgtaatttgctttgcaatcaaactgcttttagggcagccaatattttattattggaattcagacactgttcttaccgtgtttgtttttaatcaaatattacctaaaaatgtacaaattagtgaaatggttaaacttctgcactttcttagttaccacagtcttcataccaagtattgggtacaggttacaattttgaagccatatgagtttatattgannnnnnnnnnccatttaaaaatccactaatggtgtaaaagagaccagtagattttcaatgggaaatgtacctagcaagctggttcttgcttatatatagtgataaactttgtagctgcctctttaaccaagaatttgtaaacacaactctaataaatgtgagttttaaaggattgttatttactactttggattgtaattagaacaatgcacatctgtcttccaagattttgtaaatatttttgatttttttcattaaatgtaaattttacataaaagttgtgctcttaataaacatgtaatatataattt

SEQ ID NO: 68227 - DNA, 2036 bp, Homo Sapiens
  misc_feature (44)..(78): n is a, c, g, or t
  misc_feature (617)..(626): n is a, c, g, or t
  misc_feature (1312)..(1326): n is a, c, g, or t
aaacgacagagcgcagcggagtcagtgagcgaggaagcggccgnnnnnnnnnnnnnnnnnnnnnnnnnnnnnnnnnnncagtcgacggtaccggacatatgcccgggaattcggccattacggccgggaacctagcaactgtgtttttgttaagaagtaattgttgccatatcacaggtgaagaaacaagctcagaggactttctctagggcaaacctgcgtttgtagataggaataagaaatgaagctctcaggtagtgaataagaatgtagtttgtgagacagtgtatttagaatgattctttagtttacattgctgccctaaatatattgtgctgttcagtattaattatgccaaagaccttaatatttcatccttcaactcatgtatgtgtattactccatttccagggtttgaatgccggtgtggaaatgtttactgtggtgtacaccgttactcagatgtacacaattgctcttacaattacaaagccgatgctgctgagaaaatcagaaaagaaaatccagtagttgttggtgaaaagatccaaaagatttgaactcctgctggaatacaaaattcttgagcatctgcaaactaaaaattgacttgaggnnnnnnnnnncctagtcattgggaatgtagagcagtgtatcttgcatgtcatcggaagaatagatttttgttttggttttgttttgaaaatgactctgaacatttatttccattgcaatttctgtggctgaggagacttaaactttacaagtattatccttttaagatcattttaattttagttgagtgcagagggcttttataacaaacgtgcagaaattttggagggctgtgatttttccagtattaaacatgcatgcattaatcttgcagtttattttctcattgtgtatgtatatatcgcttttctctgcagcacgatttctcttttgataatgccctttagggcacaactagttatcagtaactgaatgtatcttaatcattatggctgcttctgttttttcattaacaaaggttattcatatgttagcatatagtttctttgcacccactatttatgtctgaatcatttgtcacaagagagtgtgtgctgatgagattgtaagtttgtgtgtttaaacttttttttgagcgagggaagaaaaagctgtatgcatttcattgctgtctacaggtttctttcagattatgttcatgggtttgtgtgtatacaatatgaagaatgatctgaagtaattgtgctgtatttatgtttattcaccagtctttgattaaataaaaaggaaaaccagnnnnnnnnnnnnnnngggggggccgctctagagtatccctcgaggggcccaagcttacgcgtacccagttttctggtacaaaggtgggcccctatagtggacgtcgtattataagctaggcactgggccgtcgtttacacacgtccgtggactggggcaaaacttgctagctggggatctttggtgaaggacccttactctcttgtggtggctgacataattgggaccaaactacctacaagagatttctaacaggcctctaaggcgtacaatatctaacacacttgtctctaacgctggtatacacggtgtctaacccctacgcctcgcatattggcttgcctcgcttgaagacgtcttggctcaaccggaagtattgactttcattggaccactacttattaccccgggaagcttccctgtaataagaccgcagaggtaggcaattagcgggtggctcggggggatggggggtactctcgctggtccgtgtcgtcggtggggccggtcggccgtgggagcgcgccgagctcggtgatcgggctagcgcgggtctcttgcgtagtgatgtgggacggggtctcggggtctcctcgtacttaacgtcggctgttctgtgtcgtgtcgtcagccgttgcgggcgagatggtcgcgcgccttgttgcgtctgcctcgtcggggtcctgcgccctcttacatcggttcgcagtctttttcgtgtgttt

SEQ ID NO: 68228 - DNA, 814 bp, Homo Sapiens
  misc_feature (741)..(741): n is a, c, g, or t
gggaataaacagcggacggaggggccggcggtggcggagccggagcaagcaggggttcggcggcattacctgtacccattcaccggcggctaccggcggcggcgcgcagcgtgttctaggcggagagacccgccgccaggtgtgcaactgaggaacatggctcaagaaactaatcacagccaagtgcctatgctttgttccactggctgtggattttatggaaaccctcgtacaaatggcatgtgttcagtatgctataaagaacatcttcaaagacagaatagtagtaatggtagaataagcccacctgcaacctctgtcagtagtctgtctgaatctttaccagttcaatgcacagatggcagtgtgccagaagcccagtcagcattagactctacatcttcatctatgcagcccagccctgtatcaaatcagtcacttttatcagaatctgtagcatcttctcaattggacagtacatcctgtggacaaagcagtacctgaaacagaagatgtggcaggcttcagtatcagacacagcacagcagccatctgaagagcaaagcaagtctctttgaaaaaccgaaacaaaaaaagaatcgctgtttcatgtgcagggaagaaagtgggaacttactgggttttgaatgcccggtgtggaaatgtttactgtgggtggacaccggttactcagaatgtacccattggctcttacaattaccaagcccgatgctgcctganaaattccaaaaagaaaatcccgaagttgtttgggggaaagatcccaaaagaattgaacctcctgctggaataa

SEQ ID NO: 68229 - DNA, 1000 bp, Homo Sapiens
ccggaattcccgggatgtggcggagccggagcaagcaggggttcggcggcattacctgtacccattcaccggcggctaccggcggcggcgcgcagcgtgtcaggcggagagacccgccgccaggaatgaatctgaagtctgctgcagtaaaacacagaaggctttaaaatgttttcttgcataaaattcaaaacttttaagtagctgcttatgagaatagggaaggcagaaagctaatgtctgtctcaagatacaggacagctgtttgctcatcaacctcaactgtgtgtgcaactgaggaacatggctcaagaaactaatcacagccaagtgcctatgctttgttccactggctgtggattttatggaaaccctcgtacaaatggcatgtgttcagtatgctataaagaacatcttcaaagacagaatagtagtaatggtagaataagcccacctgcaacctctgtcagtagtctgtctgaatctttaccagttcaatgcacagatggcagtgtgccagaagcccagtcagcattagactctacatcttcatctatgcagcccagccctgtatcaaatcagtcacttttatcagaatctgtagcatcttctcaattggacagtacatctgtggacaaagcagtacctgaaacagaagatgtgcaggcttcagtatcagacacagcacagcagccatctgaagagcaaagcaagtctcttgaaaaaccgaaacaaaaaaagaatcgctgtttcatgtgcaggaagaaagtgggacttactgggtttgaatgccggtgtggaaatgtttactgtggtgtacaccgttactcagatgtacacaattgctcttacaattacaaagccgatgctgctgagaaaatcagaaaagaaaatccaggtagttgttgggtgaaaaggatccaaaagaatttgaactccctggctgggaatacaaaaattcttgaagcatctggcaaactaaaaaattggaccttggagg

SEQ ID NO: 68230 - DNA, 803 bp, Homo Sapiens
ctgaggtgaagcaaacagaaaattgtggaggttttgttggtgtgcaactgaggaacatggctcaagaaactaatcacagccaagtgcctatgctttgttccactggctgtggattttatggaaaccctcgtacaaatggcatgtgttcagtatgctataaagaacatcttcaaagacagaatagtagtaatggtagaataagcccacctgcaacctctgtcagtagtctgtctgaatctttaccagttcaatgcacagatggcagtgtgccagaagcccagtcagcattagactctacatcttcatctatgcagcccagccctgtatcaaatcagtcacttttatcagaatctgtagcatcttctcaattggacagtacatctgtggacaaagcagtacctgaaacagaagatgtgcaggcttcagtatcagacacagcacagcagccatctgaagagcaaagcaagtctccttgaaaaaccgaaacaaaaaaagaatcgctgtttcatgtgcaggaagaaagtgggacttactgggtttgaatgccggtgtggaaatgtttactgtggtgtacaccgttactcagatgtacacaattgctcttacaattacaaagccgatgctgctgagaaaatcagaacaagaaaaatccagtagtagttggtgaaaagatccaaaagatttgaactcctgctggaattacaaattcttgagcatctgcaaactaacacattgacttgaggttttaaacctagtcattgggactgtaaacgcagggtattttgcctgtccctcgcacgaat

SEQ ID NO: 68231 - DNA, 505 bp, Homo Sapiens
ggcacgaggcagaaaatcaacactctaattggtcagatggattgcagtttgattccagctaaccttgtggaggcatttggtttattgattaactgcaacgagtcatctccctgccacccatttcttcctactgtgcaacacactttgaacaaagccattaatcctgaagggctgttttatgcggcttctagacagttcacaactgaagattttgaaaagctattggcttttgcaaagaatttgaatgtagaattcagcttggaagcagaaagaatgacccatggctattatctagcaagtcgcagaatcagaacaggctctgtatgtggatcaaagctgtcagcatctgcattaaaatatctcgttttcctatctgaagcccatgcacgactgaacttaaggaacaaagtgcttaaagaagatgtgctgattgcagccttactatttgaaacatccctcacattgaaatatggtaatgaattaaattattaatgatcactaaaaa

SEQ ID NO: 68232 - DNA, 796 bp, Homo Sapiens
  misc_feature (509)..(509): n is a, c, g, or t
  misc_feature (558)..(558): n is a, c, g, or t
ggggagtgacccggcgtggctactaggagaaggacgtacggtcctgctagtagaggaatatgtcgagtttctctagggcgccccagcaatgggccacttttgctagaatatggtatctcttagatgggaaaatgcagccacctggcaaacttgctgctatggcatctataagacttcagggattacataaacctgtgtaccatgcactgagtgactgtggggatcatgttgttataatgaacacaagacacattgcattttctggaaacaaatgggaacaaaaagtatactcttcgcatactggctacccaggtggatttagacaagtaacagctgctcagcttcacctgagggatccagtggcaattgtaaaactagcctatttatggcatgctgccaaaaaaccttcacagaagaacaatgatggaaaggttgcatctttttcccaaatgagtatattccagaagatattcttaagaatttagtagaggaccttcctcaaccacganaaatacctaaacgtctagatgagtacacacaagaagaaatagacgcctntccaagattgtggactccacctgaagattatcggctataagagaataagaattgcagaaaataacagtggaagtgattgaaactttctttctgatgagtttcctctaacctaccggaatgggagtaaaaacaactggctacaggttccgccaccctgtttttaatgtgcccgaatcaccttgtgggggaaaaaggtcaaggaaaaggtgttaatcccctttcaaatagggaaaattgg

SEQ ID NO: 68233 - DNA, 1745 bp, Homo Sapiens
  misc_feature (1110)..(1156): n is a, c, g, or t
  misc_feature (1394)..(1417): n is a, c, g, or t
  misc_feature (1716)..(1716): n is a, c, g, or t
ggggcatttccggttcccttcgtttaggtcggctggaaattatgtcctccgtcggttttccgcagtttttccaccaagcgagatatttttgggagttattccctaaataactgcattatatgctcctttcatgacgaaattgctgccgtggagaagactggaggaaactcgaggaagagggagaagccgacaagtgctcgacgggctaggaactgtcctgcttgggtgttagcgtttcccgccgggccagtaaggctgagtgacccggcgtggctactaggagaaggacgtacggtcctgctagtagaggaatatgtcgagtttctctagggcgccccagcaatgggccacttttgctagaatatggtatctcttagatgggaaaatgcagccacctggcaaacttgctgctatggcatctataagacttcagggattacataaacctgtgtaccatgcactgagtgactgtggggatcatgttgttataatgaacacaagacacattgcattttctggaaacaaatgggaacaaaaagtatactcttcgcatactggctacccaggtggatttagacaagtaacagctgctcagcttcacctgagggatccagtggcaattgtaaaactagctatttatggcatgctgccaaaaaaccttcacagaagaacaatgatggaaaggttgcatctttttccagatgagtatattccagaagatattcttaagaatttagtagaggagcttcctcaaccacgaaaaatacctaaacgtctagatgagtacacacaagaagaaatagacgccttcccaagattgtggactccacctgaagattatcggctataagagaataagaattgcagaaaataacagtgaagtgattgaaactttcttctgatgagtttctctaacctacaggatggagtaaaacaactgctacagttcagcacctgttttatgtgccgaatcactgtggggaaaggtcaggaaggtgtagtccttcaataggaaattgtaattaaaatataattttatagaaccatttttatgtaatctgatttgaatgttatagttgataataataaaatcacttacttggttgaacnnnnnnnnnnnnnnnnnnnnnnnnnnnnnnnnnnnnnnnnnnnnnnnccttgtacggccgccctcggccctcaaaaaactttacctaaacccattcctttcggccgcgcgggccccgaaaggttaagcgacccatggttataatctggtttccccaggacatcctgccccaggaaatattgttttggaattcttccctcacgaaaaaacccccccggcgcgaaacacgaccacgttgggaaacaaattctttaatggaaagccccagaggggcattttatcggannnnnnnnnnnnnnnnnnnnnnnnaaaaaaaccctccgtcgggtgggataaaaccgcgtggggccccgggaaaaattaattcaaaaggggaccggctgtgaagttccttttcagggcgttttctccccaaaagggggccacccacattgcctttcttggtaatttatgttaccccccccaatccggctggcggcctttctgaggaaaacctgggggcggccttttgccattataaaccatcctcccggcccccgccgtgtggaacaccgccctctcacccaaccacgagatcgtgtggccaactctcgtggggcccccccgtntataaaaataataacaaccactggctttg

SEQ ID NO: 68234 - DNA, 481 bp, Homo Sapiens
  misc_feature (66)..(74): n is a, c, g, or t
aacacttatgaagtattagtaatttattgctaagaaaagaatattttaagaaaattaagtctaaannnnnnnnnaatgtagtatattccagaagatattcttaagaatttagtagaggagcttcctcaaccacgaaaaatacctaaacgtctagatgagtacacacaagaagaaatagacgccttcccaagattgtggactccacctgaagattatcggctataagagaataagaattgcagaaaataacagtgaagtgattgaaactttcttctgatgagtttctctaacctacaggatggagtaaaacaactgctacagttcagcacctgttttatgtgccgaatcactgtggggaaaggtcaggaaggtatagtccttcaataggaaattgtaattaaaatataattttatagaaccatttttatgtaatctgatttgaatgttatagttgataataataaaatcacttacttggttg

SEQ ID NO: 68235 - DNA, 2600 bp, Homo Sapiens
  misc_feature (2266)..(2266): n is a, c, g, or t
  misc_feature (2314)..(2430): n is a, c, g, or t
cacccggaagcggcgagccggaagtggggttagccaggttatccccaggggtggagaagcggaggcccaggaggagggggaataaagaaggtggaggatcctggctaccactctgaatccgataccgcttctcttagacctcagcgacagaaaaagggaagggtgtctcatcccccttcctcctctcctccctgtcctgagccttagccatggccgaggcaggggctgggctgagcgagaccgtcactgagacaacggttaccgtgacaaccgagcccgagaaccggagccttaccatcaaacttcggaaacggaagccagagaaaaaggtagaatggacaagtgacactgtggacaatgaacacatgggccgccgctcatccaaatgctgctgtatttatgagaaacctcgggcctttggcgagagctccacggaaagtgatgaggaggaagaagagggctgtggtcatacacactgtgtacgtggccaccgcaaaggacggcgtcgtgcaaccctaggaccgacccccaccacccctccccagcctcctgacccttcccagacccctccagggccaatgcagcactaaatccctctctcctccagcattcctgtgtctgtctggccctaaatgtatccatgtggctacttctccagccccctccttccctctcttctgcctgatagagggaagaggaagaggaggacgaacagagatcctgaaattctgacttgctgctattccagaacccagcctcctgggtttccccagtcctcatttttcctcccaatacccacccttctctctcgagggatctaggcaccttggtcccagtgtccttccttttgttctcactgccaaactgcctgtccctgggatctagttatcttgggccctgcactctcaacatgagtagcgaacacttaaattgggttttcaacagtcccagctttcactgccagggtcccagtcagattccaggaatttgcgccctaactttgcttgctaatcctggtttagagctatcccactaaaatatttaatcctaattcttagtccttgcctgtgagatatgaggtcttacaggagacctcagagctcccagcccttctcctcctgctaacccttctcacaccctcaagaggagttagaaaagaggtccttgtcattctcacctcttatggaaaatggaataagaaataatcatatcctttcttcccacccttctcctgttatttaggatttctgacaaagctggcttgagattggtcacttagagccgactgtctcctctgccttttgtttttcagcttcagagacagatccaatatagtcccagggacctgggtctctgggagaggaaggaagagggagggagcaaagagattggggtatgtcccctgtagtacactcttacctcttacttcctagactttgatttctccggcagcccagatgttcagttctcttggcccctctctaccccttactgggatctggttttcattttccggtccttttgccatacacagttacagagatcagtcaaatccataccaccactgagatctcatttattgccacagatgcacaaaataaataacccaaaatcacaaaatgtgttaaatatgggcccatttatacttatggggaagggtgtgagactatacacaaggatgagtttggagatgtctgaagtattcccaggttgaggaggagagaggggaaatagcaccattggttcctttccgtgagtatgtgcggggagaagtttcaagaaggttcttatggaaaaaaggctgagagcataaaaagcagtcataggaggttggggaactagcttgtccctccccacccccggatcctgcaaaagaggtacaaagcttcccagagggccacagggcccagaccagagtcaagcctcttgttttaggagaaacctcagtggacaggcagggtagcccagtccttagatctgtggggaaggccctgagcccttctggagctaggagtggcaagagtgggagtcaagtatttgaccagcagagcctctatgtaggaatcatggtcactttaccaatactgatggggagggcctgttccccattgcaggcctagaatggtttgaatgggagaagtcaggaagtactgtagtagctgtaggggagagaagttctgagagccagaaggcaggaatggatttggttttgagcagggacgtggaaacgtggagaccaggtgaggtctcattattttggggcganaatgtgggttgctattaatactcctgcaatcctcgtgccgaattcttnnnnnnnnnnnnnnnnnnnnnnnnnnnnnnnnnnnnnnnnnnnnnnnnnnnnnnnnnnnnnnnnnnnnnnnnnnnnnnnnnnnnnnnnnnnnnnnnnnnnnnnnnnnnnnnnnnnnngtgtaaagctggggtgctatgagtgagctactcacattactgcgttgcgctcactgcccgcttcagtcgggaacctgtcgtccagctgcattattgatcggcacgcgcggggacagcggttggtatgggcgtctccgttctcctcacgatcctggctcgtcttcgcgggg

SEQ ID NO: 68236 - DNA, 511 bp, Homo Sapiens
caggttatccccaggggtggagaagcggaggcccaggaggagggggaataaagaaggtggaggatcctggctaccactctgaatccgataccgcttctcttagacctcagcgacagaaaaagggaagggtgtctcatcccccttcctcctctcctccctgtcctgagccttagccatggccgaggcaggggctgggctgagcgagaccgtcactgagacaacggttaccgtgacaaccgagcccgatgatttggggaggaagacggagaaacagcaaggattatattttcctttgaagagttgctgggacctttcctaggagaaccggagccttaccatcaaacttcggaaacggaagccagagaaaaaggtagaatggacaagtgacactgtggacaatgaacacatgggccgccgctcatccaaatgctgctgtatttatgagaaacctccggcctttggcgagagctccacggaaagtgatgaggaggaagaagagggctgtggtcat

SEQ ID NO: 68237 - DNA, 943 bp, Homo Sapiens
  misc_feature (91)..(129): n is a, c, g, or t
  misc_feature (132)..(166): n is a, c, g, or t
  misc_feature (265)..(273): n is a, c, g, or t
  misc_feature (420)..(420): n is a, c, g, or t
  misc_feature (773)..(807): n is a, c, g, or t
aaagaaaccttggctaaatataaggaaaacttccaaaactcaaattaaagggggggcccgggccttaaggcccttccgggtttccgggagnnnnnnnnnnnnnnnnnnnnnnnnnnnnnnnnnnnnnnncgnnnnnnnnnnnnnnnnnnnnnnnnnnnnnnnnnnncagtcgacggtaccggacatatgcccgggaattcggccattacggccgggagttgaaaaagcattttaagatgatacagaaagtatccaaaacaacagnnnnnnnnngccacgtcattttagatgaattgcgtgccttaaaatggtgaacgttagaaaattaaacaagtctggattccacaagtagttccaagtcaccaagtgacaaaaacaaggttaacattaaaaaagaaaaacaacaacaacgacaaaaangctccaagctgcagtggatttaattatgaggctaaaactacctcatactttccttggaagaactaattagctatggtttattgtagggtttcgtttgtttgttttttaaagcaaatgatttccatattcctgattgatcttttttgtcatctttgcttcaaaattacataaaaggtgctcctttcccccttcttttatacaagtttctgtgttcatatggtgaatagaaaagtttctgaacaacttttttggaacattttctatctatattccaaagcatgtaatatatacataaaaacgatttgttaaactggtccttagtcattgtgtataattagaaatgaagtttgggnnnnnnnnnnnnnnnnnnnnnnnnnnnnnnnnnnntaacttattccttttttgcatatttgtatagccttctagaatcagaaataacctttttgcatattcttttattgttctgacttttcaagacctattatttttttacataggtcaataaacaaaaggtgtgctactg

SEQ ID NO: 68238 - DNA, 1089 bp, Homo Sapiens
  misc_feature (21)..(21): n is a, c, g, or t
  misc_feature (413)..(421): n is a, c, g, or t
  misc_feature (518)..(569): n is a, c, g, or t
  misc_feature (918)..(952): n is a, c, g, or t
gcacgagggatgttggagcgnccgcggctgtaggcttttcatgaagttctgaatgagtgtaaatgtttttttaggatactataaagagtgatgtttttcataagcaccataaaatgggttctggaaaaactgattaccttagcatcctgtaatataacttatggtagcagattggggaaaatgaagcagcccactgaataattgacaaagtctgcttggagaacattctaaggtacaatatcatggagctcctttttcctttctccactaattgcgtgatgagctattgttctggctggtaattctccaactcggctgtcatttgaagtggcagacttaatatggaaagtttttataattatgagtttgaaaaagcattttaagatgatacagaaagtatccaaaacaacagnnnnnnnnngccacgtcattttcgatgaattgcgtgccttaaaatggtgaacgttagaaaattaaacaagtctggattccacaagtagttccaagtcaccaagtgnnnnnnnnnnnnnnnnnnnnnnnnnnnnnnnnnnnnnnnnnnnnnnnnnnnntccaagctgcagtggatttaattatgaggctaaaactacctcatactttccttggaagaactaattagctatggtttattgtagggttttgtttgtttgttttttaaagcaaatgatttccatattcctgattgatcttttttgtcatctttgcttcaaaattacataaaaggtgctcctttcccccttcttttatacaagtttcttgttcatattgtgaatagaaaagtttctgaacaacttttttggaacattttctatctatattccaaagcatgtaatatatacataaaaacgatttgttaaactggtccttagtcatttgtataattagaaatgaagtttgggnnnnnnnnnnnnnnnnnnnnnnnnnnnnnnnnnnntaacttattccttttttgcatatttgtatagccttctagaatcagaaataacctttttgcatattcttttattgttctgacttttcaagacctattatttttttacataggtcaataaacagaaaggtgtgctactg

SEQ ID NO: 68239 - DNA, 1207 bp, Homo Sapiens
  misc_feature (83)..(83): n is a, c, g, or t
agatgagctgtcggagcaggatgaaatgttcagaggccggacagcagtgtttgctgatcaagtgatagttggcaatgcctctntgcggctgaaaaacgtgcaactcacagatgctggcacctacaaatgttatatcatcacttctaaaggcaaggggaatgctaaccttgagtataaaactggagccttcagcatgccggaagtgaatgtggactataatgccagctcagagaccttgcggtgtgaggctccccgatggttcccccagcccacagtggtctgggcatcccaagttgaccagggagccaacttctcggaagtctccaataccagctttgagctgaactctgagaatgtgaccatgaaggttgtgtctgtgctctacaatgttacgatcaacaacacatactcctgtatgattgaaaatgacattgccaaagcaacaggggatatcaaagtgacagaatcggagatcaaaaggcggagtcacctacagctgctaaactcaaaggcttctctgtgtgtctcttctttctttgccatcagctgggcacttctgcctctcagcccttacctgatgctaaaataatgtgccttggccacaaaaaagcatgcaaagtcattgttacaacagggatctacagaactatttcaccaccagatatgacctagttttatatttctgggaggaaatgaattcatatctagaagtctggagtgagcaaacaagagcaagaaacaaaaagaagccaaaagcagaaggctccaatatgaacaagataaatctatcttcaaagacatattagaagttgggaaaataattcatgtgaactagacaagtgtgttaagagtgataagtaaaatgcacgtggagacaagtgcatccccagatctcagggacctccccctgcctgtcacctggggagtgagaggacaggatagtgcatgttctttgtctctgaatttttagttagatgtgctgcaatgttgctctgaggaagcccctggaaagtctatcccaacatatccacatcttacgagttccacaaattaacctgtagtatgtaccctaagacgctgctaattgactgccacttcgcaactcaggggcggctgcattttagtaatgggtcaaatgattcactttttatgatgcttccaaaggtgccttggcttctcttcccaactgacaaatgccaaagttgag

SEQ ID NO: 68240 - DNA, 801 bp, Homo Sapiens
gtttggggccagagtgggcgaggcgcggaggtctggcctgtaaagtagtcgcggagacggggtgctggtttgcgtcgtagtctcctgcagcgtctggggtttccgttgcagtcctcggaaccaggacctcggcgtggcctagcgagttatggcgacgaaggccgtgtgcgtgctgaagggcgacggcccagtgcagggcatcatcaatttcgagcagaaggaaagtaatggaccagtgaaggtgtggggaagcattaaaggactgactgaaggcctgcatggattccatgttcatgagtttggagataatacagcaggctgtaccagtgcaggtcctcactttaatcctctatccagaaaacacggtgggccaaaggatgaagagaggcatgttggagacttgggcaatgtgactgctgacaaagatggtgtggccgatgtgtctattgaagattctgtgatctcactctcaggagaccattgcatcattggccgcacactggtggtccatgaaaaagcagatgacttgggcaaaggtggaaatgaagaaagtacaaagacaggaaacgctggaagtcgtttggcttgtggtgtaattgggatcgcccaataaacattcccttggatgtagtctgaggccccttaactcatctgttatcctgctagctgtagaaatgtatcctgataaacattaaacactgtaatcttaaaagtgtaattggtgtgacttttttcagagttgcttttaaagtaccctggtagtgagaaaactgattttatggatccacctgggaagaattt

SEQ ID NO: 68241 - DNA, 952 bp, Homo Sapiens
ggagcagtggtatcaacgagagtgcccattacggccgggggcggagacggggtgctggtttgcgtcgtagtctcctgcagcgtctggggtttccgttgcagtcctcggaaccaggacctcggcgtggctagcgagttatggcgacgaaggccgtgtgcgtgctgaagggcgacggcccagtgcagggcatcatcaatttcgagcagaaggaaagtaatggaccagtgaaggtgtggggaagcattaaaggactgactgaaggcctgcatggattccatgttcatgagtttggagataatacagcaggctgtaccagtgcaggtcctcactttaatcctctatccagaaaacacggtgggccaaaggatgaagagaggcatgttggagacttgggcaatgtgactgctgacaaagatggtgtggccgatgtgtctattgaagattctgtgatctcactctcaggagaccattgcatcattggccgcacactggtggtccatgaaaaagcagatgacttgggcaaaggtggaaatgaagaaagtacaaagacaggaaacgctggaagtcgtttggcttgtggtgtaattgggatcgcccaataaacattcccttggatgtagtctgaggccccttaactcatctgttatcctgctagctgtagaaatgtatcctgataaacattaaacactgtaatcttaaaagtgtaattgtgtgactttttcagagttgctttaaagtacctgtagtgagaaactgatttatgatcacttggaagatttgtatagttttataaaactcagttaaaatgtctgtttcaatgacctgtattttgccagacttaaatcacagatgggtattaaacttgtcagaatttctttgtcattcaagcctgtgaataaaaaccctgtatggcacttattatgaggctattaaaagaatccaaattcaaact

SEQ ID NO: 68242 - DNA, 948 bp, Homo Sapiens
aaaggttgttgaacaaaaattcaaaatactgttgctaaagtattaagatttttaggattataccttacttataggcccgtcattcatttggcatgaaattttgagttttattcactttcactttcctttttttccaaagcaattaaaaaaactgccaaagtaagagtgactgcggaactaaggttactgtaacttaccatggaggattaagggtagcgtgtggtggtctacaacatagttatttgggttttagtatttcatttagacagcaacacttacctaatgtttaaaggtaatgtctttgcaacaccaagaaaaagctgtgagtagtagtttctacttgtaaactactaaatattagtatatctctctactaggattaatgttatttttctaatattatgaggttcttaaacatcttttgggtattgttgcgaggaggtagtgattacttgacagcccaaagttatcttcttaaaattttttacaggtccatgaaaaagcagatgacttgggcaaaggtggaaatgaagaaagtacaaagacaggaaacgctggaagtcgtttggcttgtggtgtaattgggatcgcccaataaacattcccttggatgtagtctgaggccccttaactcatctgttatcctgctagctgtagaaatgtatcctgataaacattaaacactgtaatcttaaaagtgtaattgtgtgactttttcagagttgctttaaagtacctgtagtgagaaactgatttatgatcacttggaagatttgtatagttttataaaactcagttaaaatgtctgtttcaatgacctgtattttgccagacttaaatcacagatgggtattaaacttgtcagaatttctttgtcattcaagcctgtgaataaaaaccctgtatggcacttattatgaggctattaaaagaattcaaattcaaact

SEQ ID NO: 68243 - DNA, 969 bp, Homo Sapiens
  misc_feature (83)..(117): n is a, c, g, or t
aaacctgtatagactcactatagggcgctagctcgcgagcgaacgacgagcgcagcgaagtagtggagcgaggaagcggccgnnnnnnnnnnnnnnnnnnnnnnnnnnnnnnnnnnncagtcgacggtaccggacatatgcccgggaattcggccattacggccggggttttgcgtcgtagtctcctgcagcgtctggggtttccgttgcagtcctcggaaccaggacctcggcgtggcctagcgagttatggcgacgaaggccgtgtgcgtgctgaagggcgacggcccagtgcagggcatcatcaatttcgagcagaaggaaagtaatggaccagtgaaggtgtggggaagcattaaaggactgactgaaggcctgcatggattccatgttcatgagtttggagataatacagcaggctgtaccagtgcaggtcctcactttaatcctctatccagaaaacacggtgggccaaaggatgaagagaggcatgttggagacttgggcaatgtgactgctgacaaagatggtgtggccgatgtgtctattgaagattctgtgatctcactctcaggagaccattgcatcattggccgcacactggtggtccatgaaaaagcagatgacttgggcaaaggtggaaatgaagaaagtacaaagacaggaaacgctggaagtcgtttggcttgtggtgtaattgggatcgcccaataaacattcccttggatgtagtctgaggccccttaactcatctgttatcctgctagctgtagaaatgtatcctgataaacattaaacactgtaatcttaaaagtgtaaattgtgtgactttttcagagttgctttaaagtacctgtagtgagaaactgatttatgatcacttggaagatttgtatagttttataaaactcagtttaaaatgtctgtttccatggacctgtattttgcccagacttaaatccccggatg

SEQ ID NO: 68244 - DNA, 1086 bp, Homo Sapiens
  misc_feature (648)..(648): n is a, c, g, or t
  misc_feature (866)..(869): n is a, c, g, or t
  misc_feature (871)..(879): n is a, c, g, or t
  misc_feature (881)..(883): n is a, c, g, or t
agaagttagccattaaggacatcgggatagaaatgtattacaaaatcagagctggtaccggaccggaatttccgggatgtctcctgcagcgtctggggtttccgttgcagtcctcggaaccaggacctcggcgtggcctagcgagttatggcgacgaaggccgtgtgcgtgctgaagggcgacggcccagtgcagggcatcatcaatttcgagcagaaggctgtaccagtgcaggtcctcactttaatcctctatccagaaaacacggtgggccaaaggatgaagagaggcatgttggagacttgggcaatgtgactgctgacaaagatggtgtggccgatgtgtctattgaagattctgtgatctcactctcaggagaccattgcatcattggccgcacactggtggtccatgaaaaagcagatgacttgggcaaaggtggaaatgaagaaagtacaaagacaggaaacgctggaagtcgtttggcttgtggtgtaattgggatcgcccaataaacattcccttggatgtagtctgaggccccttaactcatctgttatcctgctagctgtagaaatgtatcctgataaacattaaacactgtaatcttaaaagtgtaattgtgtgactttttcagagttgctttanagtacctgtagtgagaaactgatttatgatcacttggaagatttgtatagttttataaaactcagttaaaatgtctgttttcatgacctgtattttgccagacttaaatcacagatgggtattaaacttgtcagaatttctttgtcattcaagcctgtgaataaaaccctgtatggcactttatatgaagctattaaaagaatccaaattcaaacttnnnnannnnnnnnnannnaaaaaagggcggccgctctaaagtatccctcaagggggcccaagcttacgcgtacccagctttccttgtacaagggggtccctaaaagtggagcccgattaataaacttaggccctgggcccgccgtttttacaaaactcccggaatggggaaaacgggctaaactttgggaaattttgttgaaagggaacccttaacctttt

SEQ ID NO: 68245 - DNA, 557 bp, Homo Sapiens
  misc_feature (436)..(480): n is a, c, g, or t
gaaactacgctaggtacgaggctgggttcgaatcggcacgagggatggagacgccgggcgcatcagcgtcgtccttgttgcttcccgccgcgtccaggcccccgaggaagcgcgaggcgggagaggctggggctgcgacgagcaagcagcgggtcctggacgaggaagagtatatctgagggcctccagacggtcatccaaagggatttctttcctgatgtggagaagctccaggcacagaaggagtacctggaagcctgaggagaatggagacttggaactggatgcgccagattgccatcaatgttttggctctgccttgtggcaagatgtcccgggagcccccgccaccctatgtgactccagccacatttgaaacccctgaggtgcatgcaggcactggagtggtgggcaacaatgcccaggccccgcggcnnnnnnnnnnnnnnnnnnnnnnnnnnnnnnnnnnnnnnnnnnnnnccgctgcccagcctagatgtcttcctgagccgctacacgagtgaggacaatgcctccttccaggagatcatggaggt

SEQ ID NO: 68246 - DNA, 1112 bp, Homo Sapiens
  misc_feature (431)..(467): n is a, c, g, or t
gctagtacgaggctgggtgggaattcggcacgagggcgatggagacgccgggcgcatcagcgtcgtccttgttgcttcccgccgcgtccaggcccccgaggaagcgcgaggcgggagaggctggggctgcgacgagcaagcagcgggtcctggacgaggaagagtatatcgagggcctccagacggtcatccaaagggatttctttcctgatgtggagaagctccaggcacagaaggagtacctggaagccgaggagaatggagacttggaacggatgcgccagattgccatcaagtttggctctgccttgggcaagatgtcccgggagcccccgccaccctatgtgactccagccacatttgaaacccctgaggtgcatgcaggcactggagtggtgggcaacaagcccaggccccgcggccgaggcctnnnnnnnnnnnnnnnnnnnnnnnnnnnnnnnnnnnnnccgctgcccagcctagatgtcttcctgagccgctacacgagtgaggacaatgcctccttccaggagatcatggaggtggccaaggagagaagccgggcacgccacgcttggctctaccaggctgaggaagagtttgagaagaggcagaaagataatctcgaactcccgtcagcagagcaccaggccatcgagagcagccaggccagtgtggagacctggaagtacaaggccaagaattccctcatgtactatccagagggtgtccctgacgaggagcagctgtttaagaagccccggcaggtggtacataagaacacgcgcttccttagggaccccttcagccaagccctgagcaggtgccagctccagcaggcagccgccctcaatgcccagcacaaacagggcaaggtggggccccggatggcaaggagctgatcccccaggagtcccctcgagtgggtgggatttggatttgttgccactccttcccctgcccctggtggtgaacagtccccgatgatacccttgggggggaaggtttaaaaaccccccttgtaaatttgagggtccgaaaacccccctacgggggaacggaaccccgggcccgccttttaagaacctgggaacccgggccccccggggaac

SEQ ID NO: 68247 - DNA, 699 bp, Homo Sapiens
tacggtttctcagaaagaaacatttaataggaacttacaaacagaagcaatgtttctagcagccactaaatggcggcactcaccctcccaaaagtaccctttatataacaagcatttttggcaaaacgtgtagctagtcatatctcagactttcttgtgaaacacctgaacactggggaggttagataagcatctttatgaggggttatctgtactaccggcactgtttaaagacattgctgcagaatatcttggtatgcaggagtcaaacagcagtcatcatgccagctgctcttcaagatgacatcactcttacaatgcaacaggctgttttcctacactcgacccctcgaaaccagtccttaaaatcttacatgcctgcttcttctgtgatagtccctggacctagagggagggtgcttgatattgtatggctttagtagtattgcaatggaaatggaaaacagattgggtccagtggaattccacaagagggagatttgcaggcttggttgaatcatctatatagtcttcataataccatgaagaagtaaaacaatgagaaatacataacattaataattggagtagtagaaatctaaataaagtaatatgatgtttaagatatcccttgccttaatagcctataaatatgggaagagtgactatcatcttctgaatttcaagacccatatattc

SEQ ID NO: 68248 - DNA, 783 bp, Homo Sapiens
  misc_feature (754)..(754): n is a, c, g, or t
ctagccaaggtatgggatttttagcagacaaaaaaccagaacaaggccagcgggtctcaggaatacttgttaaaagaaactttaattatcacatactttctccttgcgacctgtccaattatactgacctggccatgagcacggtgaagcagacccaagccattccatatactggtccctttaatttgctctgttaccagctgcagaaattgacaggtgatgtggaagaattagaaattcaagaaaaacctgctctgaaagtgttcaaaaatattactgtaatacaagaaccaggcatggtggtattagaatggctggcaaacccttctaatgatatgtatgcagatacagtaacaactgtgatattggaagttcagtcaaatcccaaaataagaaaaggtgcagtacagaaggtttctaaaaaattagaaatgcacgtttacagcaagaggttggagatcatgctccaggacatatttggagaagactgtgtaagtgtaaaggatgactctattcttagcgtcacagtggacgggaaaactgccaaccttaacttggagacacggactgtagaatgtgaagagggaagtgaagacgatgaatccctccgagaaatggtggagctggctgcacagagactgtacgaggccctgacgccagttcactgagactgtgcctgtatatgaactttgaaaaaatacttgactctacttttgttacctaaaataaaatgcattcgtttctctgggaaacncccaagagcccccaaaacaaaaaatatgt

SEQ ID NO: 68249 - DNA, 744 bp, Homo Sapiens
  misc_feature (651)..(666): n is a, c, g, or t
ccaggtagtcataactatgtaggcagtgctaaatgcattttagaaatggtgacttctgtggttttcctagcatttgtctctaacaaatggtgaaataattactcatggccctctctgccattgtctttcattttttcacagtgaaattagacccctttacttcaccattctgccactgcaaattaagtataaagaaaatagcaagagtgtccacaccagtagacagtaagcttctctacctgtaagtgatgaaatcatagctaatgcacttgccatggagttttcaagatgattggtgtcagacagttttcactttgtttaaaaagtgttggtggccttttgtggtggtgttacaatcctctgggggcttaggaggatgttgatgcaacttttagaagcttttaatttcaaaaacaactcaaaaatctgaaggacagtcatagctgccactcagccccagttagtcaaaccccagtgacctttgcccctggttgccaagggctttgcaacatcaagcagggaaataaggatctgtctgtttagtggataccgtgtatcctttaatagaccaggtaacagttcgtgttagtttagactattgttttgtactgtactttcttgggtggcagaggaaagaaaagtaaaacattnnnnnnnnnnnnnnnnctgcgttctttaaattctgtattattagcaacctctgttgtacatagtgtttgataataaagtattaatttgattctt

SEQ ID NO: 68250 - DNA, 181 bp, Homo Sapiens
  misc_feature (21)..(21): n is a, c, g, or t
  misc_feature (140)..(140): n is a, c, g, or t
  misc_feature (152)..(152): n is a, c, g, or t
  misc_feature (159)..(159): n is a, c, g, or t
tggggtttgactaactggggntgagtggcagctatgactgtccttcagatttttgagttgtttttgaaattaaaagcttcaaaaagttgcatcaacatcctcctaagcccccagaggtggtgttacaatcctctgggggnttaggaggatgntgatgcnactttttgaaattaaaagcttc

SEQ ID NO: 68251 - DNA, 601 bp, Homo Sapiens
  misc_feature (57)..(57): n is a, c, g, or t
ccacgcactgtgactgacttccatgtgtgaaggcctgcagttaattctcctgtgtcntgaatggttgcgagatgagttgtccagacccttagtgaaatgatgtgggaaggaacaggaatgctgtggctctgaagaaggtagtagaacatcccacacctgctaataagcacattttgcaaactcagttgactcacctcagatttgcctagtgaaaactgaagggctggatgtagacccagagagcagggtggacagagcccatgctggaagtactgagcatcaggactgtatggggctggctttagcatcatcattctgtgcaaagacaaataattaatgtcacactgtctgaaattttcaccaaaaccaaaaaggcgcattaacatgattgttccaacctcatggtttttcaagtgtgagcgcccagagacctcttcagaggctaagagagcatgcgctgccacagctgttagcatttggagacgtaattacaatgcccccactccccgcaccaaacctgggtttttctaccgtttttgtagatgtcatgatgtcacgacccctgcaccctgaaaaaaataaatgtttttaaggacaaaaa

SEQ ID NO: 68252 - DNA, 471 bp, Homo Sapiens
cccgttggtggcaatcacagtctttaatcattaattgtcatatttctgatttgttagcaagtgccagcttgtaggctggttgaagtacagaactcagaggaaaaaagaaattaaattttagctttctggagagcagcccctctctggcaccatcaaacacttctttgtttcccttcaacttggaactcttcaaacatcaggggttgtgagggtttggccattcttttatcttgggtccatgtgagtgacagaaatggtgcggcctgggaaagatctccctcctttacattttctcttctccctcctcctccttattctaaaactgtgcctccaacagaggggcaggggctcttgtagagagatccctggcccaggacaggagatgccaaatctaatttatctcactgagggcctttgagaaaaacgcttctgggccaggctcagtggctcatgcctatataatcctcgtgc

SEQ ID NO: 68253 - DNA, 1083 bp, Homo Sapiens
  misc_feature (85)..(243): n is a, c, g, or t
  misc_feature (245)..(258): n is a, c, g, or t
gagaggcgatgtaatataaacaagtggttaaaaaagcaggctggtaccggtcggaattcccgggatatcgtcgaccacgcgtcgnnnnnnnnnnnnnnnnnnnnnnnnnnnnnnnnnnnnnnnnnnnnnnnnnnnnnnnnnnnnnnnnnnnnnnnnnnnnnnnnnnnnnnnnnnnnnnnnnnnnnnnnnnnnnnnnnnnnnnnnnnnnnnnnnnnnnnnnnnnnnnnnnnnnnnnnnnnnnnncnnnnnnnnnnnnnntacaatttttatttctttaacttttttaagtaaggttaatggtatataaaaatggcttcggacaaaatatctctgagttctgtgtattttcagtcaaaactttaaacctgtagaatcaatttaagtgttggaaaaaatttgtctgaaacatttcataatttgtttccagcatgaggtatctaaggatttagaccagaggtctagattaatactctatttttacatttaaaccttttattataagtcttacataaaccatttttgttactctcttccacatgttactggataaattgtttagtggaaaataggctttttaatcatgaatatgatgacaatcagttatacagttataaaattaaaagtttgaaaagcaatattgtatatttttatctatataaaataactaaaatgtatctaagaataataaaatcacgttaaaccaaatacacgtttgtctgtattgttaagtgccaaacaaaggatacttagtgcactgctacattgtgggatttatttctagatgatgtgcacatctaaggatatggatgtgtctaattttagtcttttcctgtaccaggtttttcttacaatacctgaagacttaccagtattctagtgtattatgaagctttcaacattactatgcacaaactagtgtttttcgatgttactaaattttaggtaaatgctttcatggcttttttcttcaaaatgttactgcttacatatatcatgcatagatttttgcttaaagtatgatttataatatcctcattatcaaagttgtatacaataatatataataaaataacaaatatgaat

SEQ ID NO: 68254 - DNA, 2920 bp, Homo Sapiens
  misc_feature (2099)..(2099): n is a, c, g, or t
agagtatgaagtcgacggcgcgccgaattcggcacgaggtgtgcgccggtccctgggcctgagctccggctccggctggggcgcctgcgatgtctcaagatggcggagctgggcgaattaaagcacatggtgatgagtttccgggtgtctgagctccaggtgcttcttggctttgctggccggaacaagagtggacggaagcacgagctcctggccaaggctctgcacctcctgaagtccagctgtgcccctagtgtccagatgaagatcaaagagctttaccgacgacgctttccccggaagaccctggggccctctgatctctcccttctctctttgccccctggcacctctcctgtaggctcccctggtcctctagctcccattcccccaacgctgttggcccctggcaccctgctgggccccaagcgtgaggtggacatgcacccccctctgccccagcctgtgcaccctgatgtcaccatgaaaccattgcccttctatgaagtctatggggagctcatccggcccaccacccttgcatccacttctagccagcggtttgaggaagcgcactttacctttgccctcacaccccagcaagtgcagcagattcttacatccagagaggttctgccaggagccaaatgtgattataccatacaggtgcagctaaggttctgtctctgtgagaccagctgcccccaggaagattattttccccccaacctctttgtcaacggtcaatgggaaactgtgccccctgccgggttaccttcccccaaccaagaatggggccgagcccaagaggcccagccgccccatcaacatcacacccctggctcgactctcagccactgttcccaacaccattgtggtcaattggtcatctgagttcggacggaattactccttgtctgtgtacctggtgaggcagttgactgcaggaacccttctacaaaaactcagagcaaagggtatccggaacccagaccactcgcgggcactgatcaaggagaaattgactgctgaccctgacagtgaggtggccactacaagtctccgggtgtcactcatgtgcccgctagggaagatgcgcctgactgtcccttgtcgtgccctcacctgcgcccacctgcagagcttcgatgctgccctttatctacagatgaatgagaagaagcctacatggacatgtcctgtgtgtgacaagaaaggctccctatgaatctcttatcattgatggtttatttatggagattcttagttcctgttcagattgtgatgagatccaattcatggaagatggatcctggtgcccaatgaaacccaagaaggaggcatctgaggtttgccccccgccagggtatgggctggatggcctccagtacagcccagtccaggggggagatccatcagagaataagaagaaggtcgaagttattgacttgacaatagaaagctcatcagatgaggaggatctgccccctaccaagaagcactgttctgtcacctcagctgccatcccggccctacctggaagcaaaggagtcctgacatctggccaccagccatcctcggtgctaaggagccctgctatgggcacgttgggtggggatttcctgtccagtctcccactacatgagtacccacctgccttcccactgggagccgacatccaaggtttagatttattttcatttcttcagacagagagtcagcactatggcccctctgtcatcacctcactagatgaacaggatgcccttggccacttcttccagtaccgagggaccccttctcactttctgggcccactggcccccacgctggggagctcccactgcagcgccactccggcgcccccctcctggccgtgtcagcagcattgtggcccctgggggggccttgagggaggggcatggaggacccctgccctcaggtccctctttgactggctgtcggtcagacatcatttccctggactgagttccctggattatggaaacttcgctgtcccccaacactgagcaagtatgctgtggagtcccaaccccagctactctgatccctctgggggctctggccaagggccagancagaccttcacagatgcctacttttggcctcatctctgcctgacaaggccagcacccaaagggttaatatttaacctctttttaaggacactggggtctgtttctggaaatgttctttagatggtggcacattcctttgggtatgttaacctaggcagtgggaggcaaatgggatggtatgtgagctaggagaagggctgaaccctcagccttgactatgtctagagcctcttggggaaggggcacctctcttgaaccccaaatgctctctcttcttattacccaaacccatggctctatttcttcttcacatccattgtctcttcatgtctattccattcccttcggccaaacagacaggtggaaaaactgagacaggcagtttcagagatggacagagaactttattttggattgtggatgtggacttttttgtacataaataagaaaaaccaaaatactccaaagatgacttcccctgcctcctactccagtatgacagaggaggatgtaaggccttagccatgatctgcaggggtctgggagtcaggcccggcctattgcttgggtctctctctatttatatatctaagttcacagtgtttcttattcccccctaagcttctagaggctcatggccctgtagttaggcctggctcattctgcacctttccagggaggtggaaggaccctgtgccctccttcccaatcttctttttcaggctcgccaaggcctaggacctatgttgtaattttactttttatttctaaagttgtagtgaagctctcacccataataaaggttgtgaatgttcaaaaaa
